(19) United States
(12) Patent Application Publication
(10) Pub. No.: US 2025/0305002 A1
(43) Pub. Date: Oct. 2, 2025

(54) RECRUITMENT IN TRANS OF GENE EDITING SYSTEM COMPONENTS

(71) Applicant: Flagship Pioneering Innovation VI, LLC, Cambridge, MA (US)

(72) Inventors: Anne Helen Bothmer, Cambridge, MA (US); Jeffrey lan Boucher, Cambridge, MA (US); Cecillia Giovanna Silvia Cotta-Ramusino, Cambridge, MA (US); Ananya Ray, Melrose, MA (US); Carlos Sanchez, Boston, MA (US); Barrett Ethan Steinberg, Somerville, MA (US)

(21) Appl. No.: 18/690,120

(22) PCT Filed: Sep. 7, 2022
(86) PCT No.: PCT/US2022/076064

§ 371 Date: Mar. 7, 2024

Related U.S. Application Data
(60) Provisional application No. 63/242,003, filed on Sep. 8, 2021.

(51) Int. Cl. C12N 15/90; C12N 9/12; C12N 9/22; C12N 15/11

(52) U.S. Cl. CPC C12N 15/907; C12N 9/1276; C12N 9/226; C12N 15/11; C12N 2310/20

(57) ABSTRACT

The disclosure provides, e.g., compositions, systems, and methods for targeting, editing, modifying, or manipulating a host cell's genome at one or more locations in a DNA sequence in a cell, tissue, or subject.

### CROSS REFERENCE TO RELATED APPLICATIONS

[0001] This application is a U.S. National Phase Application under 35 U.S.C. § 371 of International Application No. PCT/US2022/076064, filed Sep. 7, 2022, which claims the benefit of U.S. Provisional Application No. 63/242,003, filed Sep. 8, 2021. The contents of the aforementioned applications are hereby incorporated by reference in their entirety.

### SEQUENCE LISTING

[0002] The instant application contains a Sequence Listing which has been submitted electronically in XML format and is hereby incorporated by reference in its entirety. Said XML copy, created on Sep. 20, 2024, is named V2065-7030US_SL.xml and is 23,012,341 bytes in size.

### BACKGROUND

[0003] Integration of a nucleic acid of interest into a genome occurs at low frequency and with little site specificity, in the absence of a specialized protein to promote the insertion event. Some existing approaches, like CRISPR/Cas9, are more suited for small edits that rely on host repair pathways, and are less effective at integrating longer sequences. Other existing approaches, like Cre/loxP, require a first step of inserting a loxP site into the genome and then a second step of inserting a sequence of interest into the loxP site. There is a need in the art for improved compositions (e.g., proteins and nucleic acids) and methods for inserting, altering, or deleting sequences of interest in a genome.

### SUMMARY OF THE INVENTION

[0004] This disclosure relates to novel compositions, systems and methods for altering a genome at one or more locations in a host cell, tissue or subject, in vivo or in vitro. In particular, the invention features compositions, systems and methods for inserting, altering, or deleting sequences of interest in a host genome.

[0005] As demonstrated in this disclosure, Applicants have discovered compositions and mechanisms for enabling editing sequences of interest in a host genome by delivering gene modifying polypeptide, or a polynucleotide encoding such polypeptide, in conjunction with separate RNA template elements, including a trans template RNA element. The present disclosure relates, in part, to association of a trans template RNA to a gene modifying polypeptide:sgRNA:target genomic DNA complex by two or more interactions. Without wishing to be bound by theory, it is has been found that such association by way of two or more interactions or points of anchoring can achieve high rewriting activity, e.g., for achieving single or several nucleotide long edits. As described herein, examples of two of more interactions include, for example, 1) an RRS:RBP interaction, typically between the gene modifying polypeptide and the 3′ end of the trans template, and 2) a 5′ end block Cas9 scaffold and spacer to target DNA interaction (mediated via an additional gene modifying polypeptide). This configuration exemplifies exemplary interactions that together anchor a trans template RNA to a gene modifying polypeptide:sgRNA:target genomic DNA complex to enable rewriting. It is contemplated that the RRS:RBP interaction is critical in the absence of the 5′ end block spacer. It is further contemplated that the presence of both an RRS” RBD interaction and a 5′ end block spacer can provide high rewriting activity and the presence of the 5′ end block spacer rescues rewriting activity observed with a trans template having a weaker RRS:RBP interaction.

[0006] Features of the compositions or methods can include one or more of the following enumerated embodiments.

1. A template RNA comprising:
[0007] a) a heterologous object sequence comprising a mutation region to introduce a mutation into a target nucleic acid sequence (wherein optionally the heterologous object sequence comprises, from 5′ to 3′, a post-edit homology region, the mutation region, and a pre-edit homology region), and
[0008] b) a primer binding site sequence (PBS sequence) that binds a first portion of the target nucleic acid sequence, wherein first portion is in the first strand of the target nucleic acid sequence, and wherein the PBS sequence is 3′ of the heterologous object sequence, and
[0009] c) an RBD recruitment site (RRS), wherein the RRS is 3′ of the PBS sequence or 5′ of the heterologous object sequence.
   2. A template RNA comprising:
[0010] a) a heterologous object sequence comprising a mutation region to introduce a mutation into a target nucleic acid sequence (wherein optionally the heterologous object sequence comprises, from 5′ to 3′, a post-edit homology region, the mutation region, and a pre-edit homology region), and
[0011] b) a primer binding site sequence (PBS sequence) that binds a first portion of the target nucleic acid sequence, wherein first portion is in the first strand of the target nucleic acid sequence, and wherein the PBS sequence is 3′ of the heterologous object sequence, and
[0012] c) an RBD recruitment site (RRS), wherein optionally the RRS is situated between the PBS sequence and the heterologous object sequence, or within the heterologous object sequence (e.g., between the pre-edit homology region and the mutation region).
   3. The template RNA of embodiment 1 or 2, which further comprises an end block sequence, e.g., an end block sequence of Table 41 or a sequence having at least 70%, 75%, 80%, 85%, 90%, 95%, 98%, or 99% identity thereto.
   4. The template RNA of any of the preceding embodiments, which comprises an end block 5′ of the heterologous object sequence.
   5. The template RNA of any of the preceding embodiments, which comprises an end block 3′ of the PBS sequence, and optionally wherein the RRS is situated between the end block and the PBS sequence.
   6. The template RNA of any of the preceding embodiments, which comprises a first end block sequence 3′ of the PBS sequence and a second end block sequence 5′ of the heterologous object sequence.
   7. The template RNA of any of embodiments 3-6, wherein the end block sequence is 5′ of the heterologous object sequence and the RRS is 3′ of the PBS sequence.
   8. The template RNA of any of embodiments 3-6, wherein the end block sequence is 3′ of the PBS sequence and the RRS is 5′ of the heterologous object sequence.
   9. The template RNA of any of the preceding embodiments, wherein the RRS has a sequence according to Table 40 or a sequence having at least 70%, 75%, 80%, 85%, 90%, 95%, 98%, or 99% identity thereto, or the reverse complement thereof.
   10. The template RNA of any of the preceding embodiments, which comprises a plurality of RRSs, e.g., a tandem array of 2, 3, 4, 5, or 10 RRSs.
   11. The template RNA of any if the preceding embodiments, wherein the PBS sequence is 5-1000 nt in length.
   12. The template RNA of any if the preceding embodiments, wherein the PBS sequence comprises 8-17 nucleotides, e.g., 8-17 nucleotides of 100% identity to the target nucleic acid sequence.
   13. The template RNA of any of the preceding embodiments wherein the pre-edit homology region comprises up to 30 nucleotides, e.g., up to 20 nucleotides, e.g., up to 20 nucleotides of 100% identity to the target nucleic acid sequence.
   14. The template RNA of any of embodiments 1-12, which does not comprise a post-edit homology region.
   15. The template RNA of any of the preceding embodiments wherein the post-edit homology region comprises 5-1000, 5-500 nucleotides, e.g., 5-500 nucleotides of 100% identity to the target nucleic acid sequence.
   16. The template RNA of any embodiments 114, which does not comprise a post-edit homology region.
   17. The template RNA of any of the preceding embodiments, wherein the mutation region is configured to produce an insertion, a deletion, or a substitution in the target nucleic acid.
   18. The template RNA of any of the preceding embodiments, which further comprises:
[0013] a gRNA spacer that is complementary to a different portion (e.g., a third portion) of the target nucleic acid sequence, e.g., wherein the different portion (e.g., third portion) is on the first strand of the target nucleic acid sequence; and
[0014] a gRNA scaffold.
   19. The template RNA of embodiment 18, wherein the gRNA spacer is 5′ of the heterologous object sequence.
   20. The template RNA of embodiment 18 or 19, wherein the gRNA scaffold is situated between the gRNA spacer and the heterologous object sequence.
   21. The template RNA of any of embodiments 18-20 wherein the gRNA spacer and the PBS sequence bind the same strand of the target nucleic acid sequence.
   22. The template RNA of any of embodiments 18-21 wherein the gRNA spacer, the heterologous object sequence, and the PBS sequence bind the same strand of the target nucleic acid sequence.
   23. The template RNA of any of embodiments 1-8, which does not comprise a gRNA spacer or a gRNA scaffold.
   24. The template RNA of any of the preceding embodiments, which comprises a linker of up to 20 nucleotides between the RRS and the PBS sequence.
   25. A gene modifying polypeptide comprising:
[0015] a reverse transcriptase (RT) domain; and
[0016] a DNA binding domain (DBD) that binds to a target nucleic acid sequence and is heterologous to the RT domain (e.g., a Cas domain, e.g., a Cas nickase domain, e.g., a Cas9 nickase domain); and
[0017] a RNA-binding domain (RBD) that is heterologous to the DBD and the RT domain.
   26. A gene modifying polypeptide comprising:
[0018] a reverse transcriptase (RT) domain; and
[0019] a DNA binding domain (DBD) that binds to a target nucleic acid sequence and is heterologous to the RT domain (e.g., a Cas domain, e.g., a Cas nickase domain, e.g., a Cas9 nickase domain); and
[0020] a RNA-binding domain (RBD) that is heterologous to the DBD and the RT domain, wherein the domains are arranged, in an N-terminal to C-terminal direction:
[0021] a) DBD, RT domain, RBD;
[0022] b) RT domain, DBD, RBD;
[0023] c) RBD, DBD, RT domain;
[0024] d) RBD, RT domain, DBD;
[0025] e) DBD, RBD, RT domain; or
[0026] f) RT domain, RBD, DBD.
   27. A gene modifying polypeptide comprising:
[0027] a reverse transcriptase (RT) domain; and
[0028] a DNA binding domain (DBD) that binds to a target nucleic acid sequence and is heterologous to the RT domain (e.g., a Cas nickase domain, e.g., a Cas9 nickase domain); and
[0029] a plurality (e.g., 2, 3, 4, or 5) RNA-binding domains (RBD) that are heterologous to the DBD and the RT domain.
   28. The gene modifying polypeptide of embodiment 27, wherein the RBD has an amino acid sequence according to Table 31, or at least 75%, 80%, 85%, 90%, 95%, 96%, 97%, 98%, or 99% identity thereto.
   29. The gene modifying polypeptide of any of of the preceding embodiments wherein the plurality of RBDs have the same amino acid sequence as each other.
   30. The gene modifying polypeptide of any of the preceding embodiments, wherein the plurality of RBDs have different amino acid sequences from each other.
   31. The gene modifying polypeptide of any of the preceding embodiments, wherein the DBD has an amino acid sequence according to Table 7 or 8, or at least 75%, 80%, 85%, 90%, 95%, 96%, 97%, 98%, or 99% identity thereto.
   32. The gene modifying polypeptide of any of the preceding embodiments, wherein the RT domain is from a retrovirus, or a polypeptide domain having at least 75%, 80%, 85%, 90%, 95%, 96%, 97%, 98%, or 99% amino acids sequence identity thereto.
   33. The gene modifying polypeptide of any of the preceding embodiments, wherein the RT domain has an amino acid sequence according to Table 6, or at least 75%, 80%, 85%, 90%, 95%, 96%, 97%, 98%, or 99% identity thereto.
   34. The gene modifying polypeptide of any of the preceding embodiments, wherein the gene modifying polypeptide comprises a linker.
   35. The gene modifying polypeptide of any of the preceding embodiments, wherein the linker comprises a sequence according to Table 10, or a sequence having at least 75%, 80%, 85%, 90%, 95%, 96%, 97%, 98%, or 99% identity thereto.
   36. The gene modifying polypeptide of embodiment 34 or 35, wherein the linker is disposed between the DBD and the RT domain, the RT domain and the RBD, or between the RBD and the DBD.
   37. The gene modifying polypeptide of any of the preceding embodiments, wherein the gene modifying polypeptide comprises, in an N-terminal to C-terminal direction:
[0030] a) the DBD, a first linker, the RT domain, a second linker, the RBD;
[0031] b) the RT domain, a first linker, the DBD, a second linker, the RBD;
[0032] c) the RBD, a first linker, the DBD, a second linker, the RT domain;
[0033] d) RBD, a first linker, RT domain, a second linker, DBD;
[0034] e) the DBD, a first linker, the RBD, a second linker, the RT domain; or
[0035] f) the RT domain, a first linker, the RBD, a second linker, the DBD.
   38. The gene modifying polypeptide of any of the preceding embodiments, which was produced by intein-mediated fusion of an N-terminal portion comprising an intein-N domain and a C-terminal portion comprising an intein-C domain.
   39. A polypeptide system (e.g., a polypeptide complex) comprising:
[0036] a) a reverse transcriptase (RT) domain; and
[0037] b) a DNA binding domain (DBD) that binds to a target nucleic acid sequence and is heterologous to the RT domain (e.g., a Cas domain, e.g., a Cas9 domain, e.g., a Cas9 nickase domain); and
[0038] c) a RNA-binding domain (RBD) that is heterologous to the DBD and the RT domain, wherein at least 2 of (e.g., all of) (a), (b), and (c) are in separate polypeptides, e.g., separate polypeptides that noncovalently form a complex.
   40. The polypeptide system of embodiment 39, wherein complex formation is mediated by a first dimerization domain that binds a second, compatible dimerization domain.
   41. The polypeptide system of embodiment 40, wherein complex formation is mediated by a third dimerization domain that binds a fourth, compatible dimerization domain.
   42. The polypeptide system of any of embodiments 39-41, wherein:
[0039] the RBD is operably linked (e.g., via a linker) to a first dimerization domain;
[0040] the DBD is operably linked (e.g., via a linker) to a second dimerization domain that binds the first dimerization domain;
[0041] the DBD is operably linked (e.g., via a linker) to a third dimerization domain; and
[0042] the RT domain is operably linked (e.g., via a linker) to a fourth dimerization domain that binds the third dimerization domain.
   43. The polypeptide system of any of embodiments 39-42 wherein the first and second dimerization domains are: chemical-induced dimerization domains, light-induced dimerization domains, antibody-peptide dimerization domains, or coiled coil dimerization domains.
   44. The polypeptide system of any of embodiments 39-43, wherein the third and fourth dimerization domains are: chemical-induced dimerization domains, light-induced dimerization domains, antibody-peptide dimerization domains, or coiled coil dimerization domains.
   45. The polypeptide system of any of embodiments 39-44 wherein the first dimerization domain and the second dimerization domain are each present in a plurality of copies, e.g., 2, 3, 4, 5, 10, 15, 20, or 30 copies.
   46. The polypeptide system of any of embodiments 39-45, wherein the third dimerization domain and the fourth dimerization domain are each present in a plurality of copies, e.g., 2, 3, 4, 5, 10, 15, 20, or 30 copies.
   47. The polypeptide system of any of embodiments 39-46, wherein the first dimerization domain and the second dimerization domain have the same sequence (e.g., wherein the first dimerization domain and the second dimerization domain form a homodimer).
   48. The polypeptide system of any of embodiments 39-47 wherein the third dimerization domain and the fourth dimerization domain have the same sequence (e.g., wherein the third dimerization domain and the fourth dimerization domain form a homodimer).
   49. The polypeptide system of any of embodiments 39-48 wherein the first dimerization domain and the second dimerization domain have different sequences (e.g., wherein the first dimerization domain and the second dimerization domain form a heterodimer).
   50. The polypeptide system of any of embodiments 39-49 wherein the third dimerization domain and the fourth dimerization domain have different sequences (e.g., wherein the third dimerization domain and the fourth dimerization domain form a hetero dimer).
   51. The polypeptide system of any of embodiments 39-50 wherein the DBD is operably linked to one or more additional DBDs, wherein optionally the additional DBDs have the same sequence as the DBD.
   52. The polypeptide system of any of embodiments 39-51 wherein the RBD has an amino acid sequence according to Table 31, or at least 75%, 80%, 85%, 90%, 95%, 96%, 97%, 98%, or 99% identity thereto.
   53. The polypeptide system of any of embodiments 39-52, wherein the plurality of RBDs have the same amino acid sequence as each other.
   54. The polypeptide system of any of embodiments 39-52 wherein the plurality of RBDs have different amino acid sequences from each other.
   55. The polypeptide system of any of embodiments 39-54 wherein the DBD has an amino acid sequence according to Table 7 or 8, or at least 75%, 80%, 85%, 90%, 95%, 96%, 97%, 98%, or 99% identity thereto.
   56. The polypeptide system of any of embodiments 39-55, wherein the RT domain is from a retrovirus, or a polypeptide domain having at least 75%, 80%, 85%, 90%, 95%, 96%, 97%, 98%, or 99% amino acids sequence identity thereto.
   57. The polypeptide system of any of embodiments 39-56 wherein the RT domain has an amino acid sequence according to Table 6, or at least 75%, 80%, 85%, 90%, 95%, 96%, 97%, 98%, or 99% identity thereto.
   58. The polypeptide system of any of embodiments 39-57 wherein each linker independently comprises a sequence according to Table 10, or a sequence having at least 75%, 80%, 85%, 90%, 95%, 96%, 97%, 98%, or 99% identity thereto.
   59. A nucleic acid or a plurality of nucleic acids encoding the polypeptides of any of the systems of embodiment 39-57.
   60. A system comprising:
[0043] a template RNA of any of embodiments 1-24;
[0044] a gene modifying polypeptide of any of embodiments 25-38 or the polypeptide system of any of embodiments 39-58; and
[0045] a first gRNA comprising:
   [0046] a gRNA spacer that binds a second portion of the target nucleic acid sequence, wherein the second portion is one the second strand of the target nucleic acid sequence; and
   [0047] a gRNA scaffold that binds the DBD of the gene modifying polypeptide or the polypeptide system.
      61. The system of embodiment 60, wherein the template RNA does not comprise a gRNA spacer or a gRNA scaffold.
      62. The system of embodiment 60 or 61, wherein the gRNA spacer binds to a region of the target nucleic acid sequence that is within about 5, 10, 15, 20, 25, 30, or 40 nucleotides of the region of the target nucleic acid sequence bound by the PBS sequence.
      63. The system of any of embodiments 60-62, which further comprises:
[0048] a second Cas protein (e.g., a dead Cas protein) and
[0049] a second gRNA comprising:
   [0050] a gRNA spacer that binds the first strand of the target nucleic acid at a location 3′ of the location bound by the PBS sequence, and
   [0051] a gRNA scaffold that binds the second Cas protein.
      64. The system of embodiment 63, wherein the second Cas protein is a dead Cas protein (e.g., a dead Cas9 protein) or a Cas nickase protein (e.g., a Cas9 nickase protein)
      65. The system of embodiment 63, wherein the gRNA spacer of the second gRNA has a length of at least 18 nucleotides (e.g., 18-28 nucleotides, e.g., 18-21 nucleotides) and the second Cas protein is a dead Cas protein.
      66. The system of embodiment 63, wherein the gRNA spacer of the second gRNA has a length of 17 nucleotides or less (e.g., 14-17 nucleotides), wherein optionally the second Cas protein is a Cas nickase protein.
      67. The system of embodiment 60, wherein the template RNA further comprises:
[0052] a gRNA spacer that is complementary to a third portion of the target nucleic acid sequence wherein the third portion is on the first strand of the target nucleic acid sequence; and
[0053] a gRNA scaffold.
   68. The system of embodiment 67, wherein the gRNA scaffold binds the DBD of the gene modifying polypeptide or the polypeptide system.
   69. The system of embodiment 67 or 68, wherein the gRNA spacer has a length of 17 nucleotides or less.
   70. The system of any of embodiments 60-69, wherein the gRNA spacer of the template RNA induces nicking of the template nucleic acid, e.g., at the second strand of the target nucleic acid sequence.
   71. The system of any of embodiments 60-69, wherein the gRNA spacer of the template RNA does not induce nicking of the template nucleic acid.
   72. A system comprising:
[0054] i) a template RNA of any of embodiments 1-24 (e.g., a template RNA of embodiment 23); ii) a first polypeptide comprising:
   [0055] a DNA binding domain (DBD) (e.g., a Cas domain, e.g., a Cas nickase domain, e.g., a Cas9 nickase domain); and
   [0056] a RNA-binding domain (RBD) that is heterologous to the DBD, wherein the RBD binds the RRS of the template RNA;
[0057] iii) a first gRNA comprising:
   [0058] a gRNA spacer that directs the DBD of the first polypeptide to a second portion of the target nucleic acid sequence, wherein the second portion of the target nucleic acid sequence is on the second strand of the nucleic acid sequence; and
   [0059] a gRNA scaffold that binds the DBD of the first polypeptide;
[0060] iv) a second polypeptide comprising:
   [0061] an RT domain, and
   [0062] a DNA binding domain (DBD) (e.g., a Cas domain, e.g., a Cas nickase domain, e.g., a Cas9 nickase domain), that is heterologous to the RT domain, and wherein the DBD of the second polypeptide has a different sequence from the DBD of the first polypeptide; and
[0063] v) a second gRNA comprising:
   [0064] a gRNA spacer that directs the DBD of the second polypeptide to a third portion of the target nucleic acid sequence, wherein the third portion is on the first strand of the target nucleic acid, and
   [0065] a gRNA scaffold that binds the DBD of the second polypeptide.
      73. The system of embodiment 72, wherein the DBD of the second polypeptide comprises a Cas nickase domain or a dead Cas domain.
      74. The system of embodiment 72, wherein the gRNA spacer of the second RNA induces nicking of the template nucleic acid, e.g., at the second strand of the target nucleic acid sequence.
      75. The system of embodiment 72, wherein the gRNA spacer of the second RNA does not induce nicking of the template nucleic acid.
      76. The system of embodiment 72, wherein the first gRNA does not detectably bind to the DBD of the second polypeptide.
      77. The system of embodiment 72, wherein the second gRNA does not detectably bind to the DBD of the first polypeptide.
      78. A system comprising:
[0066] i) a template RNA of any of embodiments 1-24 wherein the template RNA comprises:
   [0067] a gRNA spacer that is complementary to a third portion of the target nucleic acid sequence wherein the third portion is on the first strand of the target nucleic acid sequence; and
   [0068] a gRNA scaffold;
[0069] ii) a first polypeptide comprising:
   [0070] a DNA binding domain (DBD) (e.g., a Cas domain, e.g., a Cas nickase domain, e.g., a Cas9 nickase domain); and
   [0071] a RNA-binding domain (RBD) that is heterologous to the DBD, wherein the RBD binds the RRS of the template RNA;
[0072] iii) a first gRNA comprising:
   [0073] a gRNA spacer that directs the DBD of the first polypeptide to a second portion of the target nucleic acid sequence, wherein the second portion of the target nucleic acid sequence is on the second strand of the nucleic acid sequence; and
   [0074] a gRNA scaffold that binds the DBD of the first polypeptide; and
[0075] iv) a second polypeptide comprising:
   [0076] an RT domain, and
   [0077] a DNA binding domain (DBD) (e.g., a Cas domain, e.g., a Cas nickase domain, e.g., a Cas9 nickase domain), that is heterologous to the RT domain, and wherein the DBD of the second polypeptide has a different sequence from the DBD of the first polypeptide, and wherein the gRNA scaffold of the template RNA binds the DBD of the second polypeptide.
      79. The system of embodiment 78, wherein the DBD of the second polypeptide comprises a Cas nickase domain or a dead Cas domain.
      80. The system of embodiment 78, wherein the gRNA spacer of the template RNA induces nicking of the template nucleic acid, e.g., at the second strand of the target nucleic acid sequence.
      81. The system of embodiment 78, wherein the gRNA spacer of the template RNA does not induce nicking of the template nucleic acid.
      82. The system of any of embodiments 78-, wherein the first gRNA does not detectably bind to the DBD of the second polypeptide.
      83. The system of any of embodiments 78-82, wherein the gRNA of the template RNA does not detectably bind to the DBD of the first polypeptide.
      84. A polypeptide system comprising:
[0078] a first polypeptide comprising:
   [0079] a DNA binding domain (DBD) (e.g., a Cas domain, e.g., a Cas nickase domain, e.g., a Cas9 nickase domain);
   [0080] a RNA-binding domain (RBD) that is heterologous to the DBD; and
   [0081] optionally, a linker disposed between the DBD and the RBD; and
[0082] a second polypeptide comprising:
   [0083] an RT domain, and
   [0084] a DNA binding domain (DBD) (e.g., a Cas domain, e.g., a Cas nickase domain, e.g., a Cas9 nickase domain), that is heterologous to the RT domain; and
   [0085] optionally, a linker disposed between the RT domain and the DBD.
      85. The template RNA or system of any of embodiments 1-24 or 60-83, wherein the target nucleic acid sequence is a target gene, enhancer, or promoter.
      86. The template RNA of system of embodiment 85 wherein the target nucleic acid sequence is a human target gene, human enhancer, or human promoter.
      87. The system or polypeptide system of any of the preceding embodiments, wherein the RBD has a sequence of Table 31, or a sequence having at least 70%, 75%, 80%, 85%, 90%, 95%, 98%, or 99% identity thereto.
      88. A method for modifying a target nucleic acid in a cell (e.g., a human cell), the method comprising contacting the cell with the system of any one of embodiments 60-83, or nucleic acid encoding the same, thereby modifying the target nucleic acid.
      89. The method of embodiment 88, wherein presence of the second polypeptide, compared to an otherwise similar system lacking the second polypeptide, results in one or more of:
[0086] increased unwinding of the target nucleic acid;
[0087] increased number of target nucleic acids that are modified;
[0088] increased length of insertion into the target nucleic acid; or
[0089] reduced MMR activity at the target nucleic acid.
   90. The method of embodiment 88 or 89, wherein the cell is in vivo or ex vivo.
   91. A template RNA comprising:
[0090] a) a heterologous object sequence comprising a mutation region to introduce a mutation into a target nucleic acid sequence (wherein optionally the heterologous object sequence comprises, from 5′ to 3′, a post-edit homology region, the mutation region, and a pre-edit homology region), and
[0091] b) a primer binding site sequence (PBS sequence) that binds a first portion of the target nucleic acid sequence, wherein first portion is in the first strand of the target nucleic acid sequence, and wherein the PBS sequence is 3′ of the heterologous object sequence, and
[0092] c) an RBD recruitment site (RRS), wherein the RRS is 3′ of the PBS sequence or 5′ of the heterologous object sequence.
   92. The template RNA of embodiment 91, wherein the RRS comprises the RRS of a template sequence as listed in Table S4, or a sequence having at least 70%, 75%, 80%, 85%, 90%, 95%, 98%, or 99% identity thereto.
   93. The template RNA of embodiment 91 or 92, which further comprises an end block sequence, e.g., an end block sequence of Table 41, or comprising a sequence having at least 70%, 75%, 80%, 85%, 90%, 95%, 98%, or 99% identity thereto.
   94. The template RNA of embodiment 93, wherein the end block sequence is 5′ of the heterologous object sequence (e.g., located at the 5′ end of the template RNA), optionally wherein the RRS is 3′ of the PBS sequence.
   95. The template RNA of embodiment 94, wherein the end block sequence comprises a gRNA scaffold.
   96. The template RNA of embodiment 95, wherein the gRNA scaffold is chosen from Table 41.
   97. The template RNA of embodiment 95, wherein the gRNA scaffold is a Cas9 scaffold.
   98. The template RNA of any of embodiments 93-97, wherein the end block sequence comprises a gRNA spacer, e.g., positioned at the 5′ end of the end block (e.g., 5′ of the gRNA scaffold and/or positioned at the 5′ end of the template RNA).
   99. The template RNA of any of embodiments 94-98, wherein the gRNA spacer is a pro-spacer (e.g., as described herein).
   100. The template RNA of embodiment 98, wherein the end block binds to a DNA binding domain, e.g., of a gene modifying polypeptide (e.g., as described herein).
   101. The template RNA of embodiment 100, wherein the gene modifying polypeptide bound to the end block does not create a nick in the second strand of the target nucleic acid sequence.
   102. The template RNA of any of embodiments 98-101, wherein the gRNA spacer binds to a second portion of the first strand of the target nucleic acid sequence located 3′ relative to the first portion of the target nucleic acid sequence.
   103. The template RNA of embodiment 102, wherein the 5′ end of the portion of the first strand bound by the gRNA spacer is between 10-20, 20-30, 30-40, 40-50, 50-100, 100-150, or 150-200 nucleotides from the 3′ end of the first portion.
   104. The template RNA of any of embodiments 98-103, wherein:
[0093] (i) the gRNA spacer has a length of less than or equal to 17 nucleotides, e.g., about 5, 6, 7, 8, 9, 10, 11, 12, 13, 14, 15, 16, or 17 nucleotides;
[0094] (ii) the gRNA spacer has 100% complementarity to the second portion on the first strand of the target nucleic acid sequence; and/or
[0095] (iii) the gRNA spacer directs nicking activity by a Cas domain.
   105. The template RNA of embodiment 104, wherein:
[0096] (i) the gRNA spacer has a length of less than or equal to 17 nucleotides, e.g., about 5, 6, 7, 8, 9, 10, 11, 12, 13, 14, 15, 16, or 17 nucleotides; and
[0097] (ii) the gRNA spacer has 100% complementarity to the second portion on the first strand of the target nucleic acid sequence.
   106. The template RNA of embodiment 104, wherein:
[0098] (ii) the gRNA spacer has 100% complementarity to the second portion on the first strand of the target nucleic acid sequence; and
[0099] (iii) the gRNA spacer directs nicking activity by a Cas domain.
   107. The template RNA of any of embodiments 93-106, wherein the end block sequence is 3′ of the PBS sequence and/or the RRS (e.g., located at the 3′ end of the template RNA), optionally wherein the RRS is 5′ of the heterologous object sequence.
   108. The template RNA of embodiment 107, wherein the end block sequence comprises GGGTCAGGAGCCCCCCCCTGAACCCAGGATAACCCTCAAAGTCGGGGGGC (SEQ ID NO: 18,101, an end block sequence of Table 41, or comprising a sequence having at least 70%, 75%, 80%, 85%, 90%, 95%, 98%, or 99% identity to any thereof.
   109. The template RNA of any of embodiments 93-108, wherein the end block sequence comprises an aptamer.
   110. The template RNA of any of embodiments 93-109, wherein the end block sequence is capable of binding to an RNA aptamer-binding protein (e.g., an RNA aptamer-binding protein attached to a gene modifying polypeptide, e.g., at the DBD).
   111. The template RNA of any of embodiments 93-110, wherein the end block comprises one or more hairpins (e.g., 1, 2, 3, 4, or 5 hairpins).
   112. The template RNA of any of embodiments 93-111, wherein the end block comprises an ePEG end block.
   113. The template RNA of any of embodiments 91-92, further comprising:
[0100] a 5′ end block sequence, e.g., an end block sequence of Table 41, or comprising a sequence having at least 70%, 75%, 80%, 85%, 90%, 95%, 98%, or 99% identity thereto, wherein the 5′ end block sequence is 5′ of the heterologous object sequence (e.g., located at the 5′ end of the template RNA), optionally wherein the RRS is 3′ of the PBS sequence; and
[0101] a 3′ end block sequence, e.g., an end block sequence of Table 41 or the sequence GGGTCAGGAGCCCCCCCCTGAACCCAGGATAACCCTCAAAGTCGGGGGC (SEQ ID NO: 18,101), or comprising a sequence having at least 70%, 75%, 80%, 85%, 90%, 95%, 98%, or 99% identity to any thereof, wherein the 3′ end block sequence is 3′ of the PBS sequence and/or the RRS (e.g., located at the 3′ end of the template RNA), optionally wherein the RRS is 5′ of the heterologous object sequence.
   114. The template RNA of any of the preceding embodiments, wherein the RRS comprises an MS2 sequence.
   115. The template RNA of any of the preceding embodiments, wherein the RRS binds to an MCP polypeptide.
   116. The template RNA of any of the preceding embodiments, wherein the RRS comprises a PP7 sequence.
   117. The template RNA of any of the preceding embodiments, wherein the RRS and the PBS are separated by a region having of length of about 5-10, 10-15, or 15-20 nucleotides (e.g., about 8 nucleotides or about 16 nucleotides).
   118. The template RNA of any of the preceding embodiments, wherein the RRS has a sequence according to Table 40 or a sequence having at least 70%, 75%, 80%, 85%, 90%, 95%, 98%, or 99% identity thereto.
   119. The template RNA of any of the preceding embodiments, which comprises a plurality of RRSes (e.g., identical or different RRSes), e.g., 1, 2, 3, 4, 5, 6, 7, 8, 9, or 10 RRSes, e.g., a tandem array of 2, 3, 4, 5, or 10 RRSs.
   120. The template RNA of embodiment 119, wherein the plurality of RRSes each comprises an MS2 sequence.
   121. The template RNA of embodiment 119 or 120, wherein the plurality of RRSes comprises 4 repeats of the MS2 sequence.
   122. The template RNA of any of the preceding embodiments, wherein the PBS sequence comprises 8-17 nucleotides, e.g., 8-17 nucleotides of 100% identity to the target nucleic acid sequence.
   123. The template RNA of embodiment 122, wherein the PBS sequence has a length of about 8, 13, or 17 nucleotides.
   124. The template RNA of embodiment 122, wherein the PBS sequence has a length of about 13 nucleotides.
   125. The template RNA of any of the preceding embodiments, wherein the pre-edit homology region comprises up to 20 nucleotides, e.g., up to 20 nucleotides of 100% identity to the target nucleic acid sequence.
   126. The template RNA of any of the preceding embodiments, wherein the post-edit homology region comprises 5-500 nucleotides, e.g., 5-500 nucleotides of 100% identity to the target nucleic acid sequence.
   127. The template RNA of any of the preceding embodiments, wherein the post-edit homology region comprises 10-20, 20-30, 30-40, 40-50, 50-60, or 60-70 nucleotides, e.g., about 12 nucleotides or about 63 nucleotides.
   128. The template RNA of embodiment 127, wherein the post-edit homology region comprises one or more (e.g., 1, 2, 3, 4, or 5) single nucleotide substitutions, e.g., at approximately regular intervals (e.g., spaced about 5, 6, 7, 8, 9, 10, 11, 12, 13, 14, 15, 16, 17, 18, 19, or 20 nucleotides apart).
   129. The template RNA of any of the preceding embodiments, wherein the mutation region is configured to produce an insertion, a deletion, or a substitution in the target nucleic acid.
   130. The template RNA of any of the preceding embodiments, wherein the gRNA spacer is complementary to a different portion (e.g., a third portion) of the target nucleic acid sequence, e.g., wherein the different portion (e.g., third portion) is on the first strand of the target nucleic acid sequence.
   131. The template RNA of embodiment 130, wherein the gRNA spacer is 5′ of the heterologous object sequence.
   132. The template RNA of embodiment 130 or 131, wherein the gRNA scaffold is situated between the gRNA spacer and the heterologous object sequence.
   133. The template RNA of any of embodiments 130-132 wherein the gRNA spacer and the PBS sequence bind the same strand of the target nucleic acid sequence.
   134. The template RNA of any of embodiments 130-133 wherein the gRNA spacer, the heterologous object sequence, and the PBS sequence bind the same strand of the target nucleic acid sequence.
   135. The template RNA of any of embodiments 91-129, which does not comprise a gRNA spacer or a gRNA scaffold.
   136. The template RNA of any of the preceding embodiments, which comprises a linker of up to 20 nucleotides between the RRS and the PBS sequence.
   137. The template RNA of any of the preceding embodiments, wherein the template RNA is linear.
   138. The template RNA of any of the preceding embodiments, wherein the template RNA is circular.
   139. A gene modifying polypeptide comprising:
[0102] a reverse transcriptase (RT) domain; and
[0103] a DNA binding domain (DBD) that binds to a target nucleic acid sequence and is heterologous to the RT domain (e.g., a Cas domain, e.g., a Cas nickase domain, e.g., a Cas9 nickase domain); and
[0104] a RNA-binding domain (RBD) that is heterologous to the DBD and the RT domain,
[0105] wherein the domains are arranged, in an N-terminal to C-terminal direction:
[0106] g) DBD, RT domain, RBD;
[0107] h) RT domain, DBD, RBD;
[0108] i) RBD, DBD, RT domain;
[0109] j) RBD, RT domain, DBD;
[0110] k) DBD, RBD, RT domain; or
[0111] l) RT domain, RBD, DBD.
   140. The gene modifying polypeptide of embodiment 139, further comprising one or more (e.g., 1, 2, 3, or 4) additional RBDs (e.g., one or more additional copies of the RBD, e.g., adjacent to the RBD).
   141. A gene modifying polypeptide comprising:
[0112] a reverse transcriptase (RT) domain; and
[0113] a DNA binding domain (DBD) that binds to a target nucleic acid sequence and is heterologous to the RT domain (e.g., a Cas nickase domain, e.g., a Cas9 nickase domain); and
[0114] a plurality (e.g., 2, 3, 4, or 5) RNA-binding domains (RBD) that are heterologous to the DBD and the RT domain.
   142. The gene modifying polypeptide of any of the preceding embodiments, wherein the RBD comprises an amino acid sequence according to Table 31 or the amino acid sequence of the RBD of a gene modifying polypeptide as listed in any of Tables S1-S3, or an amino acid sequence having at least 75%, 80%, 85%, 90%, 95%, 96%, 97%, 98%, or 99% identity thereto.
   143. The gene modifying polypeptide of any of the preceding embodiments, wherein the plurality of RBDs have the same amino acid sequence as each other.
   144. The gene modifying polypeptide of any of the preceding embodiments, wherein the plurality of RBDs have different amino acid sequences from each other.
   145. The gene modifying polypeptide of any of the preceding embodiments, wherein the DBD comprises an amino acid sequence according to Table 7 or 8 or the amino acid sequence of the DBD of a gene modifying polypeptide as listed in any of Tables S1-S3, or an amino acid sequence having at least 75%, 80%, 85%, 90%, 95%, 96%, 97%, 98%, or 99% identity thereto.
   146. The gene modifying polypeptide of any of the preceding embodiments, wherein the RT domain is from a retrovirus, or a polypeptide domain having at least 75%, 80%, 85%, 90%, 95%, 96%, 97%, 98%, or 99% amino acids sequence identity thereto.
   147. The gene modifying polypeptide of any of the preceding embodiments, wherein the RT domain comprises an amino acid sequence according to Table 6 or the amino acid sequence of the RT domain of a gene modifying polypeptide as listed in any of Tables S1-S3, or an amino acid sequence having at least 75%, 80%, 85%, 90%, 95%, 96%, 97%, 98%, or 99% identity thereto.
   148. The gene modifying polypeptide of any of the preceding embodiments, wherein:
[0115] (a) the RBD comprises an amino acid sequence of the RBD of a gene modifying polypeptide as listed in any of Tables S1-S3, or an amino acid sequence having at least 75%, 80%, 85%, 90%, 95%, 96%, 97%, 98%, or 99% identity thereto;
[0116] (b) the DBD comprises an amino acid sequence of the DBD of said gene modifying polypeptide listed in any of Tables S1-S3, or an amino acid sequence having at least 75%, 80%, 85%, 90%, 95%, 96%, 97%, 98%, or 99% identity thereto; and
[0117] (c) the RT domain comprises an amino acid sequence of the RT domain of said gene modifying polypeptide listed in any of Tables S1-S3, or an amino acid sequence having at least 75%, 80%, 85%, 90%, 95%, 96%, 97%, 98%, or 99% identity thereto.
   149. The gene modifying polypeptide of any of the preceding embodiments, wherein the gene modifying polypeptide comprises a linker.
   150. The gene modifying polypeptide of embodiment 149, wherein the linker is 2-5 amino acids in length (e.g., 4 amino acids in length).
   151. The gene modifying polypeptide of embodiment 149, wherein the linker is 5-10 amino acids in length (e.g., 8 amino acids in length).
   152. The gene modifying polypeptide of embodiment 149, wherein the linker is 10-20 amino acids in length (e.g., 16 amino acids in length).
   153. The gene modifying polypeptide of any of embodiments 149-152, wherein the linker comprises a sequence according to Table 10, or a sequence having at least 75%, 80%, 85%, 90%, 95%, 96%, 97%, 98%, or 99% identity thereto.
   154. The gene modifying polypeptide of any of embodiments 149-153, wherein the linker is disposed between the DBD and the RT domain, the RT domain and the RBD, or between the RBD and the DBD.
   155. The gene modifying polypeptide of any of embodiments 149-154, which comprises a first linker and a second linker, wherein:
[0118] (i) the first linker is disposed between the DBD and the RT domain and the second linker is disposed between the RT domain and the RBD;
[0119] (ii) the first linker is disposed between the DBD and the RBD and the second linker is disposed between the RBD and RT domain; or
[0120] (iii) the first linker is disposed between the RT domain and the DBD and the second linker is disposed between the DBD and RBD.
   156. The gene modifying polypeptide of any of the preceding embodiments, wherein the gene modifying polypeptide comprises, in an N-terminal to C-terminal direction:
[0121] g) the DBD, a first linker, the RT domain, a second linker, the RBD;
[0122] h) the RT domain, a first linker, the DBD, a second linker, the RBD;
[0123] i) the RBD, a first linker, the DBD, a second linker, the RT domain;
[0124] j) RBD, a first linker, RT domain, a second linker, DBD;
[0125] k) the DBD, a first linker, the RBD, a second linker, the RT domain; or
[0126] l) the RT domain, a first linker, the RBD, a second linker, the DBD.
   157. The gene modifying polypeptide of any of the preceding embodiments, which was produced by intein-mediated fusion of an N-terminal portion comprising an intein-N domain and a C-terminal portion comprising an intein-C domain.
   158. The gene modifying polypeptide of any of the preceding embodiments, wherein the DBD comprises a Cas domain, e.g., a Cas9 domain, e.g., a Cas9 nickase domain (e.g., as described herein).
   159. The gene modifying polypeptide embodiment 158, wherein the Cas domain is a dCas9 domain.
   160. The gene modifying polypeptide embodiment 158, wherein the Cas domain is an nCas9 domain.
   161. The gene modifying polypeptide of any of the preceding embodiments, wherein the RT domain comprises an AVIRE domain (e.g., as described herein, e.g., an AVIRE RT domain as listed in Table 6), or an amino acid sequence have at least 70%, 75%, 80%, 85%, 90%, 95%, 96%, 97%, 98%, or 99% sequence identity thereto.
   162. The gene modifying polypeptide of embodiment 161, wherein the PBS sequence has a length of greater than 8 nucleotides, e.g., about 9, 10, 11, 12, 13, 14, 15, 16, or 17 nucleotides.
   163. The gene modifying polypeptide of any of the preceding embodiments, wherein the RT domain comprises an MLVMS domain (e.g., as described herein, e.g., an MLVMS RT domain as listed in Table 6), or an amino acid sequence have at least 70%, 75%, 80%, 85%, 90%, 95%, 96%, 97%, 98%, or 99% sequence identity thereto.
   164. The gene modifying polypeptide of any of the preceding embodiments, wherein the RT domain comprises a retrotransposon RT domain.
   165. The gene modifying polypeptide of any of the preceding embodiments, wherein the domains are arranged, in an N-terminal to C-terminal direction:
[0127] a) DBD, RT domain, RBD;
[0128] b) RT domain, DBD, RBD;
[0129] c) RBD, DBD, RT domain;
[0130] d) RBD, RT domain, DBD;
[0131] e) DBD, RBD, RT domain; or
[0132] f) RT domain, RBD, DBD.
   166. The gene modifying polypeptide of embodiment 165, further comprising one or more (e.g., 1, 2, 3, or 4) additional RBDs (e.g., one or more additional copies of the RBD, e.g., adjacent to the RBD).
   167. The gene modifying polypeptide of embodiment 165 or 166, further comprising one or more additional RT domains (e.g., one or more additional copies of the RT domain, e.g., adjacent to the RT domain).
   168. The gene modifying polypeptide of embodiment 167, wherein one or more of the additional RT domains comprises an AVIRE domain (e.g., as described herein).
   169. The gene modifying polypeptide of embodiment 167 or 168, wherein one or more of the additional RT domains comprises an MLVMS domain (e.g., as described herein).
   170. The gene modifying polypeptide of any of the preceding embodiments, further comprising an RNA aptamer-binding domain.
   171. The gene modifying polypeptide of embodiment 170, wherein the DBD is attached to the RNA aptamer-binding domain, e.g., via a linker.
   172. A polypeptide system (e.g., a polypeptide complex) comprising:
[0133] a) a reverse transcriptase (RT) domain; and
[0134] b) a DNA binding domain (DBD) that binds to a target nucleic acid sequence and is heterologous to the RT domain (e.g., a Cas domain, e.g., a Cas9 domain, e.g., a Cas9 nickase domain); and
[0135] c) a RNA-binding domain (RBD) that is heterologous to the DBD and the RT domain,
[0136] wherein at least 2 of (e.g., all of) (a), (b), and (c) are in separate polypeptides, e.g., separate polypeptides that noncovalently form a complex.
   173. The polypeptide system of embodiment 172, wherein the RT domain and the DBD are in separate polypeptides.
   174. The polypeptide system of embodiment 172, wherein the RT domain and the RBD are in separate polypeptides.
   175. The polypeptide system of embodiment 172, wherein complex formation is mediated by a first dimerization domain that binds a second, compatible dimerization domain.
   176. The polypeptide system of embodiment 172, wherein complex formation is mediated by a third dimerization domain that binds a fourth, compatible dimerization domain.
   177. The polypeptide system of any of embodiments 172-176, wherein:
[0137] the RBD is operably linked (e.g., via a linker) to a first dimerization domain;
[0138] the DBD is operably linked (e.g., via a linker) to a second dimerization domain that binds the first dimerization domain;
[0139] the DBD is operably linked (e.g., via a linker) to a third dimerization domain; and
[0140] the RT domain is operably linked (e.g., via a linker) to a fourth dimerization domain that binds the third dimerization domain.
   178. The polypeptide system of any of embodiments 172-177, wherein the first and second dimerization domains are: chemical-induced dimerization domains, light-induced dimerization domains, antibody-peptide dimerization domains, or coiled coil dimerization domains.
   179. The polypeptide system of any of embodiments 172-178, wherein the third and fourth dimerization domains are: chemical-induced dimerization domains, light-induced dimerization domains, antibody-peptide dimerization domains, or coiled coil dimerization domains.
   180. The polypeptide system of any of embodiments 172-179, wherein the first dimerization domain and the second dimerization domain are each present in a plurality of copies, e.g., 2, 3, 4, 5, 10, 15, 20, or 30 copies.
   181. The polypeptide system of any of embodiments 172-180, wherein the third dimerization domain and the fourth dimerization domain are each present in a plurality of copies, e.g., 2, 3, 4, 5, 10, 15, 20, or 30 copies.
   182. The polypeptide system of any of embodiments 172-181, wherein the first dimerization domain and the second dimerization domain have the same sequence (e.g., wherein the first dimerization domain and the second dimerization domain form a homodimer).
   183. The polypeptide system of any of embodiments 172-182, wherein the third dimerization domain and the fourth dimerization domain have the same sequence (e.g., wherein the third dimerization domain and the fourth dimerization domain form a homodimer).
   184. The polypeptide system of any of embodiments 172-181, wherein the first dimerization domain and the second dimerization domain have different sequences (e.g., wherein the first dimerization domain and the second dimerization domain form a heterodimer).
   185. The polypeptide system of any of embodiments 172-184, wherein the third dimerization domain and the fourth dimerization domain have different sequences (e.g., wherein the third dimerization domain and the fourth dimerization domain form a hetero dimer).
   186. The polypeptide system of any of embodiments 172-185, wherein the DBD is operably linked to one or more additional DBDs, wherein optionally the additional DBDs have the same sequence as the DBD.
   187. The polypeptide system of any of embodiments 172-186, wherein the RBD has an amino acid sequence according to Table 31, or at least 75%, 80%, 85%, 90%, 95%, 96%, 97%, 98%, or 99% identity thereto.
   188. The polypeptide system of any of embodiments 172-187, wherein the plurality of RBDs have the same amino acid sequence as each other.
   189. The polypeptide system of any of embodiments 172-188, wherein the plurality of RBDs have different amino acid sequences from each other.
   190. The polypeptide system of any of embodiments 172-189, wherein the DBD has an amino acid sequence according to Table 31, or at least 75%, 80%, 85%, 90%, 95%, 96%, 97%, 98%, or 99% identity thereto.
   191. The polypeptide system of any of embodiments 172-190, wherein the RT domain is from a retrovirus, or a polypeptide domain having at least 75%, 80%, 85%, 90%, 95%, 96%, 97%, 98%, or 99% amino acids sequence identity thereto.
   192. The polypeptide system of any of embodiments 172-191, wherein the RT domain has an amino acid sequence according to Table 6, or at least 75%, 80%, 85%, 90%, 95%, 96%, 97%, 98%, or 99% identity thereto.
   193. The polypeptide system of any of embodiments 172-192, wherein each linker independently comprises a sequence according to Table 10, or a sequence having at least 75%, 80%, 85%, 90%, 95%, 96%, 97%, 98%, or 99% identity thereto.
   194. A nucleic acid or a plurality of nucleic acids encoding the polypeptides of any of the systems of embodiment 172-193.
   195. A system comprising:
[0141] a template RNA of any of embodiments 91-138;
[0142] a gene modifying polypeptide, e.g., a gene modifying polypeptide of any of embodiments 139-171, or a polypeptide system, e.g., a polypeptide system of any of embodiments 172-193; and
[0143] a first gRNA comprising:
   [0144] a gRNA spacer that binds a second portion of the target nucleic acid sequence, wherein the second portion is one the second strand of the target nucleic acid sequence; and
   [0145] a gRNA scaffold that binds the DBD of the gene modifying polypeptide or the polypeptide system.
      196. The system of embodiment 195, wherein the gRNA scaffold of the first gRNA has the same protein binding specificity as the gRNA sequence of the template RNA.
      197. The system of embodiment 196, wherein the gRNA sequence of the template RNA binds to a first copy of a gene modifying polypeptide (e.g., at the DBD of the gene modifying polypeptide), and the gRNA scaffold of the first gRNA binds to a second copy of the gene modifying polypeptide (e.g., at the DBD of the gene modifying polypeptide).
      198. The system of embodiment 195, wherein the template RNA does not comprise a gRNA spacer or a gRNA scaffold.
      199. The system of embodiment 195 or 198, wherein the gRNA spacer binds to a region of the target nucleic acid sequence that is within about 5, 10, 15, 20, 25, 30, or 40 nucleotides of the region of the target nucleic acid sequence bound by the PBS sequence.
      200. The system of any of embodiments 195-199, which further comprises:
[0146] a second Cas protein (e.g., a dead Cas protein) and
[0147] a second gRNA comprising:
   [0148] a gRNA spacer that binds the first strand of the target nucleic acid at a location 3′ of the location bound by the PBS sequence, and
   [0149] a gRNA scaffold that binds the second Cas protein.
      201. The system of embodiment 200, wherein the second Cas protein is a dead Cas protein (e.g., a dead Cas9 protein) or a Cas nickase protein (e.g., a Cas9 nickase protein)
      202. The system of embodiment 200, wherein the gRNA spacer of the second gRNA has a length of at least 18 nucleotides (e.g., 18-28 nucleotides, e.g., 18-21 nucleotides) and the second Cas protein is a dead Cas protein.
      203. The system of embodiment 200, wherein the gRNA spacer of the second gRNA has a length of 17 nucleotides or less (e.g., 14-17 nucleotides), wherein optionally the second Cas protein is a Cas nickase protein.
      204. The system of embodiment 195, wherein the template RNA further comprises: a gRNA spacer that is complementary to a third portion of the target nucleic acid sequence wherein the third portion is on the first strand of the target nucleic acid sequence; and a gRNA scaffold.
      205. The system of embodiment 204, wherein the gRNA scaffold binds the DBD of the gene modifying polypeptide or the polypeptide system.
      206. The system of embodiment 204 or 205, wherein the gRNA spacer has a length of 17 nucleotides or less.
      207. The system of any of embodiments 195-206, wherein the gRNA spacer of the template RNA induces nicking of the template nucleic acid, e.g., at the second strand of the target nucleic acid sequence.
      208. The system of any of embodiments 195-206, wherein the gRNA spacer of the template RNA does not induce nicking of the template nucleic acid.
      209. A system comprising:
[0150] i) a template RNA of any of embodiments 91-138 (e.g., a template RNA of embodiment 16);
[0151] ii) a first polypeptide comprising:
   [0152] a DNA binding domain (DBD) (e.g., a Cas domain, e.g., a Cas nickase domain, e.g., a Cas9 nickase domain); and
   [0153] a RNA-binding domain (RBD) that is heterologous to the DBD, wherein the RBD binds the RRS of the template RNA;
[0154] iii) a first gRNA comprising:
   [0155] a gRNA spacer that directs the DBD of the first polypeptide to a second portion of the target nucleic acid sequence, wherein the second portion of the target nucleic acid sequence is on the second strand of the nucleic acid sequence; and
   [0156] a gRNA scaffold that binds the DBD of the first polypeptide;
[0157] iv) a second polypeptide comprising:
   [0158] an RT domain, and
   [0159] a DNA binding domain (DBD) (e.g., a Cas domain, e.g., a Cas nickase domain, e.g., a Cas9 nickase domain), that is heterologous to the RT domain, and wherein the DBD of the second polypeptide has a different sequence from the DBD of the first polypeptide; and
[0160] v) a second gRNA comprising:
   [0161] a gRNA spacer that directs the DBD of the second polypeptide to a third portion of the target nucleic acid sequence, wherein the third portion is on the first strand of the target nucleic acid, and
   [0162] a gRNA scaffold that binds the DBD of the second polypeptide.
      210. The system of embodiment 209, wherein the DBD of the second polypeptide comprises a Cas nickase domain or a dead Cas domain.
      211. The system of embodiment 209, wherein the gRNA spacer of the second RNA induces nicking of the template nucleic acid, e.g., at the second strand of the target nucleic acid sequence.
      212. The system of embodiment 209, wherein the gRNA spacer of the second RNA does not induce nicking of the template nucleic acid.
      213. The system of embodiment 209, wherein the first gRNA does not detectably bind to the DBD of the second polypeptide.
      214. The system of embodiment 209, wherein the second gRNA does not detectably bind to the DBD of the first polypeptide.
      215. A system comprising:
[0163] i) a template RNA of any of the preceding embodiments, wherein the template RNA comprises:
   [0164] a gRNA spacer that is complementary to a third portion of the target nucleic acid sequence wherein the third portion is on the first strand of the target nucleic acid sequence; and
   [0165] a gRNA scaffold;
[0166] ii) a first polypeptide comprising:
   [0167] a DNA binding domain (DBD) (e.g., a Cas domain, e.g., a Cas nickase domain, e.g., a Cas9 nickase domain); and
   [0168] a RNA-binding domain (RBD) that is heterologous to the DBD, wherein the RBD binds the RRS of the template RNA;
[0169] iii) a first gRNA comprising:
   [0170] a gRNA spacer that directs the DBD of the first polypeptide to a second portion of the target nucleic acid sequence, wherein the second portion of the target nucleic acid sequence is on the second strand of the nucleic acid sequence; and
   [0171] a gRNA scaffold that binds the DBD of the first polypeptide; and
[0172] iv) a second polypeptide comprising:
   [0173] an RT domain, and
   [0174] a DNA binding domain (DBD) (e.g., a Cas domain, e.g., a Cas nickase domain, e.g., a Cas9 nickase domain), that is heterologous to the RT domain, and wherein the DBD of the second polypeptide has a different sequence from the DBD of the first polypeptide, and wherein the gRNA scaffold of the template RNA binds the DBD of the second polypeptide.
      216. The system of embodiment 215, wherein the DBD of the second polypeptide comprises a Cas nickase domain or a dead Cas domain.
      217. The system of embodiment 215, wherein the gRNA spacer of the template RNA induces nicking of the template nucleic acid, e.g., at the second strand of the target nucleic acid sequence.
      218. The system of embodiment 215, wherein the gRNA spacer of the template RNA does not induce nicking of the template nucleic acid.
      219. The system of any of embodiments 215-218, wherein the first gRNA does not detectably bind to the DBD of the second polypeptide.
      220. The system of any of embodiments 215-219, wherein the gRNA of the template RNA does not detectably bind to the DBD of the first polypeptide.
      221. A polypeptide system comprising:
[0175] a first polypeptide comprising:
   [0176] a DNA binding domain (DBD) (e.g., a Cas domain, e.g., a Cas nickase domain, e.g., a Cas9 nickase domain);
   [0177] a RNA-binding domain (RBD) that is heterologous to the DBD; and optionally, a linker disposed between the DBD and the RBD; and
[0178] a second polypeptide comprising:
   [0179] an RT domain, and
   [0180] a DNA binding domain (DBD) (e.g., a Cas domain, e.g., a Cas nickase domain, e.g., a Cas9 nickase domain), that is heterologous to the RT domain; and
   [0181] optionally, a linker disposed between the RT domain and the DBD.
      222. The template RNA or system of any of the preceding embodiments, wherein the target nucleic acid sequence is a target gene, enhancer, or promoter.
      223. The template RNA of system any of the preceding embodiments, wherein the target nucleic acid sequence is a human target gene, human enhancer, or human promoter.
      224. The system or polypeptide system of any of the preceding embodiments, wherein the RBD has a sequence of Table 31, or a sequence having at least 70%, 75%, 80%, 85%, 90%, 95%, 98%, or 99% identity thereto.
      225. A method for modifying a target nucleic acid in a cell (e.g., a human cell), the method comprising contacting the cell with the system of any one of the preceding embodiments, or nucleic acid encoding the same, thereby modifying the target nucleic acid.
      226. The method of embodiment 225, wherein presence of the second polypeptide, compared to an otherwise similar system lacking the second polypeptide, results in one or more of:
[0182] increased unwinding of the target nucleic acid;
[0183] increased number of target nucleic acids that are modified;
[0184] increased length of insertion into the target nucleic acid; or
[0185] reduced MMR activity at the target nucleic acid.
   227. The method of any of embodiments 225 and 226, wherein the cell is in vivo or ex vivo.

[0186] In one aspect, the disclosure relates to a system for modifying DNA, comprising (a) a nucleic acid encoding a gene modifying polypeptide capable of target primed reverse transcription, the polypeptide comprising (i) a reverse transcriptase domain and (ii) a Cas9 nickase that binds DNA and has endonuclease activity, and (b) a template RNA comprising (i) a gRNA spacer that is complementary to a first portion of a human gene, (ii) a gRNA scaffold that binds the polypeptide, (iii) a heterologous object sequence comprising a mutation region, and (iv) a primer binding site (PBS) sequence comprising at least 3, 4, 5, 6, 7, or 8 bases of 100% homology to a target DNA strand at the 3′ end of the template RNA.

[0187] The gRNA spacer may comprise at least 15 bases of 100% homology to the target DNA at the 5′ end of the template RNA. The template RNA may further comprise a PBS sequence comprising at least 5 bases of at least 80% homology to the target DNA strand. The template RNA may comprise one or more chemical modifications.

[0188] The domains of the gene modifying polypeptide may be joined by a peptide linker. The polypeptide may comprise one or more peptide linkers. The gene modifying polypeptide may further comprise a nuclear localization signal. The polypeptide may comprise more than one nuclear localization signal, e.g., multiple adjacent nuclear localization signals or one or more nuclear localization signals in different regions of the polypeptide, e.g., one or more nuclear localization signals in the N-terminus of the polypeptide and one or more nuclear localization signals in the C-terminus of the polypeptide. The nucleic acid encoding the gene modifying polypeptide may encode one or more intein domains.

[0189] Introduction of the system into a target cell may result in insertion of at least 1, 2, 3, 4, 5, 10, 15, 20, 25, 30, 35, 40, 45, 50, 60, 70, 80, 90, 100, 150, 200, 250, 300, 350, 400, 500, or 1000 base pairs of exogenous DNA. Introduction of the system into a target cell may result in deletion, wherein the deletion is less than 2, 3, 4, 5, 10, 50, or 100 base pairs of genomic DNA upstream or downstream of the insertion.

[0190] Introduction of the system into a target cell may result in substitution, e.g., substitution of 1, 2, or 3 nucleotides, e.g., consecutive nucleotides.

[0191] The heterologous object sequence may be at least 5, 10, 25, 50, 100, 150, 200, 250, 300, 400, 500, 600, or 700 base pairs.

[0192] In one aspect, the disclosure relates to a pharmaceutical composition comprising the system described above and a pharmaceutically acceptable excipient or carrier, wherein the pharmaceutically acceptable excipient or carrier is selected from the group consisting of a plasmid vector, a viral vector, a vesicle, and a lipid nanoparticle. In one aspect, the disclosure relates to a pharmaceutical composition comprising the system described above and multiple pharmaceutically acceptable excipients or carriers, wherein the pharmaceutically acceptable excipients or carriers are selected from the group consisting of a plasmid vector, a viral vector, a vesicle, and a lipid nanoparticle, e.g., where the system described above is delivered by two distinct excipients or carriers, e.g., two lipid nanoparticles, two viral vectors, or one lipid nanoparticle and one viral vector. The viral vector may be an adeno-associated virus (AAV).

[0193] In one aspect, the disclosure relates to a host cell (e.g., a mammalian cell, e.g., a human cell) comprising the system described above.

[0194] The system may be introduced in vivo, in vitro, ex vivo, or in situ. The nucleic acid of (a) may be integrated into the genome of the host cell. In some embodiments, the nucleic acid of (a) is not integrated into the genome of the host cell. In some embodiments, the heterologous object sequence is inserted at only one target site in the host cell genome. The heterologous object sequence may be inserted at two or more target sites in the host cell genome, e.g., at the same corresponding site in two homologous chromosomes or at two different sites on the same or different chromosomes. The heterologous object sequence may encode a mammalian polypeptide, or a fragment or a variant thereof. The components of the system may be delivered on 1, 2, 3, 4, or more distinct nucleic acid molecules. The system may be introduced into a host cell by electroporation or by using at least one vehicle selected from a plasmid vector, a viral vector, a vesicle, and a lipid nanoparticle.

### BRIEF DESCRIPTION OF THE DRAWINGS

[0195] The patent or application file contains at least one drawing executed in color. Copies of this patent or patent application publication with color drawing(s) will be provided by the Office upon request and payment of the necessary fee.

[0196] FIG. 1 is a series of diagrams showing components of an exemplary trans gene modifying system. The exemplary system comprises three components: (1) a gene modifying polypeptide, (2) a template RNA, and (3) a gRNA. The gene modifying polypeptide includes a nickase Cas9 (nCas9), an RNA binding domain (RBD), and a polymerase (in this example a retroviral reverse transcriptase (RT)). The template contains an RBD recruitment site (RRS), a primer binding site sequence (PBS sequence) (Priming) and a heterologous object sequence (template region), as well as an end protection/end block sequence that (a) protects the structure from exonucleases, and/or (b) terminates the RT due to the secondary structure. The third component is a gRNA. In a fully assembled trans gene modifying reaction, the gRNA associates with the nCas9 of the gene modifying polypeptide, and directs the polypeptide to the DNA. The nCas9 then introduces a nick into the DNA. The RBD of the polypeptide recruits the template to the site of the nick through its interaction with the RRS on the template RNA. The Cas9 induced nick results in a 3′ flap, that can anneal to the PBS sequence of the template RNA. The RT can then reverse transcribe the template until it hits the end protection structure. The highly structured end protection will terminate the reverse transcription. Cellular repair processes will incorporate the edited strand into the genome.

[0197] FIGS. 2A-2B are a series of diagrams showing exemplary polypeptides that can be used in a trans gene modifying system as described herein. There are several ways by which a polypeptide containing an nCas9-RT-RBD can be assembled: (A) by direction fusion, (B) by using either intein or dimerization (homo or hetero) domains that covalently or non-covalently assemble the full polypeptide, respectively. (A) In a direct fusion approach, a linker connects the nCas9 with the RPD, which in turn is connected through a linker with the RT (e.g., as shown). Exemplary possible configurations are listed in the panel below FIG. 2A, and RBDs/linkers are listed in a separate table. The RBP can be present once or multiple (e.g., n=1-5) times. (B) The polypeptide can also be assembled using various intein or dimerization domains. In some instances, the nCas9 is linked to a dimerization domain (FD #1), and the RPD is linked to its partner dimerization domain. The nCas9 is linked to a second dimerization domain (FD2), while the RT is linked to its partner. The dimerization domain can either result in covalent linkage (e.g., when using inteins), or in non-covalent assembly of the polypeptide (e.g., using chemical or light induced dimerization). Two dimerization reactions are utilized, upon which a polypeptide complex is assembled. Exemplary possible variations are described herein (e.g., intein dimerization domains, chemically-induced dimerization domains, light-induced dimerization domains, antibody-peptide dimerization domains, coiled-coil dimerization domains). The dimerization domains can be present once or multiple (n=1-30) times, e.g., as tandem repeats.

[0198] FIGS. 3A-3C are a series of diagrams showing an exemplary template RNA and subregions thereof. (A) Schematic of an exemplary template RNA. This template includes (3′ to 5′) of one or several (n=1-10) RRS at the 3′ end, a linker, followed by a PBS sequence (priming) (8-17 nts), followed by a heterologous object sequence (template). The template region contains, in some embodiments, a pre-edit homology region (0-20 nts), the mutation region having a desired modification to the genome (e.g., an insertion, deletion, or point mutation(s)), and a post-edit homology region (e.g., n=5-500 nts). Lastly, an end protection/end block sequence is present at the 5′ end of the template RNA. Exemplary possible configurations are listed in the panel below FIG. 3A. (B) Exemplary variations for the various template RNA components are listed. Exemplary sequences for such components are described herein. (C) Schematic of an exemplary template RNA wherein the RRS is situated between the pre-edit homology region and the mutation region.

[0199] FIGS. 4A-4B are a series of diagrams showing, among other things, increased unwinding of a target nucleic acid, as well as engagement and modulation of a second strand of the target nucleic acid, e.g., to increase gene modifying efficiency and/or to permit long insertions. There are several ways in which the second strand can be engaged in the context of trans gene modification. (A) In one exemplary configuration, a second Cas9-gRNA complex can be introduced in trans. This second Cas9 complex can be, for example, a nickase Cas9 (nCas9) to direct a nick on the second strand. This nick could be used to initiate second strand synthesis after the RT reaction, and/or to signal to the cell endogenous Mismatch repair system that the first (edited) strand should be maintained and copied. Alternatively, the Cas9 can be, for example, a catalytically inactive (dead) Cas9 (dCas9). Without wishing to be bound by theory, in some embodiments this would unwind the DNA and could facilitate the repair of especially longer insertions. The Cas9 in this scenario can be of the same or orthogonal species as the Cas9 present in the trans rewriting polypeptide. (B) In an alternate configuration, the second strand modulation is recruited by the template RNA, by using a gRNA (full or partial) as an end structure. This gRNA can either be a full gRNA with a scaffold and a 20nt spacer, or a partial gRNA with a scaffold and a spacer of 17 or fewer nucleotides. A full gRNA will engage the polypeptide complex and can position the nick from the nCas9 in the polypeptide complex to the second strand. Placement of this nick could be used to initiate second strand synthesis after the RT reaction, and/or to signal to the cell endogenous mismatch repair system that the first (edited) strand should be maintained and copied. A spacer region (e.g., having a length of less than or equal to 17 nucleotides, e.g., about 5, 6, 7, 8, 9, 10, 11, 12, 13, 14, 15, 16, or 17 nucleotides) can lead to binding of the polypeptide complex, but will not result in a nick. This would unwind the DNA and may facilitate the repair of insertions (e.g., longer insertions).

[0200] FIGS. 5A-5B are a series of diagrams showing further exemplary configurations for engagement and modulation of a second strand of the target nucleic acid, e.g., to increase gene modifying efficiency and/or to permit long insertions. In these alternative configurations, the nCas9 is fused to only the RBD. The gRNA associated with the nCas9-RBD polypeptide recruits it to the DNA, and the nCas9 introduces a nick. The RBD recruits the template RNA. The configurations further comprise a second polypeptide complex consisting of a Cas9 (e.g., nickase or dead Cas9) fused to the RT domain. This second complex can associate with the DNA in the following ways: (A) by using a second gRNA, or (B) by using a gRNA present in the 5′ end of the template RNA. In both scenarios, the gRNA can include a full 20 nts spacer to direct cleavage, or a spacer having a length of less than or equal to 17 nucleotides (e.g., about 5, 6, 7, 8, 9, 10, 11, 12, 13, 14, 15, 16, or 17 nucleotides) to unwind the DNA without introducing a nick.

[0201] FIG. 6A is a diagram showing exemplary driver configurations.

[0202] FIG. 6B is a diagram showing exemplary template nucleic acid configurations.

[0203] FIG. 7A is a diagram showing an exemplary assay for analyzing rewriter activity in cells.

[0204] FIG. 7B is a graph showing rewriting activity for exemplary gene modifying polypeptides comprising a first exemplary RT domain or a second RT domain, as indicated.

[0205] FIG. 8 is a diagram showing rewriting activity of exemplary gene modifying systems.

[0206] FIG. 9 is a diagram showing rewriting activity of exemplary gene modifying systems.

[0207] FIG. 10 is a series of graphs showing rewriting activity for exemplary gene modifying systems.

[0208] FIGS. 11A-11B are a series of graphs showing rewriting activity for exemplary gene modifying systems.

### DETAILED DESCRIPTION

### Definitions

[0209] The term “expression cassette,” as used herein, refers to a nucleic acid construct comprising nucleic acid elements sufficient for the expression of the nucleic acid molecule of the instant invention. A “gRNA spacer”, as used herein, refers to a portion of a nucleic acid that has complementarity to a target nucleic acid and can, together with a gRNA scaffold, target a Cas protein to the target nucleic acid.

[0210] A “gRNA scaffold”, as used herein, refers to a portion of a nucleic acid that can bind a Cas protein and can, together with a gRNA spacer, target the Cas protein to the target nucleic acid. In some embodiments, the gRNA scaffold comprises a crRNA sequence, tetraloop, and tracrRNA sequence.

[0211] A “gene modifying polypeptide”, as used herein, refers to a polypeptide comprising a retroviral reverse transcriptase, or a polypeptide comprising an amino acid sequence having at least 75%, 80%, 85%, 90%, 95%, 96%, 97%, 98%, or 99% amino acid sequence identity to a retroviral reverse transcriptase, which is capable of integrating a nucleic acid sequence (e.g., a sequence provided on a template nucleic acid) into a target DNA molecule (e.g., in a mammalian host cell, such as a genomic DNA molecule in the host cell). In some embodiments, the gene modifying polypeptide is capable of integrating the sequence substantially without relying on host machinery. In some embodiments, the gene modifying polypeptide integrates a sequence into a random position in a genome, and in some embodiments, the gene modifying polypeptide integrates a sequence into a specific target site. In some embodiments, a gene modifying polypeptide includes one or more domains that, collectively, facilitate 1) binding the template nucleic acid, 2) binding the target DNA molecule, and 3) facilitate integration of the at least a portion of the template nucleic acid into the target DNA. Gene modifying polypeptides include both naturally occurring polypeptides as well as engineered variants of the foregoing, e.g., having one or more amino acid substitutions to the naturally occurring sequence. Gene modifying polypeptides also include heterologous constructs, e.g., where one or more of the domains recited above are heterologous to each other, whether through a heterologous fusion (or other conjugate) of otherwise wild-type domains, as well as fusions of modified domains, e.g., by way of replacement or fusion of a heterologous sub-domain or other substituted domain. Exemplary gene modifying polypeptides, and systems comprising them and methods of using them, that can be used in the methods provided herein are described, e.g., in PCT/US2021/020948, which is incorporated herein by reference with respect to gene modifying polypeptides that comprise a retroviral reverse transcriptase domain. In some embodiments, a gene modifying polypeptide integrates a sequence into a gene. In some embodiments, a gene modifying polypeptide integrates a sequence into a sequence outside of a gene. A “gene modifying system,” as used herein, refers to a system comprising a gene modifying polypeptide and a template nucleic acid.

[0212] The term “domain” as used herein refers to a structure of a biomolecule that contributes to a specified function of the biomolecule. A domain may comprise a contiguous region (e.g., a contiguous sequence) or distinct, non-contiguous regions (e.g., non-contiguous sequences) of a biomolecule. Examples of protein domains include, but are not limited to, an endonuclease domain, a DNA binding domain, a reverse transcription domain; an example of a domain of a nucleic acid is a regulatory domain, such as a transcription factor binding domain. In some embodiments, a domain (e.g., a Cas domain) can comprise two or more smaller domains (e.g., a DNA binding domain and an endonuclease domain).

[0213] The term “end block sequence,” as used herein, refers to an RNA sequence having a secondary structure that impairs reverse transcription and/or impairs exonuclease activity. In some instances, an end block sequence comprises a stem-loop sequence.

[0214] As used herein, the term “exogenous”, when used with reference to a biomolecule (such as a nucleic acid sequence or polypeptide) means that the biomolecule was introduced into a host genome, cell or organism by the hand of man. For example, a nucleic acid that is as added into an existing genome, cell, tissue or subject using recombinant DNA techniques or other methods is exogenous to the existing nucleic acid sequence, cell, tissue or subject.

[0215] As used herein, “first strand” and “second strand”, as used to describe the individual DNA strands of target DNA, distinguish the two DNA strands based upon which strand the reverse transcriptase domain initiates polymerization, e.g., based upon where target primed synthesis initiates. The first strand refers to the strand of the target DNA upon which the reverse transcriptase domain initiates polymerization, e.g., where target primed synthesis initiates. The second strand refers to the other strand of the target DNA. First and second strand designations do not describe the target site DNA strands in other respects; for example, in some embodiments the first and second strands are nicked by a polypeptide described herein, but the designations ‘first’ and ‘second’ strand have no bearing on the order in which such nicks occur.

[0216] A “genomic safe harbor site” (GSH site) is a site in a host genome that is able to accommodate the integration of new genetic material, e.g., such that the inserted genetic element does not cause significant alterations of the host genome posing a risk to the host cell or organism. A GSH site generally meets 1, 2, 3, 4, 5, 6, 7, 8 or 9 of the following criteria: (i) is located >300 kb from a cancer-related gene; (ii) is >300 kb from a miRNA/other functional small RNA; (iii) is >50 kb from a 5′ gene end; (iv) is >50 kb from a replication origin; (v) is >50 kb away from any ultraconservered element; (vi) has low transcriptional activity (i.e. no mRNA+/−25 kb); (vii) is not in a copy number variable region; (viii) is in open chromatin; and/or (ix) is unique, with 1 copy in the human genome. Examples of GSH sites in the human genome that meet some or all of these criteria include (i) the adeno-associated virus site 1 (AAVS1), a naturally occurring site of integration of AAV virus on chromosome 19; (ii) the chemokine (C-C motif) receptor 5 (CCR5) gene, a chemokine receptor gene known as an HIV-1 coreceptor; (iii) the human ortholog of the mouse Rosa26 locus; (iv) the ribosomal DNA (“rDNA”) locus. Additional GSH sites are known and described, e.g., in Pellenz et al. epub Aug. 20, 2018 (https://doi.org/10.1101/396390).

[0217] The term “heterologous,” as used herein to describe a first element in reference to a second element means that the first element and second element do not exist in nature disposed as described. For example, a heterologous polypeptide, nucleic acid molecule, construct or sequence refers to (a) a polypeptide, nucleic acid molecule or portion of a polypeptide or nucleic acid molecule sequence that is not native to a cell in which it is expressed, (b) a polypeptide or nucleic acid molecule or portion of a polypeptide or nucleic acid molecule that has been altered or mutated relative to its native state, or (c) a polypeptide or nucleic acid molecule with an altered expression as compared to the native expression levels under similar conditions. For example, a heterologous regulatory sequence (e.g., promoter, enhancer) may be used to regulate expression of a gene or a nucleic acid molecule in a way that is different than the gene or a nucleic acid molecule is normally expressed in nature. In another example, a heterologous domain of a polypeptide or nucleic acid sequence (e.g., a DNA binding domain of a polypeptide or nucleic acid encoding a DNA binding domain of a polypeptide) may be disposed relative to other domains or may be a different sequence or from a different source, relative to other domains or portions of a polypeptide or its encoding nucleic acid. In certain embodiments, a heterologous nucleic acid molecule may exist in a native host cell genome, but may have an altered expression level or have a different sequence or both. In other embodiments, heterologous nucleic acid molecules may not be endogenous to a host cell or host genome but instead may have been introduced into a host cell by transformation (e.g., transfection, electroporation), wherein the added molecule may integrate into the host genome or can exist as extra-chromosomal genetic material either transiently (e.g., mRNA) or semi-stably for more than one generation (e.g., episomal viral vector, plasmid or other self-replicating vector).

[0218] As used herein, “insertion” of a sequence into a target site refers to the net addition of DNA sequence at the target site, e.g., where there are new nucleotides in the heterologous object sequence with no cognate positions in the unedited target site. In some embodiments, a nucleotide alignment of the PBS sequence and heterologous object sequence to the target nucleic acid sequence would result in an alignment gap in the target nucleic acid sequence.

[0219] As used herein, a “deletion” generated by a heterologous object sequence in a target site refers to the net deletion of DNA sequence at the target site, e.g., where there are nucleotides in the unedited target site with no cognate positions in the heterologous object sequence. In some embodiments, a nucleotide alignment of the PBS sequence and heterologous object sequence to the target nucleic acid sequence would result in an alignment gap in the molecule comprising the PBS sequence and heterologous object sequence.

[0220] The term “inverted terminal repeats” or “ITRs” as used herein refers to AAV viral cis-elements named so because of their symmetry. These elements promote efficient multiplication of an AAV genome. It is hypothesized that the minimal elements for ITR function are a Rep-binding site (RBS; 5′-GCGCGCTCGCTCGCTC-3′ (SEQ ID NO: 20194) for AAV2) and a terminal resolution site (TRS; 5′-AGTTGG-3′ for AAV2) plus a variable palindromic sequence allowing for hairpin formation. According to the present invention, an ITR comprises at least these three elements (RBS, TRS, and sequences allowing the formation of an hairpin). In addition, in the present invention, the term “ITR” refers to ITRs of known natural AAV serotypes (e.g. ITR of a serotype 1, 2, 3, 4, 5, 6, 7, 8, 9, 10 or 11 AAV), to chimeric ITRs formed by the fusion of ITR elements derived from different serotypes, and to functional variants thereof. “Functional variant” refers to a sequence presenting a sequence identity of at least 80%, 85%, 90%, preferably of at least 95% with a known ITR and allowing multiplication of the sequence that includes said ITR in the presence of Rep proteins.

[0221] The term “mutation region,” as used herein, refers to a region in a template RNA having one or more sequence difference relative to the corresponding sequence in a target nucleic acid. The sequence difference may comprise, for example, a substitution, insertion, frameshift, or deletion.

[0222] The term “mutated” when applied to nucleic acid sequences means that nucleotides in a nucleic acid sequence are inserted, deleted, or changed compared to a reference (e.g., native) nucleic acid sequence. A single alteration may be made at a locus (a point mutation), or multiple nucleotides may be inserted, deleted, or changed at a single locus. In addition, one or more alterations may be made at any number of loci within a nucleic acid sequence. A nucleic acid sequence may be mutated by any method known in the art.

[0223] “Nucleic acid molecule” refers to both RNA and DNA molecules including, without limitation, complementary DNA (“cDNA”), genomic DNA (“gDNA”), and messenger RNA (“mRNA”), and also includes synthetic nucleic acid molecules, such as those that are chemically synthesized or recombinantly produced, such as RNA templates, as described herein. The nucleic acid molecule can be double-stranded or single-stranded, circular, or linear. If single-stranded, the nucleic acid molecule can be the sense strand or the antisense strand. Unless otherwise indicated, and as an example for all sequences described herein under the general format “SEQ ID NO:,” “nucleic acid comprising SEQ ID NO:1” refers to a nucleic acid, at least a portion which has either (i) the sequence of SEQ ID NO:1, or (ii) a sequence complimentary to SEQ ID NO:1. The choice between the two is dictated by the context in which SEQ ID NO:1 is used. For instance, if the nucleic acid is used as a probe, the choice between the two is dictated by the requirement that the probe be complementary to the desired target. Nucleic acid sequences of the present disclosure may be modified chemically or biochemically or may contain non-natural or derivatized nucleotide bases, as will be readily appreciated by those of skill in the art. Such modifications include, for example, labels, methylation, substitution of one or more naturally occurring nucleotides with an analog, inter-nucleotide modifications such as uncharged linkages (for example, methyl phosphonates, phosphotriesters, phosphoramidates, carbamates, etc.), charged linkages (for example, phosphorothioates, phosphorodithioates, etc.), pendant moieties, (for example, polypeptides), intercalators (for example, acridine, psoralen, etc.), chelators, alkylators, and modified linkages (for example, alpha anomeric nucleic acids, etc.). Also included are chemically modified bases (see, for example, Table 13), backbones (see, for example, Table 14), and modified caps (see, for example, Table 15). Also included are synthetic molecules that mimic polynucleotides in their ability to bind to a designated sequence via hydrogen bonding and other chemical interactions. Such molecules are known in the art and include, for example, those in which peptide linkages substitute for phosphate linkages in the backbone of a molecule, e.g., peptide nucleic acids (PNAs). Other modifications can include, for example, analogs in which the ribose ring contains a bridging moiety or other structure such as modifications found in “locked” nucleic acids (LNAs). In various embodiments, the nucleic acids are in operative association with additional genetic elements, such as tissue-specific expression-control sequence(s) (e.g., tissue-specific promoters and tissue-specific microRNA recognition sequences), as well as additional elements, such as inverted repeats (e.g., inverted terminal repeats, such as elements from or derived from viruses, e.g., AAV ITRs) and tandem repeats, inverted repeats/direct repeats, homology regions (segments with various degrees of homology to a target DNA), untranslated regions (UTRs) (5′, 3′, or both 5′ and 3′ UTRs), and various combinations of the foregoing. The nucleic acid elements of the systems provided by the invention can be provided in a variety of topologies, including single-stranded, double-stranded, circular, linear, linear with open ends, linear with closed ends, and particular versions of these, such as doggybone DNA (dbDNA), closed-ended DNA (ceDNA).

[0224] As used herein, a “gene expression unit” is a nucleic acid sequence comprising at least one regulatory nucleic acid sequence operably linked to at least one effector sequence. A first nucleic acid sequence is operably linked with a second nucleic acid sequence when the first nucleic acid sequence is placed in a functional relationship with the second nucleic acid sequence. For instance, a promoter or enhancer is operably linked to a coding sequence if the promoter or enhancer affects the transcription or expression of the coding sequence. Operably linked DNA sequences may be contiguous or non-contiguous. Where necessary to join two protein-coding regions, operably linked sequences may be in the same reading frame.

[0225] The terms “host genome” or “host cell”, as used herein, refer to a cell and/or its genome into which protein and/or genetic material has been introduced. It should be understood that such terms are intended to refer not only to the particular subject cell and/or genome, but to the progeny of such a cell and/or the genome of the progeny of such a cell. Because certain modifications may occur in succeeding generations due to either mutation or environmental influences, such progeny may not, in fact, be identical to the parent cell, but are still included within the scope of the term “host cell” as used herein. A host genome or host cell may be an isolated cell or cell line grown in culture, or genomic material isolated from such a cell or cell line, or may be a host cell or host genome which composing living tissue or an organism. In some instances, a host cell may be an animal cell or a plant cell, e.g., as described herein. In certain instances, a host cell may be a mammalian cell, a human cell, avian cell, reptilian cell, bovine cell, horse cell, pig cell, goat cell, sheep cell, chicken cell, or turkey cell. In certain instances, a host cell may be a corn cell, soy cell, wheat cell, or rice cell.

[0226] As used herein, “operative association” describes a functional relationship between two nucleic acid sequences, such as a 1) promoter and 2) a heterologous object sequence, and means, in such example, the promoter and heterologous object sequence (e.g., a gene of interest) are oriented such that, under suitable conditions, the promoter drives expression of the heterologous object sequence. For instance, a template nucleic acid carrying a promoter and a heterologous object sequence may be single-stranded, e.g., either the (+) or (−) orientation. An “operative association” between the promoter and the heterologous object sequence in this template means that, regardless of whether the template nucleic acid will be transcribed in a particular state, when it is in the suitable state (e.g., is in the (+) orientation, in the presence of required catalytic factors, and NTPs, etc.), it is accurately transcribed. Operative association applies analogously to other pairs of nucleic acids, including other tissue-specific expression control sequences (such as enhancers, repressors and microRNA recognition sequences), IR/DR, ITRs, UTRs, or homology regions and heterologous object sequences or sequences encoding a retroviral RT domain.

[0227] The term “primer binding site sequence” or “PBS sequence,” as used herein, refers to a portion of a template RNA capable of binding to a region comprised in a target nucleic acid sequence. In some instances, a PBS sequence is a nucleic acid sequence comprising at least 3, 4, 5, 6, 7, or 8 bases with 100% identity to the region comprised in the target nucleic acid sequence. In some embodiments the primer region comprises at least 5, 6, 7, 8 bases with 100% identity to the region comprised in the target nucleic acid sequence. Without wishing to be bound by theory, in some embodiments when a template RNA comprises a PBS sequence and a heterologous object sequence, the PBS sequence binds to a region comprised in a target nucleic acid sequence, allowing a reverse transcriptase domain to use that region as a primer for reverse transcription, and to use the heterologous object sequence as a template for reverse transcription.

[0228] As used herein, a “stem-loop sequence” refers to a nucleic acid sequence (e.g., RNA sequence) with sufficient self-complementarity to form a stem-loop, e.g., having a stem comprising at least two (e.g., 3, 4, 5, 6, 7, 8, 9, or 10) base pairs, and a loop with at least three (e.g., four) base pairs. The stem may comprise mismatches or bulges.

[0229] As used herein, a “tissue-specific expression-control sequence” means nucleic acid elements that increase or decrease the level of a transcript comprising the heterologous object sequence in a target tissue in a tissue-specific manner, e.g., preferentially in on-target tissue(s), relative to off-target tissue(s). In some embodiments, a tissue-specific expression-control sequence preferentially drives or represses transcription, activity, or the half-life of a transcript comprising the heterologous object sequence in the target tissue in a tissue-specific manner, e.g., preferentially in an on-target tissue(s), relative to an off-target tissue(s). Exemplary tissue-specific expression-control sequences include tissue-specific promoters, repressors, enhancers, or combinations thereof, as well as tissue-specific microRNA recognition sequences. Tissue specificity refers to on-target (tissue(s) where expression or activity of the template nucleic acid is desired or tolerable) and off-target (tissue(s) where expression or activity of the template nucleic acid is not desired or is not tolerable). For example, a tissue-specific promoter drives expression preferentially in on-target tissues, relative to off-target tissues. In contrast, a microRNA that binds the tissue-specific microRNA recognition sequences is preferentially expressed in off-target tissues, relative to on-target tissues, thereby reducing expression of a template nucleic acid in off-target tissues. Accordingly, a promoter and a microRNA recognition sequence that are specific for the same tissue, such as the target tissue, have contrasting functions (promote and repress, respectively, with concordant expression levels, i.e., high levels of the microRNA in off-target tissues and low levels in on-target tissues, while promoters drive high expression in on-target tissues and low expression in off-target tissues) with regard to the transcription, activity, or half-life of an associated sequence in that tissue.

Table of Contents

| 1) | Introduction | |
|---|---|---|
| 2) | Gene modifying systems | |
| | a) | Polypeptide components of gene modifying systems |

| | |
|---|---|
| i) | Writing domain |
| ii) | Endonuclease domains and DNA binding domains |
| | (1) Gene modifying polypeptides comprising Cas domains |
| | (2) TAL Effectors and Zinc Finger Nucleases |
| iii) | Linkers |
| iv) | Localization sequences for gene modifying systems |
| v) | Evolved Variants of Gene Modifying |
| | Polypeptides and Systems |
| vi) | Inteins |
| vii) | Additional domains |

| | |
|---|---|
| b) | Template nucleic acids |

| | |
|---|---|
| i) | gRNA spacer and gRNA scaffold |
| ii) | Heterologous object sequence |
| iii) | PBS sequence |
| iv) | Exemplary Template Sequences |

| | c) | gRNAs with inducible activity |
|---|---|---|
| | d) | Circular RNAs and Ribozymes in Gene Modifying Systems |
| | e) | Target Nucleic Acid Site |
| | f) | Second strand nicking |
| 3) | Production of Compositions and Systems | |
| 4) | Therapeutic Applications | |
| 5) | Administration and Delivery | |
| | a) | Tissue Specific Activity/Administration |

| | |
|---|---|
| i) | Promoters |
| ii) | microRNAs |

| | |
|---|---|
| b) | Viral vectors and components thereof |
| c) | AAV Administration |
| d) | Lipid Nanoparticles |

| | |
|---|---|
| 6) | Kits, Articles of Manufacture, and Pharmaceutical Compositions |
| 7) | Chemistry, Manufacturing, and Controls (CMC) |

### INTRODUCTION

[0230] This disclosure relates to methods compositions for targeting, editing, modifying or manipulating a DNA sequence (e.g., inserting a heterologous object sequence into a target site of a mammalian genome) at one or more locations in a DNA sequence in a cell, tissue or subject, e.g., in vivo or in vitro. The heterologous object DNA sequence may include, e.g., a substitution, a deletion, an insertion, e.g., a coding sequence, a regulatory sequence, or a gene expression unit.

[0231] This disclosure relates, in part, to anchoring of a trans template RNA to a gene modifying polypeptide:sgRNA:target genomic DNA complex by two or more interactions. Without wishing to be bound by theory, it is contemplated that such anchoring can achieve high rewriting activity, e.g., for achieving single or several nucleotide long edits. For example, 1) an RRS:RBP interaction and 2) a 5′ end block Cas9 scaffold and spacer to target DNA interaction (mediated via an additional gene modifying polypeptide) represent exemplary interactions that together anchor a trans template RNA to a gene modifying polypeptide:sgRNA:target genomic DNA complex to enable rewriting. It is contemplated that the RRS:RBP interaction is critical in the absence of the 5′ end block spacer. It is further contemplated that the presence of both can provide high rewriting activity and the presence of the 5′ end block spacer in combination with a weaker RRS:RBP interaction rescues rewriting activity.

[0232] The disclosure also provides methods for treating disease using reverse transcriptase-based systems for altering a genomic DNA sequence of interest, e.g., by inserting, deleting, or substituting one or more nucleotides into/from the sequence of interest.

[0233] The disclosure provides, in part, methods for treating disease using a gene modifying system comprising a gene modifying polypeptide component and a template nucleic acid (e.g., template RNA) component. In some embodiments, a gene modifying system can be used to introduce an alteration into a target site in a genome. In some embodiments, the gene modifying polypeptide component comprises a writing domain (e.g., a reverse transcriptase domain), a DNA-binding domain, and an endonuclease domain (e.g., nickase domain). In some embodiments, the template nucleic acid (e.g., template RNA) comprises a sequence (e.g., a gRNA spacer) that binds a target site in the genome (e.g., that binds to a second strand of the target site), a sequence (e.g., a gRNA scaffold) that binds the gene modifying polypeptide component, a heterologous object sequence, and a PBS sequence. Without wishing to be bound by theory, it is thought that the template nucleic acid (e.g., template RNA) binds to the second strand of a target site in the genome, and binds to the gene modifying polypeptide component (e.g., localizing the polypeptide component to the target site in the genome). It is thought that the endonuclease (e.g., nickase) of the gene modifying polypeptide component cuts the target site (e.g., the first strand of the target site), e.g., allowing the PBS sequence to bind to a sequence adjacent to the site to be altered on the first strand of the target site. It is thought that the writing domain (e.g., reverse transcriptase domain) of the polypeptide component uses the first strand of the target site that is bound to the complementary sequence comprising the PBS sequence of the template nucleic acid as a primer and the heterologous object sequence of the template nucleic acid as a template to, e.g., polymerize a sequence complementary to the heterologous object sequence. Without wishing to be bound by theory, it is thought that selection of an appropriate heterologous object sequence can result in substitution, deletion, and/or insertion of one or more nucleotides at the target site.

### Gene Modifying Systems

[0234] In some embodiments, a gene modifying system described herein comprises: (A) a gene modifying polypeptide or a nucleic acid encoding the gene modifying polypeptide, wherein the gene modifying polypeptide comprises (i) a reverse transcriptase domain, and either (x) an endonuclease domain that contains DNA binding functionality or (y) an endonuclease domain and separate DNA binding domain; and (B) a template RNA. A gene modifying polypeptide, in some embodiments, acts as a substantially autonomous protein machine capable of integrating a template nucleic acid sequence into a target DNA molecule (e.g., in a mammalian host cell, such as a genomic DNA molecule in the host cell), substantially without relying on host machinery. For example, the gene modifying protein may comprise a DNA-binding domain, a reverse transcriptase domain, and an endonuclease domain. In some embodiments, the DNA-binding function may involve an RNA component that directs the protein to a DNA sequence, e.g., a gRNA spacer. In other embodiments, the gene modifying polypeptide may comprise a reverse transcriptase domain and an endonuclease domain. The RNA template element of a gene modifying system is typically heterologous to the gene modifying polypeptide element and provides an object sequence to be inserted (reverse transcribed) into the host genome. In some embodiments, the gene modifying polypeptide is capable of target primed reverse transcription. In some embodiments, the gene modifying polypeptide is capable of second-strand synthesis.

[0235] In some embodiments, a gene modifying system described herein comprises a gene modifying polypeptide comprising the amino acid sequence, or a functional portion thereof, of an exemplary gene modifying polypeptide as listed in any of Tables S1-S3, or an amino acid sequence having at least 70%, 75%, 80%, 85%, 90%, 95%, 96%, 97%, 98%, or 99% identity thereto, or a nucleic acid molecule encoding the gene modifying polypeptide. In some embodiments, a gene modifying system described herein comprises a gene modifying polypeptide comprising the amino acid sequence of an RT domain of an exemplary gene modifying polypeptide as listed in any of Tables S1-S3, or an amino acid sequence having at least 70%, 75%, 80%, 85%, 90%, 95%, 96%, 97%, 98%, or 99% identity thereto, or a nucleic acid molecule encoding the gene modifying polypeptide. In some embodiments, a gene modifying system described herein comprises a gene modifying polypeptide comprising the amino acid sequence of a DBD of an exemplary gene modifying polypeptide as listed in any of Tables S1-S3, or an amino acid sequence having at least 70%, 75%, 80%, 85%, 90%, 95%, 96%, 97%, 98%, or 99% identity thereto, or a nucleic acid molecule encoding the gene modifying polypeptide. In some embodiments, a gene modifying system described herein comprises a gene modifying polypeptide comprising the amino acid sequence of an RBD of an exemplary gene modifying polypeptide as listed in any of Tables S1-S3, or an amino acid sequence having at least 70%, 75%, 80%, 85%, 90%, 95%, 96%, 97%, 98%, or 99% identity thereto, or a nucleic acid molecule encoding the gene modifying polypeptide. In some embodiments, a gene modifying system described herein comprises a gene modifying polypeptide comprising the amino acid sequence of the RT domain, DBD, and RBD of an exemplary gene modifying polypeptide as listed in any of Tables S1-S3, or amino acid sequences having at least 70%, 75%, 80%, 85%, 90%, 95%, 96%, 97%, 98%, or 99% identity thereto, or a nucleic acid molecule encoding the gene modifying polypeptide.

[0236] In some embodiments, a gene modifying system described herein comprises a gene modifying polypeptide comprising the amino acid sequence, or a functional portion thereof, of an exemplary gene modifying polypeptide as listed in Table S1, or an amino acid sequence having at least 70%, 75%, 80%, 85%, 90%, 95%, 96%, 97%, 98%, or 99% identity thereto, or a nucleic acid molecule encoding the gene modifying polypeptide. In some embodiments, a gene modifying system described herein comprises a gene modifying polypeptide comprising the amino acid sequence of an RT domain of an exemplary gene modifying polypeptide as listed in Table S1, or an amino acid sequence having at least 70%, 75%, 80%, 85%, 90%, 95%, 96%, 97%, 98%, or 99% identity thereto, or a nucleic acid molecule encoding the gene modifying polypeptide. In some embodiments, a gene modifying system described herein comprises a gene modifying polypeptide comprising the amino acid sequence of a DBD of an exemplary gene modifying polypeptide as listed in Table S1, or an amino acid sequence having at least 70%, 75%, 80%, 85%, 90%, 95%, 96%, 97%, 98%, or 99% identity thereto, or a nucleic acid molecule encoding the gene modifying polypeptide. In some embodiments, a gene modifying system described herein comprises a gene modifying polypeptide comprising the amino acid sequence of an RBD of an exemplary gene modifying polypeptide as listed in Table S1, or an amino acid sequence having at least 70%, 75%, 80%, 85%, 90%, 95%, 96%, 97%, 98%, or 99% identity thereto, or a nucleic acid molecule encoding the gene modifying polypeptide. In some embodiments, a gene modifying system described herein comprises a gene modifying polypeptide comprising the amino acid sequence of the RT domain, DBD, and RBD of an exemplary gene modifying polypeptide as listed in Table S1, or amino acid sequences having at least 70%, 75%, 80%, 85%, 90%, 95%, 96%, 97%, 98%, or 99% identity thereto, or a nucleic acid molecule encoding the gene modifying polypeptide.

[0237] In some embodiments, a gene modifying system described herein comprises a gene modifying polypeptide comprising the amino acid sequence, or a functional portion thereof, of an exemplary gene modifying polypeptide as listed in Table S2, or an amino acid sequence having at least 70%, 75%, 80%, 85%, 90%, 95%, 96%, 97%, 98%, or 99% identity thereto, or a nucleic acid molecule encoding the gene modifying polypeptide. In some embodiments, a gene modifying system described herein comprises a gene modifying polypeptide comprising the amino acid sequence of an RT domain of an exemplary gene modifying polypeptide as listed in Table S2, or an amino acid sequence having at least 70%, 75%, 80%, 85%, 90%, 95%, 96%, 97%, 98%, or 99% identity thereto, or a nucleic acid molecule encoding the gene modifying polypeptide. In some embodiments, a gene modifying system described herein comprises a gene modifying polypeptide comprising the amino acid sequence of a DBD of an exemplary gene modifying polypeptide as listed in Table S2, or an amino acid sequence having at least 70%, 75%, 80%, 85%, 90%, 95%, 96%, 97%, 98%, or 99% identity thereto, or a nucleic acid molecule encoding the gene modifying polypeptide. In some embodiments, a gene modifying system described herein comprises a gene modifying polypeptide comprising the amino acid sequence of an RBD of an exemplary gene modifying polypeptide as listed in Table S2, or an amino acid sequence having at least 70%, 75%, 80%, 85%, 90%, 95%, 96%, 97%, 98%, or 99% identity thereto, or a nucleic acid molecule encoding the gene modifying polypeptide. In some embodiments, a gene modifying system described herein comprises a gene modifying polypeptide comprising the amino acid sequence of the RT domain, DBD, and RBD of an exemplary gene modifying polypeptide as listed in Table S2, or amino acid sequences having at least 70%, 75%, 80%, 85%, 90%, 95%, 96%, 97%, 98%, or 99% identity thereto, or a nucleic acid molecule encoding the gene modifying polypeptide.

[0238] In some embodiments, a gene modifying system described herein comprises a gene modifying polypeptide comprising the amino acid sequence, or a functional portion thereof, of an exemplary gene modifying polypeptide as listed in Table S3, or an amino acid sequence having at least 70%, 75%, 80%, 85%, 90%, 95%, 96%, 97%, 98%, or 99% identity thereto, or a nucleic acid molecule encoding the gene modifying polypeptide. In some embodiments, a gene modifying system described herein comprises a gene modifying polypeptide comprising the amino acid sequence of an RT domain of an exemplary gene modifying polypeptide as listed in Table S3, or an amino acid sequence having at least 70%, 75%, 80%, 85%, 90%, 95%, 96%, 97%, 98%, or 99% identity thereto, or a nucleic acid molecule encoding the gene modifying polypeptide. In some embodiments, a gene modifying system described herein comprises a gene modifying polypeptide comprising the amino acid sequence of a DBD of an exemplary gene modifying polypeptide as listed in Table S3, or an amino acid sequence having at least 70%, 75%, 80%, 85%, 90%, 95%, 96%, 97%, 98%, or 99% identity thereto, or a nucleic acid molecule encoding the gene modifying polypeptide. In some embodiments, a gene modifying system described herein comprises a gene modifying polypeptide comprising the amino acid sequence of an RBD of an exemplary gene modifying polypeptide as listed in Table S3, or an amino acid sequence having at least 70%, 75%, 80%, 85%, 90%, 95%, 96%, 97%, 98%, or 99% identity thereto, or a nucleic acid molecule encoding the gene modifying polypeptide. In some embodiments, a gene modifying system described herein comprises a gene modifying polypeptide comprising the amino acid sequence of the RT domain, DBD, and RBD of an exemplary gene modifying polypeptide as listed in Table S3, or amino acid sequences having at least 70%, 75%, 80%, 85%, 90%, 95%, 96%, 97%, 98%, or 99% identity thereto, or a nucleic acid molecule encoding the gene modifying polypeptide.

[0239] In some embodiments, a gene modifying system described herein comprises a template RNA comprising a nucleic acid sequence as listed in Table S4, or a nucleic acid sequence having at least 70%, 75%, 80%, 85%, 90%, 95%, 96%, 97%, 98%, or 99% identity thereto. In some embodiments, a gene modifying system described herein comprises a template RNA comprising a 5′ end block sequence of a template sequence as listed in Table S4, or a nucleic acid sequence having at least 70%, 75%, 80%, 85%, 90%, 95%, 96%, 97%, 98%, or 99% identity thereto. In some embodiments, a gene modifying system described herein comprises a template RNA comprising a PBS sequence of a template sequence as listed in Table S4, or a nucleic acid sequence having at least 70%, 75%, 80%, 85%, 90%, 95%, 96%, 97%, 98%, or 99% identity thereto. In some embodiments, a gene modifying system described herein comprises a template RNA comprising a linker sequence of a template sequence as listed in Table S4, or a nucleic acid sequence having at least 70%, 75%, 80%, 85%, 90%, 95%, 96%, 97%, 98%, or 99% identity thereto. In some embodiments, a gene modifying system described herein comprises a template RNA comprising one or more (e.g., 1, 2, 3, or 4) RRS sequences of a template sequence as listed in Table S4, or nucleic acid sequences having at least 70%, 75%, 80%, 85%, 90%, 95%, 96%, 97%, 98%, or 99% identity thereto. In some embodiments, a gene modifying system described herein comprises a template RNA comprising a 3′ end block sequence of a template sequence as listed in Table S4, or a nucleic acid sequence having at least 70%, 75%, 80%, 85%, 90%, 95%, 96%, 97%, 98%, or 99% identity thereto. In some embodiments, a gene modifying system described herein comprises a template RNA comprising one or more (e.g., 1, 2, 3, or 4) of (e.g., in 5′ to 3′ order) a 5′ end block sequence, optionally a PBS sequence, one or more (e.g., 1, 2, 3, or 4) RRS sequences, and a 3′ end block sequence of a template sequence as listed in Table S4, or nucleic acid sequences having at least 70%, 75%, 80%, 85%, 90%, 95%, 96%, 97%, 98%, or 99% identity thereto.

[0240] In some embodiments the gene modifying system is combined with a second polypeptide. In some embodiments, the second polypeptide may comprise an endonuclease domain. In some embodiments, the second polypeptide may comprise a polymerase domain, e.g., a reverse transcriptase domain. In some embodiments, the second polypeptide may comprise a DNA-dependent DNA polymerase domain. In some embodiments, the second polypeptide aids in completion of the genome edit, e.g., by contributing to second-strand synthesis or DNA repair resolution.

[0241] A functional gene modifying polypeptide can be made up of unrelated DNA binding, reverse transcription, and endonuclease domains. This modular structure allows combining of functional domains, e.g., dCas9 (DNA binding), MMLV reverse transcriptase (reverse transcription), FokI (endonuclease). In some embodiments, multiple functional domains may arise from a single protein, e.g., Cas9 or Cas9 nickase (DNA binding, endonuclease).

[0242] In some embodiments, a gene modifying polypeptide includes one or more domains that, collectively, facilitate 1) binding the template nucleic acid, 2) binding the target DNA molecule, and 3) facilitate integration of the at least a portion of the template nucleic acid into the target DNA. In some embodiments, the gene modifying polypeptide is an engineered polypeptide that comprises one or more amino acid substitutions to a corresponding naturally occurring sequence. In some embodiments, the gene modifying polypeptide comprises two or more domains that are heterologous relative to each other, e.g., through a heterologous fusion (or other conjugate) of otherwise wild-type domains, or well as fusions of modified domains, e.g., by way of replacement or fusion of a heterologous sub-domain or other substituted domain. For instance, in some embodiments, one or more of: the RT domain is heterologous to the DBD; the DBD is heterologous to the endonuclease domain; or the RT domain is heterologous to the endonuclease domain.

[0243] In some embodiments, a template RNA molecule for use in the system comprises, from 5′ to 3′ (1) a gRNA spacer; (2) a gRNA scaffold; (3) heterologous object sequence (4) a primer binding site (PBS) sequence. In some embodiments:
[0244] (1) Is a gRNA spacer of ˜18-22 nt, e.g., is 20 nt
[0245] (2) Is a gRNA scaffold comprising one or more hairpin loops, e.g., 1, 2, of 3 loops for associating the template with a Cas domain, e.g., a nickase Cas9 domain. In some embodiments, the gRNA scaffold comprises the sequence, from 5′ to 3′,

(SEQ ID NO: 8)
GTTTTAGAGCTAGAAATAGCAAGTTAAAATAAGGCTAGTCCGTTATCAAC
TTGAAAAAGTGGGACCGAGTCGGTCC

[0246] (3) In some embodiments, the heterologous object sequence is, e.g., 7-74, e.g., 10-20, 20-30, 30-40, 40-50, 50-60, 60-70, or 70-80 nt or, 80-90 nt in length. In some embodiments, the first (most 5′) base of the sequence is not C.
[0247] (4) In some embodiments, the PBS sequence that binds the target priming sequence after nicking occurs is e.g., 3-20 nt, e.g., 7-15 nt, e.g., 12-14 nt. In some embodiments, the PBS sequence has 40-60% GC content.

[0248] In some embodiments, a second gRNA associated with the system may help drive complete integration. In some embodiments, the second gRNA may target a location that is 0-200 nt away from the first-strand nick, e.g., 0-50, 50-100, 100-200 nt away from the first-strand nick. In some embodiments, the second gRNA can only bind its target sequence after the edit is made, e.g., the gRNA binds a sequence present in the heterologous object sequence, but not in the initial target sequence.

[0249] In some embodiments, a gene modifying system described herein is used to make an edit in HEK293, K562, U2OS, or HeLa cells. In some embodiment, a gene modifying system is used to make an edit in primary cells, e.g., primary cortical neurons from E18.5 mice.

[0250] In some embodiments, a gene modifying polypeptide as described herein comprises a reverse transcriptase or RT domain (e.g., as described herein) that comprises a MoMLV RT sequence or variant thereof. In embodiments, the MoMLV RT sequence comprises one or more mutations selected from D200N, L603W, T330P, T306K, W313F, D524G, E562Q, D583N, P51L, S67R, E67K, T197A, H204R, E302K, F309N, L435G, N454K, H594Q, D653N, R110S, and K103L. In embodiments, the MoMLV RT sequence comprises a combination of mutations, such as D200N, L603W, and T330P, optionally further including T306K and/or W313F.

[0251] In some embodiments, an endonuclease domain (e.g., as described herein) comprises nCAS9, e.g., comprising the H840A mutation.

[0252] In some embodiments, the heterologous object sequence (e.g., of a system as described herein) is about 1-50, 50-100, 100-200, 200-300, 300-400, 400-500, 500-600, 600-700, 700-800, 800-900, 900-1000, or more, nucleotides in length.

[0253] In some embodiments, the RT and endonuclease domains are joined by a flexible linker, e.g., comprising the amino acid sequence SGGSSGGSSGSETPGTSESATPESSGGSSGGSS (SEQ ID NO: 6).

[0254] In some embodiments, the endonuclease domain is N-terminal relative to the RT domain. In some embodiments, the endonuclease domain is C-terminal relative to the RT domain.

[0255] In some embodiments, the system incorporates a heterologous object sequence into a target site by TPRT, e.g., as described herein.

[0256] In some embodiments, a gene modifying polypeptide comprises a DNA binding domain. In some embodiments, a gene modifying polypeptide comprises an RNA binding domain. In some embodiments, the RNA binding domain comprises an RNA binding domain of B-box protein, MS2 coat protein, dCas, or an element of a sequence of a table herein. In some embodiments, the RNA binding domain is capable of binding to a template RNA with greater affinity than a reference RNA binding domain.

[0257] In some embodiments, a gene modifying system is capable of producing an insertion into the target site of at least 45, 50, 55, 60, 65, 70, 75, 80, 85, 90, 95, or 100 nucleotides (and optionally no more than 500, 400, 300, 200, or 100 nucleotides). In some embodiments, a gene modifying system is capable of producing an insertion into the target site of at least 1, 2, 3, 4, 5, 6, 7, 8, 9, 10, 15, 20, 25, 30, 35, 40, 45, 50, 55, 60, 65, 70, 75, 80, 85, 90, 95, or 100 nucleotides (and optionally no more than 500, 400, 300, 200, or 100 nucleotides). In some embodiments, a gene modifying system is capable of producing an insertion into the target site of at least 0.2, 0.3, 0.4, 0.5, 0.6, 0.7, 0.8, 0.9, 1, 1.5, 2, 2.5, 3, 3.5, 4, 4.5, 5, 5.5, 6, 6.5, 7, 7.5, 8, 8.5, 9, 9.5 or 10 kilobases (and optionally no more than 1, 5, 10, or 20 kilobases). In some embodiments, a gene modifying system is capable of producing a deletion of at least 81, 85, 90, 95, 100, 110, 120, 130, 140, 150, 160, 170, 180, 190, or 200 nucleotides (and optionally no more than 500, 400, 300, or 200 nucleotides). In some embodiments, a gene modifying system is capable of producing a deletion of at least 81, 85, 90, 95, 100, 110, 120, 130, 140, 150, 160, 170, 180, 190, or 200 nucleotides (and optionally no more than 500, 400, 300, or 200 nucleotides). In some embodiments, a gene modifying system is capable of producing a deletion of at least 1, 2, 3, 4, 5, 6, 7, 8, 9, 10, 15, 20, 25, 30, 35, 40, 45, 50, 55, 60, 65, 70, 75, 80, 85, 90, 95, 100, 110, 120, 130, 140, 150, 160, 170, 180, 190, or 200 nucleotides (and optionally no more than 500, 400, 300, or 200 nucleotides). In some embodiments, a gene modifying system is capable of producing a deletion of at least 0.2, 0.3, 0.4, 0.5, 0.6, 0.7, 0.8, 0.9, 1, 1.5, 2, 2.5, 3, 3.5, 4, 4.5, 5, 5.5, 6, 6.5, 7, 7.5, 8, 8.5, 9, 9.5 or 10 kilobases (and optionally no more than 1, 5, 10, or 20 kilobases). In some embodiments, a gene modifying system is capable of producing a substitution into the target site of at least 1, 2, 3, 4, 5, 6, 7, 8, 9, 10, 15, 20, 25, 30, 35, 40, 45, 50, 60, 70, 80, 90, or 100 or more nucleotides. In some embodiments, a gene modifying system is capable of producing a substitution in the target site of 1-2, 2-3, 3-4, 4-5, 5-10, 10-15, 15-20, 20-30, 30-40, 40-50, 50-60, 60-70, 70-80, 80-90, or 90-100 nucleotides.

[0258] In some embodiments, the substitution is a transition mutation. In some embodiments, the substitution is a transversion mutation. In some embodiments, the substitution converts an adenine to a thymine, an adenine to a guanine, an adenine to a cytosine, a guanine to a thymine, a guanine to a cytosine, a guanine to an adenine, a thymine to a cytosine, a thymine to an adenine, a thymine to a guanine, a cytosine to an adenine, a cytosine to a guanine, or a cytosine to a thymine.

[0259] In some embodiments, an insertion, deletion, substitution, or combination thereof, increases or decreases expression (e.g. transcription or translation) of a gene. In some embodiments, an insertion, deletion, substitution, or combination thereof, increases or decreases expression (e.g. transcription or translation) of a gene by altering, adding, or deleting sequences in a promoter or enhancer, e.g. sequences that bind transcription factors. In some embodiments, an insertion, deletion, substitution, or combination thereof alters translation of a gene (e.g. alters an amino acid sequence), inserts or deletes a start or stop codon, alters or fixes the translation frame of a gene. In some embodiments, an insertion, deletion, substitution, or combination thereof alters splicing of a gene, e.g. by inserting, deleting, or altering a splice acceptor or donor site. In some embodiments, an insertion, deletion, substitution, or combination thereof alters transcript or protein half-life. In some embodiments, an insertion, deletion, substitution, or combination thereof alters protein localization in the cell (e.g. from the cytoplasm to a mitochondria, from the cytoplasm into the extracellular space (e.g. adds a secretion tag)). In some embodiments, an insertion, deletion, substitution, or combination thereof alters (e.g. improves) protein folding (e.g. to prevent accumulation of misfolded proteins). In some embodiments, an insertion, deletion, substitution, or combination thereof, alters, increases, decreases the activity of a gene, e.g. a protein encoded by the gene.

[0260] Exemplary gene modifying polypeptides, and systems comprising them and methods of using them are described, e.g., in PCT/US2021/020948, which is incorporated herein by reference with respect to retroviral RT domains, including the amino acid and nucleic acid sequences therein.

[0261] Exemplary gene modifying polypeptides and retroviral RT domain sequences are also described, e.g., in International Application No. PCT/US21/20948 filed Mar. 4, 2021, e.g., at Table 30, Table 31, and Table 44 therein; the entire application is incorporated by reference herein with respect to retroviral RTs, e.g., in said sequences and tables. Accordingly, a gene modifying polypeptide described herein may comprise an amino acid sequence according to any of the Tables mentioned in this paragraph, or a domain thereof (e.g., a retroviral RT domain), or a functional fragment or variant of any of the foregoing, or an amino acid sequence having at least 70%, 80%, 85%, 90%, 95%, or 99% identity thereto.

[0262] In some embodiments, a polypeptide for use in any of the systems described herein can be a molecular reconstruction or ancestral reconstruction based upon the aligned polypeptide sequence of multiple homologous proteins. In some embodiments, a reverse transcriptase domain for use in any of the systems described herein can be a molecular reconstruction or an ancestral reconstruction, or can be modified at particular residues, based upon alignments of reverse transcriptase domains from the same or different sources. A skilled artisan can, based on the Accession numbers provided herein, align polypeptides or nucleic acid sequences, e.g., by using routine sequence analysis tools as Basic Local Alignment Search Tool (BLAST) or CD-Search for conserved domain analysis. Molecular reconstructions can be created based upon sequence consensus, e.g. using approaches described in Ivics et al., Cell 1997, 501-510; Wagstaff et al., Molecular Biology and Evolution 2013, 88-99.

### Polypeptide Components of Gene Modifying Systems

[0263] In some embodiments, the gene modifying polypeptide possesses the functions of DNA target site binding, template nucleic acid (e.g., RNA) binding, DNA target site cleavage, and template nucleic acid (e.g., RNA) writing, e.g., reverse transcription. In some embodiments, each functions is contained within a distinct domain. In some embodiments, a function may be attributed to two or more domains (e.g., two or more domains, together, exhibit the functionality). In some embodiments, two or more domains may have the same or similar function (e.g., two or more domains each independently have DNA-binding functionality, e.g., for two different DNA sequences). In other embodiments, one or more domains may be capable of enabling one or more functions, e.g., a Cas9 domain enabling both DNA binding and target site cleavage. In some embodiments, the domains are all located within a single polypeptide. In some embodiments, a first domain is in one polypeptide and a second domain is in a second polypeptide. For example, in some embodiments, the sequences may be split between a first polypeptide and a second polypeptide, e.g., wherein the first polypeptide comprises a reverse transcriptase (RT) domain and wherein the second polypeptide comprises a DNA-binding domain and an endonuclease domain, e.g., a nickase domain. As a further example, in some embodiments, the first polypeptide and the second polypeptide each comprise a DNA binding domain (e.g., a first DNA binding domain and a second DNA binding domain). In some embodiments, the first and second polypeptide may be brought together post-translationally via a split-intein to form a single gene modifying polypeptide.

[0264] In some aspects, a gene modifying polypeptide described herein comprises (e.g., a system described herein comprises a gene modifying polypeptide that comprises): 1) a Cas domain (e.g., a Cas nickase domain, e.g., a Cas9 nickase domain); 2) a reverse transcriptase (RT) domain of Table 1, or a sequence having at least 70%, 75%, 80%, 85%, 90%, 95%, 97%, 98%, or 99% identity thereto, wherein the RT domain is C-terminal of the Cas domain; and a linker disposed between the RT domain and the Cas domain, wherein the linker has a sequence from the same row of Table 1 as the RT domain, or a sequence having at least 70%, 75%, 80%, 85%, 90%, 95%, 97%, 98%, or 99% identity thereto.

[0265] In some embodiments, the RT domain has a sequence with 100% identity to the RT domain of Table 1 and the linker has a sequence with 100% identity to the linker sequence from the same row of Table 1 as the RT domain. In some embodiments, the Cas domain comprises a sequence of Table 8, or a sequence having at least 70%, 75%, 80%, 85%, 90%, 95%, 98%, or 99% identity thereto. In some embodiments, the gene modifying polypeptide comprises an amino acid sequence according to any of SEQ ID Nos: 1-3332 in the sequence listing, or a sequence having at least 70%, 75%, 80%, 85%, 90%, 95%, 97%, 98%, or 99% identity thereto.

[0266] In some embodiments, a gene modifying polypeptide described herein comprises the amino acid sequence, or a functional portion thereof, of an exemplary gene modifying polypeptide as listed in any of Tables S1-S3, or an amino acid sequence having at least 70%, 75%, 80%, 85%, 90%, 95%, 96%, 97%, 98%, or 99% identity thereto. In some embodiments, a gene modifying polypeptide described herein comprises the amino acid sequence of an RT domain of an exemplary gene modifying polypeptide as listed in any of Tables S1-S3, or an amino acid sequence having at least 70%, 75%, 80%, 85%, 90%, 95%, 96%, 97%, 98%, or 99% identity thereto. In some embodiments, a gene modifying polypeptide described herein comprises the amino acid sequence of a DBD of an exemplary gene modifying polypeptide as listed in any of Tables S1-S3, or an amino acid sequence having at least 70%, 75%, 80%, 85%, 90%, 95%, 96%, 97%, 98%, or 99% identity thereto. In some embodiments, a gene modifying polypeptide described herein comprises the amino acid sequence of an RBD of an exemplary gene modifying polypeptide as listed in any of Tables S1-S3, or an amino acid sequence having at least 70%, 75%, 80%, 85%, 90%, 95%, 96%, 97%, 98%, or 99% identity thereto. In some embodiments, a gene modifying polypeptide described herein comprises the amino acid sequence of the RT domain, DBD, and RBD of an exemplary gene modifying polypeptide as listed in any of Tables S1-S3, or amino acid sequences having at least 70%, 75%, 80%, 85%, 90%, 95%, 96%, 97%, 98%, or 99% identity thereto.

[0267] In some embodiments, a gene modifying polypeptide described herein comprises the amino acid sequence, or a functional portion thereof, of an exemplary gene modifying polypeptide as listed in Table S1, or an amino acid sequence having at least 70%, 75%, 80%, 85%, 90%, 95%, 96%, 97%, 98%, or 99% identity thereto. In some embodiments, a gene modifying polypeptide described herein comprises the amino acid sequence of an RT domain of an exemplary gene modifying polypeptide as listed in Table S1, or an amino acid sequence having at least 70%, 75%, 80%, 85%, 90%, 95%, 96%, 97%, 98%, or 99% identity thereto. In some embodiments, a gene modifying polypeptide described herein comprises the amino acid sequence of a DBD of an exemplary gene modifying polypeptide as listed in Table S1, or an amino acid sequence having at least 70%, 75%, 80%, 85%, 90%, 95%, 96%, 97%, 98%, or 99% identity thereto. In some embodiments, a gene modifying polypeptide described herein comprises the amino acid sequence of an RBD of an exemplary gene modifying polypeptide as listed in Table S1, or an amino acid sequence having at least 70%, 75%, 80%, 85%, 90%, 95%, 96%, 97%, 98%, or 99% identity thereto. In some embodiments, a gene modifying polypeptide described herein comprises the amino acid sequence of the RT domain, DBD, and RBD of an exemplary gene modifying polypeptide as listed in Table S1, or amino acid sequences having at least 70%, 75%, 80%, 85%, 90%, 95%, 96%, 97%, 98%, or 99% identity thereto.

[0268] In some embodiments, a gene modifying polypeptide described herein comprises the amino acid sequence, or a functional portion thereof, of an exemplary gene modifying polypeptide as listed in Table S2, or an amino acid sequence having at least 70%, 75%, 80%, 85%, 90%, 95%, 96%, 97%, 98%, or 99% identity thereto. In some embodiments, a gene modifying polypeptide described herein comprises the amino acid sequence of an RT domain of an exemplary gene modifying polypeptide as listed in Table S2, or an amino acid sequence having at least 70%, 75%, 80%, 85%, 90%, 95%, 96%, 97%, 98%, or 99% identity thereto. In some embodiments, a gene modifying polypeptide described herein comprises the amino acid sequence of a DBD of an exemplary gene modifying polypeptide as listed in Table S2, or an amino acid sequence having at least 70%, 75%, 80%, 85%, 90%, 95%, 96%, 97%, 98%, or 99% identity thereto. In some embodiments, a gene modifying polypeptide described herein comprises the amino acid sequence of an RBD of an exemplary gene modifying polypeptide as listed in Table S2, or an amino acid sequence having at least 70%, 75%, 80%, 85%, 90%, 95%, 96%, 97%, 98%, or 99% identity thereto. In some embodiments, a gene modifying polypeptide described herein comprises the amino acid sequence of the RT domain, DBD, and RBD of an exemplary gene modifying polypeptide as listed in Table S2, or amino acid sequences having at least 70%, 75%, 80%, 85%, 90%, 95%, 96%, 97%, 98%, or 99% identity thereto.

[0269] In some embodiments, a gene modifying polypeptide described herein comprises the amino acid sequence, or a functional portion thereof, of an exemplary gene modifying polypeptide as listed in Table S3, or an amino acid sequence having at least 70%, 75%, 80%, 85%, 90%, 95%, 96%, 97%, 98%, or 99% identity thereto. In some embodiments, a gene modifying polypeptide described herein comprises the amino acid sequence of an RT domain of an exemplary gene modifying polypeptide as listed in Table S3, or an amino acid sequence having at least 70%, 75%, 80%, 85%, 90%, 95%, 96%, 97%, 98%, or 99% identity thereto. In some embodiments, a gene modifying polypeptide described herein comprises the amino acid sequence of a DBD of an exemplary gene modifying polypeptide as listed in Table S3, or an amino acid sequence having at least 70%, 75%, 80%, 85%, 90%, 95%, 96%, 97%, 98%, or 99% identity thereto. In some embodiments, a gene modifying polypeptide described herein comprises the amino acid sequence of an RBD of an exemplary gene modifying polypeptide as listed in Table S3, or an amino acid sequence having at least 70%, 75%, 80%, 85%, 90%, 95%, 96%, 97%, 98%, or 99% identity thereto. In some embodiments, a gene modifying polypeptide described herein comprises the amino acid sequence of the RT domain, DBD, and RBD of an exemplary gene modifying polypeptide as listed in Table S3, or amino acid sequences having at least 70%, 75%, 80%, 85%, 90%, 95%, 96%, 97%, 98%, or 99% identity thereto.

[0270] In some embodiments, a gene modifying polypeptide described herein comprises a DBD, RT domain, and one or more RBDs (e.g., as described herein).

[0271] In certain embodiments, the gene modifying polypeptide comprises, in N-terminal to C-terminal order, a DBD (e.g., a Cas domain, e.g., a Cas9 domain, e.g., as described herein), one or more (e.g., 1, 2, 3, or 4) RBDs, and an RT domain. In embodiments, the DBD and the N-terminal RBD are connected by a linker (e.g., as described herein). In embodiments, the C-terminal RBD and the RT domain are connected by a linker (e.g., as described herein).

[0272] In certain embodiments, the gene modifying polypeptide comprises, in N-terminal to C-terminal order, an RT domain, one or more (e.g., 1, 2, 3, or 4) RBDs, and a DBD (e.g., a Cas domain, e.g., a Cas9 domain, e.g., as described herein). In embodiments, the RT domain and the N-terminal RBD are connected by a linker (e.g., as described herein). In embodiments, the C-terminal RBD and the DBD are connected by a linker (e.g., as described herein).

[0273] In certain embodiments, the gene modifying polypeptide comprises, in N-terminal to C-terminal order, a DBD (e.g., a Cas domain, e.g., a Cas9 domain, e.g., as described herein), an RT domain, and one or more (e.g., 1, 2, 3, or 4) RBDs. In embodiments, the DBD and RT domain are connected by a linker (e.g., as described herein). In embodiments, the RT domain and the the N-terminal RBD are connected by a linker (e.g., as described herein).

[0274] In some embodiments, the gene modifying polypeptide comprises an N-terminal methionine residue.

[0275] In some embodiments, the gene modifying polypeptide comprises one or more nuclear localization sequences (NLSes), e.g., as described herein.

[0276] In some embodiments, the gene modifying polypeptide comprises a GG amino acid sequence between the Cas domain and the linker, an AG amino acid sequence between the RT domain and the second NLS, and/or a GG amino acid sequence between the linker and the RT domain. In some embodiments, the gene modifying polypeptide comprises a sequence of SEQ ID NO: 4000 which comprises the first NLS and the Cas domain, or a sequence having at least 70%, 75%, 80%, 85%, 90%, 95%, 98%, or 99% identity thereto. In some embodiments, the gene modifying polypeptide comprises a sequence of SEQ ID NO: 4001 which comprises the second NLS, or a sequence having at least 70%, 75%, 80%, 85%, 90%, 95%, 98%, or 99% identity thereto.

Exemplary N-terminal NLS-Cas9 domain
(SEQ ID NO: 4000)
MPAAKRVKLDGGDKKYSIGLDIGTNSVGWAVITDEYKVPSKKFKVLGNTD
RHSIKKNLIGALLFDSGETAEATRLKRTARRRYTRRKNRICYLQEIFSNE
MAKVDDSFFHRLEESFLVEEDKKHERHPIFGNIVDEVAYHEKYPTIYHLR
KKLVDSTDKADLRLIYLALAHMIKFRGHFLIEGDLNPDNSDVDKLFIQLV
QTYNQLFEENPINASGVDAKAILSARLSKSRRLENLIAQLPGEKKNGLFG
NLIALSLGLTPNFKSNFDLAEDAKLQLSKDTYDDDLDNLLAQIGDQYADL
FLAAKNLSDAILLSDILRVNTEITKAPLSASMIKRYDEHHQDLILLKALV
RQQLPEKYKEIFFDQSKNGYAGYIDGGASQEEFYKFIKPILEKMDGTEEL
LVKLNREDLLRKQRTFDNGSIPHQIHLGELHAILRRQEDFYPFLKDNREK
IEKILTFRIPYYVGPLARGNSRFAWMTRKSEETITPWNFEEVVDKGASAQ
SFIERMTNFDKNLPNEKVLPKHSLLYEYFTVYNELTKVKYVTEGMRKPAF
LSGEQKKAIVDLLFKTNRKVTVKQLKEDYFKKIECFDSVEISGVEDRFNA
SLGTYHDLLKIIKDKDFLDNEENEDILEDIVLTLTLFEDREMIEERLKTY
AHLFDDKVMKQLKRRRYTGWGRLSRKLINGIRDKQSGKTILDFLKSDGFA
NRNFMQLIHDDSLTFKEDIQKAQVSGQGDSLHEHIANLAGSPAIKKGILQ
TVKVVDELVKVMGRHKPENIVIEMARENQTTQKGQKNSRERMKRIEEGIK
ELGSQILKEHPVENTQLQNEKLYLYYLQNGRDMYVDQELDINRLSDYDVD
HIVPQSFLKDDSIDNKVLTRSDKARGKSDNVPSEEVVKKMKNYWRQLLNA
KLITQRKFDNLTKAERGGLSELDKAGFIKRQLVETRQITKHVAQILDSRM
NTKYDENDKLIREVKVITLKSKLVSDFRKDFQFYKVREINNYHHAHDAYL
NAVVGTALIKKYPKLESEFVYGDYKVYDVRKMIAKSEQEIGKATAKYFFY
SNIMNFFKTEITLANGEIRKRPLIETNGETGEIVWDKGRDFATVRKVLSM
PQVNIVKKTEVQTGGFSKESILPKRNSDKLIARKKDWDPKKYGGFDSPTV
AYSVLVVAKVEKGKSKKLKSVKELLGITIMERSSFEKNPIDFLEAKGYKE
VKKDLIIKLPKYSLFELENGRKRMLASAGELQKGNELALPSKYVNFLYLA
SHYEKLKGSPEDNEQKQLFVEQHKHYLDEIIEQISEFSKRVILADANLDK
VLSAYNKHRDKPIREQAENIIHLFTLINLGAPAAFKYFDTTIDRKRYTST
KEVLDATLIHQSITGLYETRIDLSQLGGDGG
Exemplary C-terminal sequence comprising an NLS
(SEQ ID NO: 4001)
AGKRTADGSEFEKRTADGSEFESPKKKAKVE

### Gene Modifying Domain (RT Domain)

[0277] In certain aspects of the present invention, the gene modifying domain of the gene modifying system possesses reverse transcriptase activity and is also referred to as a reverse transcriptase domain (a RT domain). In some embodiments, the RT domain comprises an RT catalytic portion and RNA-binding region (e.g., a region that binds the template RNA).

[0278] In some embodiments, a nucleic acid encoding the reverse transcriptase is altered from its natural sequence to have altered codon usage, e.g. improved for human cells. In some embodiments the reverse transcriptase domain is a heterologous reverse transcriptase from a retrovirus. In some embodiments, the RT domain comprising a gene modifying polypeptide has been mutated from its original amino acid sequence, e.g., has at least 1, 2, 3, 4, 5, 6, 7, 8, 9, 10, 20, 30, 40, 50, 60, 70, 80, 90, or 100 substitutions. In some embodiments, the RT domain is derived from the RT of a retrovirus, e.g., HIV-1 RT, Moloney Murine Leukemia Virus (MMLV) RT, avian myeloblastosis virus (AMV) RT, or Rous Sarcoma Virus (RSV) RT.

[0279] In some embodiments, the retroviral reverse transcriptase (RT) domain exhibits enhanced stringency of target-primed reverse transcription (TPRT) initiation, e.g., relative to an endogenous RT domain. In some embodiments, the RT domain initiates TPRT when the 3 nt in the target site immediately upstream of the first strand nick, e.g., the genomic DNA priming the RNA template, have at least 66% or 100% complementarity to the 3 nt of homology in the RNA template. In some embodiments, the RT domain initiates TPRT when there are less than 5 nt mismatched (e.g., less than 1, 2, 3, 4, or 5 nt mismatched) between the template RNA homology and the target DNA priming reverse transcription. In some embodiments, the RT domain is modified such that the stringency for mismatches in priming the TPRT reaction is increased, e.g., wherein the RT domain does not tolerate any mismatches or tolerates fewer mismatches in the priming region relative to a wild-type (e.g., unmodified) RT domain. In some embodiments, the RT domain comprises a HIV-1 RT domain. In embodiments, the HIV-1 RT domain initiates lower levels of synthesis even with three nucleotide mismatches relative to an alternative RT domain (e.g., as described by Jamburuthugoda and Eickbush J Mol Biol 407(5):661-672 (2011); incorporated herein by reference in its entirety). In some embodiments, the RT domain forms a dimer (e.g., a heterodimer or homodimer). In some embodiments, the RT domain is monomeric. In some embodiments, an RT domain, naturally functions as a monomer or as a dimer (e.g., heterodimer or homodimer). In some embodiments, an RT domain naturally functions as a monomer, e.g., is derived from a virus wherein it functions as a monomer. In embodiments, the RT domain is selected from an RT domain from murine leukemia virus (MLV; sometimes referred to as MoMLV) (e.g., P03355), porcine endogenous retrovirus (PERV) (e.g., UniProt Q4VFZ2), mouse mammary tumor virus (MMTV) (e.g., UniProt P03365), Mason-Pfizer monkey virus (MPMV) (e.g., UniProt P07572), bovine leukemia virus (BLV) (e.g., UniProt P03361), human T-cell leukemia virus-1 (HTLV-1) (e.g., UniProt P03362), human foamy virus (HFV) (e.g., UniProt P14350), simian foamy virus (SFV) (e.g., UniProt P23074), or bovine foamy/syncytial virus (BFV/BSV) (e.g., UniProt 041894), or a functional fragment or variant thereof (e.g., an amino acid sequence having at least 70%, 80%, 90%, 95%, or 99% identity thereto). In some embodiments, an RT domain is dimeric in its natural functioning. In some embodiments, the RT domain is derived from a virus wherein it functions as a dimer. In embodiments, the RT domain is selected from an RT domain from avian sarcoma/leukemia virus (ASLV) (e.g., UniProt A0A142BKH1), Rous sarcoma virus (RSV) (e.g., UniProt P03354), avian myeloblastosis virus (AMV) (e.g., UniProt Q83133), human immunodeficiency virus type I (HIV-1) (e.g., UniProt P03369), human immunodeficiency virus type II (HIV-2) (e.g., UniProt P15833), simian immunodeficiency virus (SIV) (e.g., UniProt P05896), bovine immunodeficiency virus (BIV) (e.g., UniProt P19560), equine infectious anemia virus (EIAV) (e.g., UniProt P03371), or feline immunodeficiency virus (FIV) (e.g., UniProt P16088) (Herschhorn and Hizi Cell Mol Life Sci 67(16):2717-2747 (2010)), or a functional fragment or variant thereof (e.g., an amino acid sequence having at least 70%, 80%, 90%, 95%, or 99% identity thereto). Naturally heterodimeric RT domains may, in some embodiments, also be functional as homodimers. In some embodiments, dimeric RT domains are expressed as fusion proteins, e.g., as homodimeric fusion proteins or heterodimeric fusion proteins. In some embodiments, the RT function of the system is fulfilled by multiple RT domains (e.g., as described herein). In further embodiments, the multiple RT domains are fused or separate, e.g., may be on the same polypeptide or on different polypeptides.

[0280] In some embodiments, a gene modifying system described herein comprises an integrase domain, e.g., wherein the integrase domain may be part of the RT domain. In some embodiments, an RT domain (e.g., as described herein) comprises an integrase domain. In some embodiments, an RT domain (e.g., as described herein) lacks an integrase domain, or comprises an integrase domain that has been inactivated by mutation or deleted. In some embodiment, a gene modifying system described herein comprises an RNase H domain, e.g., wherein the RNase H domain may be part of the RT domain. In some embodiments, the RNase H domain is not part of the RT domain and is covalently linked via a flexible linker. In some embodiments, an RT domain (e.g., as described herein) comprises an RNase H domain, e.g., an endogenous RNAse H domain or a heterologous RNase H domain. In some embodiments, an RT domain (e.g., as described herein) lacks an RNase H domain. In some embodiments, an RT domain (e.g., as described herein) comprises an RNase H domain that has been added, deleted, mutated, or swapped for a heterologous RNase H domain. In some embodiments, the polypeptide comprises an inactivated endogenous RNase H domain. In some embodiments, an endogenous RNase H domain from one of the other domains of the polypeptide is genetically removed such that it is not included in the polypeptide, e.g., the endogenous RNase H domain is partially or completely truncated from the comprising domain. In some embodiments, mutation of an RNase H domain yields a polypeptide exhibiting lower RNase activity, e.g., as determined by the methods described in Kotewicz et al. Nucleic Acids Res 16(1):265-277 (1988) (incorporated herein by reference in its entirety), e.g., lower by at least 10%, 20%, 30%, 40%, 50%, 60%, 70%, 80%, or 90% compared to an otherwise similar domain without the mutation. In some embodiments, RNase H activity is abolished.

[0281] In some embodiments, an RT domain is mutated to increase fidelity compared to an otherwise similar domain without the mutation. For instance, in some embodiments, a YADD (SEQ ID NO: 21644) or YMDD motif (SEQ ID NO: 21645) in an RT domain (e.g., in a reverse transcriptase) is replaced with YVDD (SEQ ID NO: 21646). In embodiments, replacement of the YADD (SEQ ID NO: 21644) or YMDD (SEQ ID NO: 21645) or YVDD (SEQ ID NO: 21646) results in higher fidelity in retroviral reverse transcriptase activity (e.g., as described in Jamburuthugoda and Eickbush J Mol Biol 2011; incorporated herein by reference in its entirety).

[0282] In some embodiments, a gene modifying polypeptide described herein comprises an RT domain having an amino acid sequence according to Table 6, or a sequence having at least 70%, 80%, 85%, 90%, 95%, 97%, 98%, or 99% identity thereto. In some embodiments, a nucleic acid described herein encodes an RT domain having an amino acid sequence according to Table 6, or a sequence having at least 70%, 80%, 85%, 90%, 95%, 97%, 98%, or 99% identity thereto.

TABLE 6
Exemplary reverse transcriptase domains from retroviruses

| RT | |
|---|---|
| Name | RT amino acid sequence |
| AVIRE_ | TAPLEEEYRLFLEAPIQNVTLLEQWKREIPKVWAEINPPGLASTQAPIHVQLLSTALPVRVRQY |
| P03360 | PITLEAKRSLRETIRKFRAAGILRPVHSPWNTPLLPVRKSGTSEYRMVQDLREVNKRVETIHPT |
| | VPNPYTLLSLLPPDRIWYSVLDLKDAFFCIPLAPESQLIFAFEWADAEEGESGQLTWTRLPQGF |
| | KNSPTLFDEALNRDLQGFRLDHPSVSLLQYVDDLLIAADTQAACLSATRDLLMTLAELGYRV |
| | SGKKAQLCQEEVTYLGFKIHKGSRSLSNSRTQAILQIPVPKTKRQVREFLGTIGYCRLWIPGFA |
| | ELAQPLYAATRGGNDPLVWGEKEEEAFQSLKLALTQPPALALPSLDKPFQLFVEETSGAAKG |
| | VLTQALGPWKRPVAYLSKRLDPVAAGWPRCLRAIAAAALLTREASKLTFGQDIEITSSHNLES |
| | LLRSPPDKWLTNARITQYQVLLLDPPRVRFKQTAALNPATLLPETDDTLPIHHCLDTLDSLTST |
| | RPDLTDQPLAQAEATLFTDGSSYIRDGKRYAGAAVVTLDSVIWAEPLPIGTSAQKAELIALTK |
| | ALEWSKDKSVNIYTDSRYAFATLHVHGMIYRERGLLTAGGKAIKNAPEILALLTAVWLPKRV |
| | AVMHCKGHQKDDAPTSTGNRRADEVAREVAIRPLSTQATIS (SEQ ID NO: 20195) |
| AVIRE_ | TAPLEEEYRLFLEAPIQNVTLLEQWKREIPKVWAEINPPGLASTQAPIHVQLLSTALPVRVRQY |
| P03360_ | PITLEAKRSLRETIRKFRAAGILRPVHSPWNTPLLPVRKSGTSEYRMVQDLREVNKRVETIHPT |
| 3mut | VPNPYTLLSLLPPDRIWYSVLDLKDAFFCIPLAPESQLIFAFEWADAEEGESGQLTWTRLPQGF |
| | KNSPTLFNEALNRDLQGFRLDHPSVSLLQYVDDLLIAADTQAACLSATRDLLMTLAELGYRV |
| | SGKKAQLCQEEVTYLGFKIHKGSRSLSNSRTQAILQIPVPKTKRQVREFLGTIGYCRLWIPGFA |
| | ELAQPLYAATRPGNDPLVWGEKEEEAFQSLKLALTQPPALALPSLDKPFQLFVEETSGAAKG |
| | VLTQALGPWKRPVAYLSKRLDPVAAGWPRCLRAIAAAALLTREASKLTFGQDIEITSSHNLES |
| | LLRSPPDKWLTNARITQYQVLLLDPPRVRFKQTAALNPATLLPETDDTLPIHHCLDTLDSLTST |
| | RPDLTDQPLAQAEATLFTDGSSYIRDGKRYAGAAVVTLDSVIWAEPLPIGTSAQKAELIALTK |
| | ALEWSKDKSVNIYTDSRYAFATLHVHGMIYRERGWLTAGGKAIKNAPEILALLTAVWLPKR |
| | VAVMHCKGHQKDDAPTSTGNRRADEVAREVAIRPLSTQATIS (SEQ ID NO: 20196) |
| AVIRE_ | TAPLEEEYRLFLEAPIQNVTLLEQWKREIPKVWAEINPPGLASTQAPIHVQLLSTALPVRVRQY |
| P03360_ | PITLEAKRSLRETIRKFRAAGILRPVHSPWNTPLLPVRKSGTSEYRMVQDLREVNKRVETIHPT |
| 3mutA | VPNPYTLLSLLPPDRIWYSVLDLKDAFFCIPLAPESQLIFAFEWADAEEGESGQLTWTRLPQGF |
| | KNSPTLFNEALNRDLQGFRLDHPSVSLLQYVDDLLIAADTQAACLSATRDLLMTLAELGYRV |
| | SGKKAQLCQEEVTYLGFKIHKGSRSLSNSRTQAILQIPVPKTKRQVREFLGKIGYCRLFIPGFA |
| | ELAQPLYAATRPGNDPLVWGEKEEEAFQSLKLALTQPPALALPSLDKPFQLFVEETSGAAKG |
| | VLTQALGPWKRPVAYLSKRLDPVAAGWPRCLRAIAAAALLTREASKLTFGQDIEITSSHNLES |
| | LLRSPPDKWLTNARITQYQVLLLDPPRVRFKQTAALNPATLLPETDDTLPIHHCLDTLDSLTST |
| | RPDLTDQPLAQAEATLFTDGSSYIRDGKRYAGAAVVTLDSVIWAEPLPIGTSAQKAELIALTK |
| | ALEWSKDKSVNIYTDSRYAFATLHVHGMIYRERGWLTAGGKAIKNAPEILALLTAVWLPKR |
| | VAVMHCKGHQKDDAPTSTGNRRADEVAREVAIRPLSTQATIS (SEQ ID NO: 16706) |
| BAEVM_ | TVSLQDEHRLFDIPVTTSLPDVWLQDFPQAWAETGGLGRAKCQAPIIIDLKPTAVPVSIKQYP |
| P10272 | MSLEAHMGIRQHIIKFLELGVLRPCRSPWNTPLLPVKKPGTQDYRPVQDLREINKRTVDIHPT |
| | VPNPYNLLSTLKPDYSWYTVLDLKDAFFCLPLAPQSQELFAFEWKDPERGISGQLTWTRLPQ |
| | GFKNSPTLFDEALHRDLTDFRTQHPEVTLLQYVDDLLLAAPTKKACTQGTRHLLQELGEKGY |
| | RASAKKAQICQTKVTYLGYILSEGKRWLTPGRIETVARIPPPRNPREVREFLGTAGFCRLWIPG |
| | FAELAAPLYALTKESTPFTWQTEHQLAFEALKKALLSAPALGLPDTSKPFTLFLDERQGIAKG |
| | VLTQKLGPWKRPVAYLSKKLDPVAAGWPPCLRIMAATAMLVKDSAKLTLGQPLTVITPHTL |
| | EAIVRQPPDRWITNARLTHYQALLLDTDRVQFGPPVTLNPATLLPVPENQPSPHDCRQVLAET |
| | HGTREDLKDQELPDADHTWYTDGSSYLDSGTRRAGAAVVDGHNTIWAQSLPPGTSAQKAEL |
| | IALTKALELSKGKKANIYTDSRYAFATAHTHGSIYERRGLLTSEGKEIKNKAEIIALLKALFLP |
| | QEVAIIHCPGHQKGQDPVAVGNRQADRVARQAAMAEVLTLATEPDNTSHIT (SEQ ID NO: |
| | 20197) |
| BAEVM_ | TVSLQDEHRLFDIPVTTSLPDVWLQDFPQAWAETGGLGRAKCQAPIIIDLKPTAVPVSIKQYP |
| P10272_ | MSLEAHMGIRQHIIKFLELGVLRPCRSPWNTPLLPVKKPGTQDYRPVQDLREINKRTVDIHPT |
| 3mut | VPNPYNLLSTLKPDYSWYTVLDLKDAFFCLPLAPQSQELFAFEWKDPERGISGQLTWTRLPQ |
| | GFKNSPTLFNEALHRDLTDFRTQHPEVTLLQYVDDLLLAAPTKKACTQGTRHLLQELGEKGY |
| | RASAKKAQICQTKVTYLGYILSEGKRWLTPGRIETVARIPPPRNPREVREFLGTAGFCRLWIPG |
| | FAELAAPLYALTKPSTPFTWQTEHQLAFEALKKALLSAPALGLPDTSKPFTLFLDERQGIAKG |
| | VLTQKLGPWKRPVAYLSKKLDPVAAGWPPCLRIMAATAMLVKDSAKLTLGQPLTVITPHTL |
| | EAIVRQPPDRWITNARLTHYQALLLDTDRVQFGPPVTLNPATLLPVPENQPSPHDCRQVLAET |
| | HGTREDLKDQELPDADHTWYTDGSSYLDSGTRRAGAAVVDGHNTIWAQSLPPGTSAQKAEL |
| | IALTKALELSKGKKANIYTDSRYAFATAHTHGSIYERRGWLTSEGKEIKNKAEIIALLKALFLP |
| | QEVAIIHCPGHQKGQDPVAVGNRQADRVARQAAMAEVLTLATEPDNTSHIT (SEQ ID NO: |
| | 20198) |
| BAEVM_ | TVSLQDEHRLFDIPVTTSLPDVWLQDFPQAWAETGGLGRAKCQAPIIIDLKPTAVPVSIKQYP |
| P10272_ | MSLEAHMGIRQHIIKFLELGVLRPCRSPWNTPLLPVKKPGTQDYRPVQDLREINKRTVDIHPT |
| 3mutA | VPNPYNLLSTLKPDYSWYTVLDLKDAFFCLPLAPQSQELFAFEWKDPERGISGQLTWTRLPQ |
| | GFKNSPTLFNEALHRDLTDFRTQHPEVTLLQYVDDLLLAAPTKKACTQGTRHLLQELGEKGY |
| | RASAKKAQICQTKVTYLGYILSEGKRWLTPGRIETVARIPPPRNPREVREFLGKAGFCRLFIPG |
| | FAELAAPLYALTKPSTPFTWQTEHQLAFEALKKALLSAPALGLPDTSKPFTLFLDERQGIAKG |
| | VLTQKLGPWKRPVAYLSKKLDPVAAGWPPCLRIMAATAMLVKDSAKLTLGQPLTVITPHTL |
| | EAIVRQPPDRWITNARLTHYQALLLDTDRVQFGPPVTLNPATLLPVPENQPSPHDCRQVLAET |
| | HGTREDLKDQELPDADHTWYTDGSSYLDSGTRRAGAAVVDGHNTIWAQSLPPGTSAQKAEL |
| | IALTKALELSKGKKANIYTDSRYAFATAHTHGSIYERRGWLTSEGKEIKNKAEIIALLKALFLP |
| | QEVAIIHCPGHQKGQDPVAVGNRQADRVARQAAMAEVLTLATEPDNTSHIT (SEQ ID NO: |
| | 20199) |
| BLVAU_ | GVLDAPPSHIGLEHLPPPPEVPQFPLNLERLQALQDLVHRSLEAGYISPWDGPGNNPVFPVRKP |
| P25059 | NGAWRFVHDLRVTNALTKPIPALSPGPPDLTAIPTHLPHIICLDLKDAFFQIPVEDRFRSYFAFT |
| | LPTPGGLQPHRRFAWRVLPQGFINSPALFERALQEPLRQVSAAFSQSLLVSYMDDILYVSPTEE |
| | QRLQCYQTMAAHLRDLGFQVASEKTRQTPSPVPFLGQMVHERMVTYQSLPTLQISSPISLHQL |
| | QTVLGDLQWVSRGTPTTRRPLQLLYSSLKGIDDPRAIIHLSPEQQQGIAELRQALSHNARSRY |
| | NEQEPLLAYVHLTRAGSTLVLFQKGAQFPLAYFQTPLTDNQASPWGLLLLLGCQYLQAQALS |
| | SYAKTILKYYHNLPKTSLDNWIQSSEDPRVQELLQLWPQISSQGIQPPGPWKTLVTRAEVFLTP |
| | QFSPEPIPAALCLFSDGAARRGAYCLWKDHLLDFQAVPAPESAQKGELAGLLAGLAAAPPEP |
| | LNIWVDSKYLYSLLRTLVLGAWLQPDPVPSYALLYKSLLRHPAIFVGHVRSHSSASHPIASLN |
| | NYVDQL (SEQ ID NO: 20200) |
| BLVAU_ | GVLDAPPSHIGLEHLPPPPEVPQFPLNLERLQALQDLVHRSLEAGYISPWDGPGNNPVFPVRKP |
| P25059_ | NGAWRFVHDLRVTNALTKPIPALSPGPPDLTAIPTHLPHIICLDLKDAFFQIPVEDRFRSYFAFT |
| 2mut | LPTPGGLQPHRRFAWRVLPQGFINSPALFQRALQEPLRQVSAAFSQSLLVSYMDDILYVSPTE |
| | EQRLQCYQTMAAHLRDLGFQVASEKTRQTPSPVPFLGQMVHERMVTYQSLPTLQISSPISLHQ |
| | LQTVLGDLQWVSRGTPTTRRPLQLLYSSLKPIDDPRAIIHLSPEQQQGIAELRQALSHNARSRY |
| | NEQEPLLAYVHLTRAGSTLVLFQKGAQFPLAYFQTPLTDNQASPWGLLLLLGCQYLQAQALS |
| | SYAKTILKYYHNLPKTSLDNWIQSSEDPRVQELLQLWPQISSQGIQPPGPWKTLVTRAEVFLTP |
| | QFSPEPIPAALCLFSDGAARRGAYCLWKDHLLDFQAVPAPESAQKGELAGLLAGLAAAPPEP |
| | LNIWVDSKYLYSLLRTLVLGAWLQPDPVPSYALLYKSLLRHPAIFVGHVRSHSSASHPIASLN |
| | NYVDQL (SEQ ID NO: 20201) |
| BLVJ_ | GVLDTPPSHIGLEHLPPPPEVPQFPLNLERLQALQDLVHRSLEAGYISPWDGPGNNPVFPVRKP |
| P03361 | NGAWRFVHDLRATNALTKPIPALSPGPPDLTAIPTHPPHIICLDLKDAFFQIPVEDRFRFYLSFT |
| | LPSPGGLQPHRRFAWRVLPQGFINSPALFERALQEPLRQVSAAFSQSLLVSYMDDILYASPTEE |
| | QRSQCYQALAARLRDLGFQVASEKTSQTPSPVPFLGQMVHEQIVTYQSLPTLQISSPISLHQLQ |
| | AVLGDLQWVSRGTPTTRRPLQLLYSSLKRHHDPRAIIQLSPEQLQGIAELRQALSHNARSRYN |
| | EQEPLLAYVHLTRAGSTLVLFQKGAQFPLAYFQTPLTDNQASPWGLLLLLGCQYLQTQALSS |
| | YAKPILKYYHNLPKTSLDNWIQSSEDPRVQELLQLWPQISSQGIQPPGPWKTLITRAEVFLTPQ |
| | FSPDPIPAALCLFSDGATGRGAYCLWKDHLLDFQAVPAPESAQKGELAGLLAGLAAAPPEPV |
| | NIWVDSKYLYSLLRTLVLGAWLQPDPVPSYALLYKSLLRHPAIVVGHVRSHSSASHPIASLNN |
| | YVDQL (SEQ ID NO: 20202) |
| BLVJ_ | GVLDTPPSHIGLEHLPPPPEVPQFPLNLERLQALQDLVHRSLEAGYISPWDGPGNNPVFPVRKP |
| P03361_ | NGAWRFVHDLRATNALTKPIPALSPGPPDLTAIPTHPPHIICLDLKDAFFQIPVEDRFRFYLSFT |
| 2mut | LPSPGGLQPHRRFAWRVLPQGFINSPALFNRALQEPLRQVSAAFSQSLLVSYMDDILYASPTEE |
| | QRSQCYQALAARLRDLGFQVASEKTSQTPSPVPFLGQMVHEQIVTYQSLPTLQISSPISLHQLQ |
| | AVLGDLQWVSRGTPTTRRPLQLLYSSLKRHHDPRAIIQLSPEQLQGIAELRQALSHNARSRYN |
| | EQEPLLAYVHLTRAGSTLVLFQKGAQFPLAYFQTPLTDNQASPWGLLLLLGCQYLQTQALSS |
| | YAKPILKYYHNLPKTSLDNWIQSSEDPRVQELLQLWPQISSQGIQPPGPWKTLITRAEVFLTPQ |
| | FSPDPIPAALCLFSDGATGRGAYCLWKDHLLDFQAVPAPESAQKGELAGLLAGLAAAPPEPV |
| | NIWVDSKYLYSLLRTWVLGAWLQPDPVPSYALLYKSLLRHPAIVVGHVRSHSSASHPIASLN |
| | NYVDQL (SEQ ID NO: 20203) |
| BLVJ_ | GVLDTPPSHIGLEHLPPPPEVPQFPLNLERLQALQDLVHRSLEAGYISPWDGPGNNPVFPVRKP |
| P03361_ | NGAWRFVHDLRATNALTKPIPALSPGPPDLTAPPTHPPHIICLDLKDAFFQIPVEDRFRFYLSFT |
| 2mutB | LPSPGGLQPHRRFAWRVLPQGFINSPALFQRALQEPLRQVSAAFSQSLLVSYMDDILYASPTEE |
| | QRSQCYQALAARLRDLGFQVASEKTSQTPSPVPFLGQMVHEQIVTYQSLPTLQISSPISLHQLQ |
| | AVLGDLQWVSRGTPTTRRPLQLLYSSLKRHHDPRAIIQLSPEQLQGIAELRQALSHNARSRYN |
| | EQEPLLAYVHLTRAGSTLVLFQKGAQFPLAYFQTPLTDNQASPWGLLLLLGCQYLQTQALSS |
| | YAKPILKYYHNLPKTSLDNWIQSSEDPRVQELLQLWPQISSQGIQPPGPWKTLITRAEVFLTPQ |
| | FSPDPIPAALCLFSDGATGRGAYCLWKDHLLDFQAVPAPESAQKGELAGLLAGLAAAPPEPV |
| | NIWVDSKYLYSLLRTWVLGAWLQPDPVPSYALLYKSLLRHPAIVVGHVRSHSSASHPIASLN |
| | NYVDQL (SEQ ID NO: 20204) |
| FFV_ | MDLLKPLTVERKGVKIKGYWNSQADITCVPKDLLQGEEPVRQQNVTTIHGTQEGDVYYVNL |
| O93209 | KIDGRRINTEVIGTTLDYAIITPGDVPWILKKPLELTIKLDLEEQQGTLLNNSILSKKGKEELKQ |
| | LFEKYSALWQSWENQVGHRRIRPHKIATGTVKPTPQKQYHINPKAKPDIQIVINDLLKQGVLI |
| | QKESTMNTPVYPVPKPNGRWRMVLDYRAVNKVTPLIAVQNQHSYGILGSLFKGRYKTTIDLS |
| | NGFWAHPIVPEDYWITAFTWQGKQYCWTVLPQGFLNSPGLFTGDVVDLLQGIPNVEVYVDD |
| | VYISHDSEKEHLEYLDILFNRLKEAGYIISLKKSNIANSIVDFLGFQITNEGRGLTDTFKEKLENI |
| | TAPTTLKQLQSILGLLNFARNFIPDFTELIAPLYALIPKSTKNYVPWQIEHSTTLETLITKLNGAE |
| | YLQGRKGDKTLIMKVNASYTTGYIRYYNEGEKKPISYVSIVFSKTELKFTELEKLLTTVHKGL |
| | LKALDLSMGQNIHVYSPIVSMQNIQKTPQTAKKALASRWLSWLSYLEDPRIRFFYDPQMPAL |
| | KDLPAVDTGKDNKKHPSNFQHIFYTDGSAITSPTKEGHLNAGMGIVYFINKDGNLQKQQEWS |
| | ISLGNHTAQFAEIAAFEFALKKCLPLGGNILVVTDSNYVAKAYNEELDVWASNGFVNNRKKP |
| | LKHISKWKSVADLKRLRPDVVVTHEPGHQKLDSSPHAYGNNLADQLATQASFKVH (SEQ ID |
| | NO: 20205) |
| FFV_ | MDLLKPLTVERKGVKIKGYWNSQADITCVPKDLLQGEEPVRQQNVTTIHGTQEGDVYYVNL |
| O93209 | KIDGRRINTEVIGTTLDYAIITPGDVPWILKKPLELTIKLDLEEQQGTLLNNSILSKKGKEELKQ |
| 2mut | LFEKYSALWQSWENQVGHRRIRPHKIATGTVKPTPQKQYHINPKAKPDIQIVINDLLKQGVLI |
| | QKESTMNTPVYPVPKPNGRWRMVLDYRAVNKVTPLIAVQNQHSYGILGSLFKGRYKTTIDLS |
| | NGFWAHPIVPEDYWITAFTWQGKQYCWTVLPQGFLNSPGLFNGDVVDLLQGIPNVEVYVDD |
| | VYISHDSEKEHLEYLDILFNRLKEAGYIISLKKSNIANSIVDFLGFQITNEGRGLTDTFKEKLENI |
| | TAPTTLKQLQSILGLLNFARNFIPDFTELIAPLYALIPKSPKNYVPWQIEHSTTLETLITKLNGAE |
| | YLQGRKGDKTLIMKVNASYTTGYIRYYNEGEKKPISYVSIVFSKTELKFTELEKLLTTVHKGL |
| | LKALDLSMGQNIHVYSPIVSMQNIQKTPQTAKKALASRWLSWLSYLEDPRIRFFYDPQMPAL |
| | KDLPAVDTGKDNKKHPSNFQHIFYTDGSAITSPTKEGHLNAGMGIVYFINKDGNLQKQQEWS |
| | ISLGNHTAQFAEIAAFEFALKKCLPLGGNILVVTDSNYVAKAYNEELDVWASNGFVNNRKKP |
| | LKHISKWKSVADLKRLRPDVVVTHEPGHQKLDSSPHAYGNNLADQLATQASFKVH (SEQ ID |
| | NO: 20206) |
| FFV_ | MDLLKPLTVERKGVKIKGYWNSQADITCVPKDLLQGEEPVRQQNVTTIHGTQEGDVYYVNL |
| O93209_ | KIDGRRINTEVIGTTLDYAIITPGDVPWILKKPLELTIKLDLEEQQGTLLNNSILSKKGKEELKQ |
| 2mutA | LFEKYSALWQSWENQVGHRRIRPHKIATGTVKPTPQKQYHINPKAKPDIQIVINDLLKQGVLI |
| | QKESTMNTPVYPVPKPNGRWRMVLDYRAVNKVTPLIAVQNQHSYGILGSLFKGRYKTTIDLS |
| | NGFWAHPIVPEDYWITAFTWQGKQYCWTVLPQGFLNSPGLFNGDVVDLLQGIPNVEVYVDD |
| | VYISHDSEKEHLEYLDILFNRLKEAGYIISLKKSNIANSIVDFLGFQITNEGRGLTDTFKEKLENI |
| | TAPTTLKQLQSILGKLNFARNFIPDFTELIAPLYALIPKSPKNYVPWQIEHSTTLETLITKLNGAE |
| | YLQGRKGDKTLIMKVNASYTTGYIRYYNEGEKKPISYVSIVFSKTELKFTELEKLLTTVHKGL |
| | LKALDLSMGQNIHVYSPIVSMQNIQKTPQTAKKALASRWLSWLSYLEDPRIRFFYDPQMPAL |
| | KDLPAVDTGKDNKKHPSNFQHIFYTDGSAITSPTKEGHLNAGMGIVYFINKDGNLQKQQEWS |
| | ISLGNHTAQFAEIAAFEFALKKCLPLGGNILVVTDSNYVAKAYNEELDVWASNGFVNNRKKP |
| | LKHISKWKSVADLKRLRPDVVVTHEPGHQKLDSSPHAYGNNLADQLATQASFKVH (SEQ ID |
| | NO: 20207) |
| FFV_ | VPWILKKPLELTIKLDLEEQQGTLLNNSILSKKGKEELKQLFEKYSALWQSWENQVGHRRIRP |
| O93209- | HKIATGTVKPTPQKQYHINPKAKPDIQIVINDLLKQGVLIQKESTMNTPVYPVPKPNGRWRMV |
| Pro | LDYRAVNKVTPLIAVQNQHSYGILGSLFKGRYKTTIDLSNGFWAHPIVPEDYWITAFTWQGK |
| | QYCWTVLPQGFLNSPGLFTGDVVDLLQGIPNVEVYVDDVYISHDSEKEHLEYLDILFNRLKE |
| | AGYIISLKKSNIANSIVDFLGFQITNEGRGLTDTFKEKLENITAPTTLKQLQSILGLLNFARNFIP |
| | DFTELIAPLYALIPKSTKNYVPWQIEHSTTLETLITKLNGAEYLQGRKGDKTLIMKVNASYTTG |
| | YIRYYNEGEKKPISYVSIVFSKTELKFTELEKLLTTVHKGLLKALDLSMGQNIHVYSPIVSMQN |
| | IQKTPQTAKKALASRWLSWLSYLEDPRIRFFYDPQMPALKDLPAVDTGKDNKKHPSNFQHIF |
| | YTDGSAITSPTKEGHLNAGMGIVYFINKDGNLQKQQEWSISLGNHTAQFAEIAAFEFALKKCL |
| | PLGGNILVVTDSNYVAKAYNEELDVWASNGFVNNRKKPLKHISKWKSVADLKRLRPDVVVT |
| | HEPGHQKLDSSPHAYGNNLADQLATQASFKVH (SEQ ID NO: 20208) |
| FFV_ | VPWILKKPLELTIKLDLEEQQGTLLNNSILSKKGKEELKQLFEKYSALWQSWENQVGHRRIRP |
| O93209- | HKIATGTVKPTPQKQYHINPKAKPDIQIVINDLLKQGVLIQKESTMNTPVYPVPKPNGRWRMV |
| Pro_2mut | LDYRAVNKVTPLIAVQNQHSYGILGSLFKGRYKTTIDLSNGFWAHPIVPEDYWITAFTWQGK |
| | QYCWTVLPQGFLNSPGLFNGDVVDLLQGIPNVEVYVDDVYISHDSEKEHLEYLDILFNRLKE |
| | AGYIISLKKSNIANSIVDFLGFQITNEGRGLTDTFKEKLENITAPTTLKQLQSILGLLNFARNFIP |
| | DFTELIAPLYALIPKSPKNYVPWQIEHSTTLETLITKLNGAEYLQGRKGDKTLIMKVNASYTTG |
| | YIRYYNEGEKKPISYVSIVFSKTELKFTELEKLLTTVHKGLLKALDLSMGQNIHVYSPIVSMQN |
| | IQKTPQTAKKALASRWLSWLSYLEDPRIRFFYDPQMPALKDLPAVDTGKDNKKHPSNFQHIF |
| | YTDGSAITSPTKEGHLNAGMGIVYFINKDGNLQKQQEWSISLGNHTAQFAEIAAFEFALKKCL |
| | PLGGNILVVTDSNYVAKAYNEELDVWASNGFVNNRKKPLKHISKWKSVADLKRLRPDVVVT |
| | HEPGHQKLDSSPHAYGNNLADQLATQASFKVH (SEQ ID NO: 20209) |
| FFV_ | VPWILKKPLELTIKLDLEEQQGTLLNNSILSKKGKEELKQLFEKYSALWQSWENQVGHRRIRP |
| O93209- | HKIATGTVKPTPQKQYHINPKAKPDIQIVINDLLKQGVLIQKESTMNTPVYPVPKPNGRWRMV |
| Pro_2mutA | LDYRAVNKVTPLIAVQNQHSYGILGSLFKGRYKTTIDLSNGFWAHPIVPEDYWITAFTWQGK |
| | QYCWTVLPQGFLNSPGLFNGDVVDLLQGIPNVEVYVDDVYISHDSEKEHLEYLDILFNRLKE |
| | AGYIISLKKSNIANSIVDFLGFQITNEGRGLTDTFKEKLENITAPTTLKQLQSILGKLNFARNFIP |
| | DFTELIAPLYALIPKSPKNYVPWQIEHSTTLETLITKLNGAEYLQGRKGDKTLIMKVNASYTTG |
| | YIRYYNEGEKKPISYVSIVFSKTELKFTELEKLLTTVHKGLLKALDLSMGQNIHVYSPIVSMQN |
| | IQKTPQTAKKALASRWLSWLSYLEDPRIRFFYDPQMPALKDLPAVDTGKDNKKHPSNFQHIF |
| | YTDGSAITSPTKEGHLNAGMGIVYFINKDGNLQKQQEWSISLGNHTAQFAEIAAFEFALKKCL |
| | PLGGNILVVTDSNYVAKAYNEELDVWASNGFVNNRKKPLKHISKWKSVADLKRLRPDVVVT |
| | HEPGHQKLDSSPHAYGNNLADQLATQASFKVH (SEQ ID NO: 20210) |
| FLV_ | TLQLEEEYRLFEPESTQKQEMDIWLKNFPQAWAETGGMGTAHCQAPVLIQLKATATPISIRQY |
| P10273 | PMPHEAYQGIKPHIRRMLDQGILKPCQSPWNTPLLPVKKPGTEDYRPVQDLREVNKRVEDIHP |
| | TVPNPYNLLSTLPPSHPWYTVLDLKDAFFCLRLHSESQLLFAFEWRDPEIGLSGQLTWTRLPQ |
| | GFKNSPTLFDEALHSDLADFRVRYPALVLLQYVDDLLLAAATRTECLEGTKALLETLGNKGY |
| | RASAKKAQICLQEVTYLGYSLKDGQRWLTKARKEAILSIPVPKNSRQVREFLGTAGYCRLWI |
| | PGFAELAAPLYPLTRPGTLFQWGTEQQLAFEDIKKALLSSPALGLPDITKPFELFIDENSGFAK |
| | GVLVQKLGPWKRPVAYLSKKLDTVASGWPPCLRMVAAIAILVKDAGKLTLGQPLTILTSHPV |
| | EALVRQPPNKWLSNARMTHYQAMLLDAERVHFGPTVSLNPATLLPLPSGGNHHDCLQILAE |
| | THGTRPDLTDQPLPDADLTWYTDGSSFIRNGEREAGAAVTTESEVIWAAPLPPGTSAQRAELI |
| | ALTQALKMAEGKKLTVYTDSRYAFATTHVHGEIYRRRGLLTSEGKEIKNKNEILALLEALFLP |
| | KRLSIIHCPGHQKGDSPQAKGNRLADDTAKKAATETHSSLTVLP (SEQ ID NO: 20211) |
| FLV_ | TLQLEEEYRLFEPESTQKQEMDIWLKNFPQAWAETGGMGTAHCQAPVLIQLKATATPISIRQY |
| P10273_ | PMPHEAYQGIKPHIRRMLDQGILKPCQSPWNTPLLPVKKPGTEDYRPVQDLREVNKRVEDIHP |
| 3mut | TVPNPYNLLSTLPPSHPWYTVLDLKDAFFCLRLHSESQLLFAFEWRDPEIGLSGQLTWTRLPQ |
| | GFKNSPTLFNEALHSDLADFRVRYPALVLLQYVDDLLLAAATRTECLEGTKALLETLGNKGY |
| | RASAKKAQICLQEVTYLGYSLKDGQRWLTKARKEAILSIPVPKNSRQVREFLGTAGYCRLWI |
| | PGFAELAAPLYPLTRPGTLFQWGTEQQLAFEDIKKALLSSPALGLPDITKPFELFIDENSGFAK |
| | GVLVQKLGPWKRPVAYLSKKLDTVASGWPPCLRMVAAIAILVKDAGKLTLGQPLTILTSHPV |
| | EALVRQPPNKWLSNARMTHYQAMLLDAERVHFGPTVSLNPATLLPLPSGGNHHDCLQILAE |
| | THGTRPDLTDQPLPDADLTWYTDGSSFIRNGEREAGAAVTTESEVIWAAPLPPGTSAQRAELI |
| | ALTQALKMAEGKKLTVYTDSRYAFATTHVHGEIYRRRGWLTSEGKEIKNKNEILALLEALFL |
| | PKRLSIIHCPGHQKGDSPQAKGNRLADDTAKKAATETHSSLTVLP (SEQ ID NO: 20212) |
| FLV_ | TLQLEEEYRLFEPESTQKQEMDIWLKNFPQAWAETGGMGTAHCQAPVLIQLKATATPISIRQY |
| P10273_ | PMPHEAYQGIKPHIRRMLDQGILKPCQSPWNTPLLPVKKPGTEDYRPVQDLREVNKRVEDIHP |
| 3mutA | TVPNPYNLLSTLPPSHPWYTVLDLKDAFFCLRLHSESQLLFAFEWRDPEIGLSGQLTWTRLPQ |
| | GFKNSPTLFNEALHSDLADFRVRYPALVLLQYVDDLLLAAATRTECLEGTKALLETLGNKGY |
| | RASAKKAQICLQEVTYLGYSLKDGQRWLTKARKEAILSIPVPKNSRQVREFLGKAGYCRLFIP |
| | GFAELAAPLYPLTRPGTLFQWGTEQQLAFEDIKKALLSSPALGLPDITKPFELFIDENSGFAKG |
| | VLVQKLGPWKRPVAYLSKKLDTVASGWPPCLRMVAAIAILVKDAGKLTLGQPLTILTSHPVE |
| | ALVRQPPNKWLSNARMTHYQAMLLDAERVHFGPTVSLNPATLLPLPSGGNHHDCLQILAET |
| | HGTRPDLTDQPLPDADLTWYTDGSSFIRNGEREAGAAVTTESEVIWAAPLPPGTSAQRAELIA |
| | LTQALKMAEGKKLTVYTDSRYAFATTHVHGEIYRRRGWLTSEGKEIKNKNEILALLEALFLP |
| | KRLSIIHCPGHQKGDSPQAKGNRLADDTAKKAATETHSSLTVLP (SEQ ID NO: 20213) |
| FOAMV_ | MNPLQLLQPLPAEIKGTKLLAHWNSGATITCIPESFLEDEQPIKKTLIKTIHGEKQQNVYYVTF |
| P14350 | KVKGRKVEAEVIASPYEYILLSPTDVPWLTQQPLQLTILVPLQEYQEKILSKTALPEDQKQQLK |
| | TLFVKYDNLWQHWENQVGHRKIRPHNIATGDYPPRPQKQYPINPKAKPSIQIVIDDLLKQGVL |
| | TPQNSTMNTPVYPVPKPDGRWRMVLDYREVNKTIPLTAAQNQHSAGILATIVRQKYKTTLDL |
| | ANGFWAHPITPESYWLTAFTWQGKQYCWTRLPQGFLNSPALFTADVVDLLKEIPNVQVYVD |
| | DIYLSHDDPKEHVQQLEKVFQILLQAGYVVSLKKSEIGQKTVEFLGFNITKEGRGLTDTFKTK |
| | LLNITPPKDLKQLQSILGLLNFARNFIPNFAELVQPLYNLIASAKGKYIEWSEENTKQLNMVIE |
| | ALNTASNLEERLPEQRLVIKVNTSPSAGYVRYYNETGKKPIMYLNYVFSKAELKFSMLEKLLT |
| | TMHKALIKAMDLAMGQEILVYSPIVSMTKIQKTPLPERKALPIRWITWMTYLEDPRIQFHYDK |
| | TLPELKHIPDVYTSSQSPVKHPSQYEGVFYTDGSAIKSPDPTKSNNAGMGIVHATYKPEYQVL |
| | NQWSIPLGNHTAQMAEIAAVEFACKKALKIPGPVLVITDSFYVAESANKELPYWKSNGFVNN |
| | KKKPLKHISKWKSIAECLSMKPDITIQHEKGISLQIPVFILKGNALADKLATQGSYVVN (SEQ |
| | ID NO: 20214) |
| FOAMV_ | MNPLQLLQPLPAEIKGTKLLAHWNSGATITCIPESFLEDEQPIKKTLIKTIHGEKQQNVYYVTF |
| P14350_ | KVKGRKVEAEVIASPYEYILLSPTDVPWLTQQPLQLTILVPLQEYQEKILSKTALPEDQKQQLK |
| 2mut | TLFVKYDNLWQHWENQVGHRKIRPHNIATGDYPPRPQKQYPINPKAKPSIQIVIDDLLKQGVL |
| | TPQNSTMNTPVYPVPKPDGRWRMVLDYREVNKTIPLTAAQNQHSAGILATIVRQKYKTTLDL |
| | ANGFWAHPITPESYWLTAFTWQGKQYCWTRLPQGFLNSPALFNADVVDLLKEIPNVQVYVD |
| | DIYLSHDDPKEHVQQLEKVFQILLQAGYVVSLKKSEIGQKTVEFLGFNITKEGRGLTDTFKTK |
| | LLNITPPKDLKQLQSILGLLNFARNFIPNFAELVQPLYNLIAPAKGKYIEWSEENTKQLNMVIE |
| | ALNTASNLEERLPEQRLVIKVNTSPSAGYVRYYNETGKKPIMYLNYVFSKAELKFSMLEKLLT |
| | TMHKALIKAMDLAMGQEILVYSPIVSMTKIQKTPLPERKALPIRWITWMTYLEDPRIQFHYDK |
| | TLPELKHIPDVYTSSQSPVKHPSQYEGVFYTDGSAIKSPDPTKSNNAGMGIVHATYKPEYQVL |
| | NQWSIPLGNHTAQMAEIAAVEFACKKALKIPGPVLVITDSFYVAESANKELPYWKSNGFVNN |
| | KKKPLKHISKWKSIAECLSMKPDITIQHEKGISLQIPVFILKGNALADKLATQGSYVVN (SEQ |
| | ID NO: 20215) |
| FOAMV_ | MNPLQLLQPLPAEIKGTKLLAHWNSGATITCIPESFLEDEQPIKKTLIKTIHGEKQQNVYYVTF |
| P14350_ | KVKGRKVEAEVIASPYEYILLSPTDVPWLTQQPLQLTILVPLQEYQEKILSKTALPEDQKQQLK |
| 2mutA | TLFVKYDNLWQHWENQVGHRKIRPHNIATGDYPPRPQKQYPINPKAKPSIQIVIDDLLKQGVL |
| | TPQNSTMNTPVYPVPKPDGRWRMVLDYREVNKTIPLTAAQNQHSAGILATIVRQKYKTTLDL |
| | ANGFWAHPITPESYWLTAFTWQGKQYCWTRLPQGFLNSPALFNADVVDLLKEIPNVQVYVD |
| | DIYLSHDDPKEHVQQLEKVFQILLQAGYVVSLKKSEIGQKTVEFLGFNITKEGRGLTDTFKTK |
| | LLNITPPKDLKQLQSILGKLNFARNFIPNFAELVQPLYNLIAPAKGKYIEWSEENTKQLNMVIE |
| | ALNTASNLEERLPEQRLVIKVNTSPSAGYVRYYNETGKKPIMYLNYVFSKAELKFSMLEKLLT |
| | TMHKALIKAMDLAMGQEILVYSPIVSMTKIQKTPLPERKALPIRWITWMTYLEDPRIQFHYDK |
| | TLPELKHIPDVYTSSQSPVKHPSQYEGVFYTDGSAIKSPDPTKSNNAGMGIVHATYKPEYQVL |
| | NQWSIPLGNHTAQMAEIAAVEFACKKALKIPGPVLVITDSFYVAESANKELPYWKSNGFVNN |
| | KKKPLKHISKWKSIAECLSMKPDITIQHEKGISLQIPVFILKGNALADKLATQGSYVVN (SEQ |
| | ID NO: 20216) |
| FOAMV_ | VPWLTQQPLQLTILVPLQEYQEKILSKTALPEDQKQQLKTLFVKYDNLWQHWENQVGHRKI |
| P14350- | RPHNIATGDYPPRPQKQYPINPKAKPSIQIVIDDLLKQGVLTPQNSTMNTPVYPVPKPDGRWR |
| Pro | MVLDYREVNKTIPLTAAQNQHSAGILATIVRQKYKTTLDLANGFWAHPITPESYWLTAFTWQ |
| | GKQYCWTRLPQGFLNSPALFTADVVDLLKEIPNVQVYVDDIYLSHDDPKEHVQQLEKVFQIL |
| | LQAGYVVSLKKSEIGQKTVEFLGFNITKEGRGLTDTFKTKLLNITPPKDLKQLQSILGLLNFAR |
| | NFIPNFAELVQPLYNLIASAKGKYIEWSEENTKQLNMVIEALNTASNLEERLPEQRLVIKVNTS |
| | PSAGYVRYYNETGKKPIMYLNYVFSKAELKFSMLEKLLTTMHKALIKAMDLAMGQEILVYS |
| | PIVSMTKIQKTPLPERKALPIRWITWMTYLEDPRIQFHYDKTLPELKHIPDVYTSSQSPVKHPS |
| | QYEGVFYTDGSAIKSPDPTKSNNAGMGIVHATYKPEYQVLNQWSIPLGNHTAQMAEIAAVEF |
| | ACKKALKIPGPVLVITDSFYVAESANKELPYWKSNGFVNNKKKPLKHISKWKSIAECLSMKP |
| | DITIQHEKGISLQIPVFILKGNALADKLATQGSYVVN (SEQ ID NO: 20217) |
| FOAMV_ | VPWLTQQPLQLTILVPLQEYQEKILSKTALPEDQKQQLKTLFVKYDNLWQHWENQVGHRKI |
| P14350- | RPHNIATGDYPPRPQKQYPINPKAKPSIQIVIDDLLKQGVLTPQNSTMNTPVYPVPKPDGRWR |
| Pro_2mut | MVLDYREVNKTIPLTAAQNQHSAGILATIVRQKYKTTLDLANGFWAHPITPESYWLTAFTWQ |
| | GKQYCWTRLPQGFLNSPALFNADVVDLLKEIPNVQVYVDDIYLSHDDPKEHVQQLEKVFQIL |
| | LQAGYVVSLKKSEIGQKTVEFLGFNITKEGRGLTDTFKTKLLNITPPKDLKQLQSILGLLNFAR |
| | NFIPNFAELVQPLYNLIAPAKGKYIEWSEENTKQLNMVIEALNTASNLEERLPEQRLVIKVNTS |
| | PSAGYVRYYNETGKKPIMYLNYVFSKAELKFSMLEKLLTTMHKALIKAMDLAMGQEILVYS |
| | PIVSMTKIQKTPLPERKALPIRWITWMTYLEDPRIQFHYDKTLPELKHIPDVYTSSQSPVKHPS |
| | QYEGVFYTDGSAIKSPDPTKSNNAGMGIVHATYKPEYQVLNQWSIPLGNHTAQMAEIAAVEF |
| | ACKKALKIPGPVLVITDSFYVAESANKELPYWKSNGFVNNKKKPLKHISKWKSIAECLSMKP |
| | DITIQHEKGISLQIPVFILKGNALADKLATQGSYVVN (SEQ ID NO: 20218) |
| FOAMV_ | VPWLTQQPLQLTILVPLQEYQEKILSKTALPEDQKQQLKTLFVKYDNLWQHWENQVGHRKI |
| P14350- | RPHNIATGDYPPRPQKQYPINPKAKPSIQIVIDDLLKQGVLTPQNSTMNTPVYPVPKPDGRWR |
| Pro_2mutA | MVLDYREVNKTIPLTAAQNQHSAGILATIVRQKYKTTLDLANGFWAHPITPESYWLTAFTWQ |
| | GKQYCWTRLPQGFLNSPALFNADVVDLLKEIPNVQVYVDDIYLSHDDPKEHVQQLEKVFQIL |
| | LQAGYVVSLKKSEIGQKTVEFLGFNITKEGRGLTDTFKTKLLNITPPKDLKQLQSILGKLNFAR |
| | NFIPNFAELVQPLYNLIAPAKGKYIEWSEENTKQLNMVIEALNTASNLEERLPEQRLVIKVNTS |
| | PSAGYVRYYNETGKKPIMYLNYVFSKAELKFSMLEKLLTTMHKALIKAMDLAMGQEILVYS |
| | PIVSMTKIQKTPLPERKALPIRWITWMTYLEDPRIQFHYDKTLPELKHIPDVYTSSQSPVKHPS |
| | QYEGVFYTDGSAIKSPDPTKSNNAGMGIVHATYKPEYQVLNQWSIPLGNHTAQMAEIAAVEF |
| | ACKKALKIPGPVLVITDSFYVAESANKELPYWKSNGFVNNKKKPLKHISKWKSIAECLSMKP |
| | DITIQHEKGISLQIPVFILKGNALADKLATQGSYVVN (SEQ ID NO: 20219) |
| GALV_ | VLNLEEEYRLHEKPVPSSIDPSWLQLFPTVWAERAGMGLANQVPPVVVELRSGASPVAVRQY |
| P21414 | PMSKEAREGIRPHIQKFLDLGVLVPCRSPWNTPLLPVKKPGTNDYRPVQDLREINKRVQDIHP |
| | TVPNPYNLLSSLPPSYTWYSVLDLKDAFFCLRLHPNSQPLFAFEWKDPEKGNTGQLTWTRLP |
| | QGFKNSPTLFDEALHRDLAPFRALNPQVVLLQYVDDLLVAAPTYEDCKKGTQKLLQELSKLG |
| | YRVSAKKAQLCQREVTYLGYLLKEGKRWLTPARKATVMKIPVPTTPRQVREFLGTAGFCRL |
| | WIPGFASLAAPLYPLTKESIPFIWTEEHQQAFDHIKKALLSAPALALPDLTKPFTLYIDERAGV |
| | ARGVLTQTLGPWRRPVAYLSKKLDPVASGWPTCLKAVAAVALLLKDADKLTLGQNVTVIAS |
| | HSLESIVRQPPDRWMTNARMTHYQSLLLNERVSFAPPAVLNPATLLPVESEATPVHRCSEILA |
| | EETGTRRDLEDQPLPGVPTWYTDGSSFITEGKRRAGAPIVDGKRTVWASSLPEGTSAQKAEL |
| | VALTQALRLAEGKNINIYTDSRYAFATAHIHGAIYKQRGLLTSAGKDIKNKEEILALLEAIHLP |
| | RRVAIIHCPGHQRGSNPVATGNRRADEAAKQAALSTRVLAGTTKP (SEQ ID NO: 20220) |
| GALV_ | VLNLEEEYRLHEKPVPSSIDPSWLQLFPTVWAERAGMGLANQVPPVVVELRSGASPVAVRQY |
| P21414_ | PMSKEAREGIRPHIQKFLDLGVLVPCRSPWNTPLLPVKKPGTNDYRPVQDLREINKRVQDIHP |
| 3mut | TVPNPYNLLSSLPPSYTWYSVLDLKDAFFCLRLHPNSQPLFAFEWKDPEKGNTGQLTWTRLP |
| | QGFKNSPTLFNEALHRDLAPFRALNPQVVLLQYVDDLLVAAPTYEDCKKGTQKLLQELSKLG |
| | YRVSAKKAQLCQREVTYLGYLLKEGKRWLTPARKATVMKIPVPTTPRQVREFLGTAGFCRL |
| | WIPGFASLAAPLYPLTKPSIPFIWTEEHQQAFDHIKKALLSAPALALPDLTKPFTLYIDERAGVA |
| | RGVLTQTLGPWRRPVAYLSKKLDPVASGWPTCLKAVAAVALLLKDADKLTLGQNVTVIASH |
| | SLESIVRQPPDRWMTNARMTHYQSLLLNERVSFAPPAVLNPATLLPVESEATPVHRCSEILAE |
| | ETGTRRDLEDQPLPGVPTWYTDGSSFITEGKRRAGAPIVDGKRTVWASSLPEGTSAQKAELV |
| | ALTQALRLAEGKNINIYTDSRYAFATAHIHGAIYKQRGWLTSAGKDIKNKEEILALLEAIHLPR |
| | RVAIIHCPGHQRGSNPVATGNRRADEAAKQAALSTRVLAGTTKP (SEQ ID NO: 20221) |
| GALV_ | VLNLEEEYRLHEKPVPSSIDPSWLQLFPTVWAERAGMGLANQVPPVVVELRSGASPVAVRQY |
| P21414_ | PMSKEAREGIRPHIQKFLDLGVLVPCRSPWNTPLLPVKKPGTNDYRPVQDLREINKRVQDIHP |
| 3mutA | TVPNPYNLLSSLPPSYTWYSVLDLKDAFFCLRLHPNSQPLFAFEWKDPEKGNTGQLTWTRLP |
| | QGFKNSPTLFNEALHRDLAPFRALNPQVVLLQYVDDLLVAAPTYEDCKKGTQKLLQELSKLG |
| | YRVSAKKAQLCQREVTYLGYLLKEGKRWLTPARKATVMKIPVPTTPRQVREFLGKAGFCRL |
| | FIPGFASLAAPLYPLTKPSIPFIWTEEHQQAFDHIKKALLSAPALALPDLTKPFTLYIDERAGVA |
| | RGVLTQTLGPWRRPVAYLSKKLDPVASGWPTCLKAVAAVALLLKDADKLTLGQNVTVIASH |
| | SLESIVRQPPDRWMTNARMTHYQSLLLNERVSFAPPAVLNPATLLPVESEATPVHRCSEILAE |
| | ETGTRRDLEDQPLPGVPTWYTDGSSFITEGKRRAGAPIVDGKRTVWASSLPEGTSAQKAELV |
| | ALTQALRLAEGKNINIYTDSRYAFATAHIHGAIYKQRGWLTSAGKDIKNKEEILALLEAIHLPR |
| | RVAIIHCPGHQRGSNPVATGNRRADEAAKQAALSTRVLAGTTKP (SEQ ID NO: 20222) |
| HTL1A_ | AVLGLEHLPRPPQISQFPLNPERLQALQHLVRKALEAGHIEPYTGPGNNPVFPVKKANGTWRF |
| P03362 | IHDLRATNSLTIDLSSSSPGPPDLSSLPTTLAHLQTIDLRDAFFQIPLPKQFQPYFAFTVPQQCNY |
| | GPGTRYAWKVLPQGFKNSPTLFEMQLAHILQPIRQAFPQCTILQYMDDILLASPSHEDLLLLSE |
| | ATMASLISHGLPVSENKTQQTPGTIKFLGQIISPNHLTYDAVPTVPIRSRWALPELQALLGEIQ |
| | WVSKGTPTLRQPLHSLYCALQRHTDPRDQIYLNPSQVQSLVQLRQALSQNCRSRLVQTLPLL |
| | GAIMLTLTGTTTVVFQSKEQWPLVWLHAPLPHTSQCPWGQLLASAVLLLDKYTLQSYGLLC |
| | QTIHHNISTQTFNQFIQTSDHPSVPILLHHSHRFKNLGAQTGELWNTFLKTAAPLAPVKALMP |
| | VFTLSPVIINTAPCLFSDGSTSRAAYILWDKQILSQRSFPLPPPHKSAQRAELLGLLHGLSSARS |
| | WRCLNIFLDSKYLYHYLRTLALGTFQGRSSQAPFQALLPRLLSRKVVYLHHVRSHTNLPDPIS |
| | RLNALTDALLITPVLQL (SEQ ID NO: 20223) |
| HTL1A_ | AVLGLEHLPRPPQISQFPLNPERLQALQHLVRKALEAGHIEPYTGPGNNPVFPVKKANGTWRF |
| P03362_ | IHDLRATNSLTIDLSSSSPGPPDLSSLPTTLAHLQTIDLRDAFFQIPLPKQFQPYFAFTVPQQCNY |
| 2mut | GPGTRYAWKVLPQGFKNSPTLFQMQLAHILQPIRQAFPQCTILQYMDDILLASPSHEDLLLLSE |
| | ATMASLISHGLPVSENKTQQTPGTIKFLGQIISPNHLTYDAVPTVPIRSRWALPELQALLGEIQ |
| | WVSKGTPTLRQPLHSLYCALQPHTDPRDQIYLNPSQVQSLVQLRQALSQNCRSRLVQTLPLL |
| | GAIMLTLTGTTTVVFQSKEQWPLVWLHAPLPHTSQCPWGQLLASAVLLLDKYTLQSYGLLC |
| | QTIHHNISTQTFNQFIQTSDHPSVPILLHHSHRFKNLGAQTGELWNTFLKTAAPLAPVKALMP |
| | VFTLSPVIINTAPCLFSDGSTSRAAYILWDKQILSQRSFPLPPPHKSAQRAELLGLLHGLSSARS |
| | WRCLNIFLDSKYLYHYLRTLALGTFQGRSSQAPFQALLPRLLSRKVVYLHHVRSHTNLPDPIS |
| | RLNALTDALLITPVLQL (SEQ ID NO: 20224) |
| HTL1A_ | AVLGLEHLPRPPQISQFPLNPERLQALQHLVRKALEAGHIEPYTGPGNNPVFPVKKANGTWRF |
| P03362_ | IHDLRATNSLTIDLSSSSPGPPDLSSPPTTLAHLQTIDLRDAFFQIPLPKQFQPYFAFTVPQQCNY |
| 2mutB | GPGTRYAWKVLPQGFKNSPTLFQMQLAHILQPIRQAFPQCTILQYMDDILLASPSHEDLLLLSE |
| | ATMASLISHGLPVSENKTQQTPGTIKFLGQIISPNHLTYDAVPTVPIRSRWALPELQALLGEIQ |
| | WVSKGTPTLRQPLHSLYCALQPHTDPRDQIYLNPSQVQSLVQLRQALSQNCRSRLVQTLPLL |
| | GAIMLTLTGTTTVVFQSKEQWPLVWLHAPLPHTSQCPWGQLLASAVLLLDKYTLQSYGLLC |
| | QTIHHNISTQTFNQFIQTSDHPSVPILLHHSHRFKNLGAQTGELWNTFLKTAAPLAPVKALMP |
| | VFTLSPVIINTAPCLFSDGSTSRAAYILWDKQILSQRSFPLPPPHKSAQRAELLGLLHGLSSARS |
| | WRCLNIFLDSKYLYHYLRTLALGTFQGRSSQAPFQALLPRLLSRKVVYLHHVRSHTNLPDPIS |
| | RLNALTDALLITPVLQL (SEQ ID NO: 20225) |
| HTL1C_ | AVLGLEHLPRPPEISQFPLNPERLQALQHLVRKALEAGHIEPYTGPGNNPVFPVKKANGTWRF |
| P14078 | IHDLRATNSLTIDLSSSSPGPPDLSSLPTTLAHLQTIDLKDAFFQIPLPKQFQPYFAFTVPQQCNY |
| | GPGTRYAWRVLPQGFKNSPTLFEMQLAHILQPIRQAFPQCTILQYMDDILLASPSHADLQLLS |
| | EATMASLISHGLPVSENKTQQTPGTIKFLGQIISPNHLTYDAVPKVPIRSRWALPELQALLGEIQ |
| | WVSKGTPTLRQPLHSLYCALQRHTDPRDQIYLNPSQVQSLVQLRQALSQNCRSRLVQTLPLL |
| | GAIMLTLTGTTTVVFQSKQQWPLVWLHAPLPHTSQCPWGQLLASAVLLLDKYTLQSYGLLC |
| | QTIHHNISTQTFNQFIQTSDHPSVPILLHHSHRFKNLGAQTGELWNTFLKTTAPLAPVKALMPV |
| | FTLSPVIINTAPCLFSDGSTSQAAYILWDKHILSQRSFPLPPPHKSAQRAELLGLLHGLSSARSW |
| | RCLNIFLDSKYLYHYLRTLALGTFQGRSSQAPFQALLPRLLSRKVVYLHHVRSHTNLPDPISRL |
| | NALTDALLITPVLQL (SEQ ID NO: 20226) |
| HTL1C_ | AVLGLEHLPRPPEISQFPLNPERLQALQHLVRKALEAGHIEPYTGPGNNPVFPVKKANGTWRF |
| P14078_ | IHDLRATNSLTIDLSSSSPGPPDLSSLPTTLAHLQTIDLKDAFFQIPLPKQFQPYFAFTVPQQCNY |
| 2mut | GPGTRYAWRVLPQGFKNSPTLFQMQLAHILQPIRQAFPQCTILQYMDDILLASPSHADLQLLS |
| | EATMASLISHGLPVSENKTQQTPGTIKFLGQIISPNHLTYDAVPKVPIRSRWALPELQALLGEIQ |
| | WVSKGTPTLRQPLHSLYCALQPHTDPRDQIYLNPSQVQSLVQLRQALSQNCRSRLVQTLPLL |
| | GAIMLTLTGTTTVVFQSKQQWPLVWLHAPLPHTSQCPWGQLLASAVLLLDKYTLQSYGLLC |
| | QTIHHNISTQTFNQFIQTSDHPSVPILLHHSHRFKNLGAQTGELWNTFLKTTAPLAPVKALMPV |
| | FTLSPVIINTAPCLFSDGSTSQAAYILWDKHILSQRSFPLPPPHKSAQRAELLGLLHGLSSARSW |
| | RCLNIFLDSKYLYHYLRTLALGTFQGRSSQAPFQALLPRLLSRKVVYLHHVRSHTNLPDPISRL |
| | NALTDALLITPVLQL (SEQ ID NO: 20227) |
| HTL1L_ | GLEHLPRPPEISQFPLNPERLQALQHLVRKALEAGHIEPYTGPGNNPVFPVKKANGTWRFIHD |
| P0C211 | LRATNSLTVDLSSSSPGPPDLSSLPTTLAHLQTIDLKDAFFQIPLPKQFQPYFAFTVPQQCNYGP |
| | GTRYAWKVLPQGFKNSPTLFEMQLASILQPIRQAFPQCVILQYMDDILLASPSPEDLQQLSEAT |
| | MASLISHGLPVSQDKTQQTPGTIKFLGQIISPNHITYDAVPTVPIRSRWALPELQALLGEIQWVS |
| | KGTPTLRQPLHSLYCALQGHTDPRDQIYLNPSQVQSLMQLQQALSQNCRSRLAQTLPLLGAI |
| | MLTLTGTTTVVFQSKQQWPLVWLHAPLPHTSQCPWGQLLASAVLLLDKYTLQSYGLLCQTI |
| | HHNISIQTFNQFIQTSDHPSVPILLHHSHRFKNLGAQTGELWNTFLKTAAPLAPVKALTPVFTL |
| | SPIIINTAPCLFSDGSTSQAAYILWDKHILSQRSFPLPPPHKSAQQAELLGLLHGLSSARSWHCL |
| | NIFLDSKYLYHYLRTLALGTFQGKSSQAPFQALLPRLLAHKVIYLHHVRSHTNLPDPISKLNAL |
| | TDALLITPIL (SEQ ID NO: 20228) |
| HTL1L_ | GLEHLPRPPEISQFPLNPERLQALQHLVRKALEAGHIEPYTGPGNNPVFPVKKANGTWRFIHD |
| P0C211_ | LRATNSLTVDLSSSSPGPPDLSSLPTTLAHLQTIDLKDAFFQIPLPKQFQPYFAFTVPQQCNYGP |
| 2mut | GTRYAWKVLPQGFKNSPTLFQMQLASILQPIRQAFPQCVILQYMDDILLASPSPEDLQQLSEA |
| | TMASLISHGLPVSQDKTQQTPGTIKFLGQIISPNHITYDAVPTVPIRSRWALPELQALLGEIQWV |
| | SKGTPTLRQPLHSLYCALQGHTDPRDQIYLNPSQVQSLMQLQQALSQNCRSRLAQTLPLLGAI |
| | MLTLTGTTTVVFQSKQQWPLVWLHAPLPHTSQCPWGQLLASAVLLLDKYTLQSYGLLCQTI |
| | HHNISIQTFNQFIQTSDHPSVPILLHHSHRFKNLGAQTGELWNTFLKTAAPLAPVKALTPVFTL |
| | SPIIINTAPCLFSDGSTSQAAYILWDKHILSQRSFPLPPPHKSAQQAELLGLLHGLSSARSWHCL |
| | NIFLDSKYLYHYLRTLAWGTFQGKSSQAPFQALLPRLLAHKVIYLHHVRSHTNLPDPISKLNA |
| | LTDALLITPIL (SEQ ID NO: 20229) |
| HTL1L_ | GLEHLPRPPEISQFPLNPERLQALQHLVRKALEAGHIEPYTGPGNNPVFPVKKANGTWRFIHD |
| P0C211_ | LRATNSLTVDLSSSSPGPPDLSSPPTTLAHLQTIDLKDAFFQIPLPKQFQPYFAFTVPQQCNYGP |
| 2mutB | GTRYAWKVLPQGFKNSPTLFQMQLASILQPIRQAFPQCVILQYMDDILLASPSPEDLQQLSEA |
| | TMASLISHGLPVSQDKTQQTPGTIKFLGQIISPNHITYDAVPTVPIRSRWALPELQALLGEIQWV |
| | SKGTPTLRQPLHSLYCALQGHTDPRDQIYLNPSQVQSLMQLQQALSQNCRSRLAQTLPLLGAI |
| | MLTLTGTTTVVFQSKQQWPLVWLHAPLPHTSQCPWGQLLASAVLLLDKYTLQSYGLLCQTI |
| | HHNISIQTFNQFIQTSDHPSVPILLHHSHRFKNLGAQTGELWNTFLKTAAPLAPVKALTPVFTL |
| | SPIIINTAPCLFSDGSTSQAAYILWDKHILSQRSFPLPPPHKSAQQAELLGLLHGLSSARSWHCL |
| | NIFLDSKYLYHYLRTLAWGTFQGKSSQAPFQALLPRLLAHKVIYLHHVRSHTNLPDPISKLNA |
| | LTDALLITPIL (SEQ ID NO: 20230) |
| HTL32_ | GLEHLPPPPEVSQFPLNPERLQALTDLVSRALEAKHIEPYQGPGNNPIFPVKKPNGKWRFIHDL |
| Q0R5R2 | RATNSVTRDLASPSPGPPDLTSLPQGLPHLRTIDLTDAFFQIPLPTIFQPYFAFTLPQPNNYGPGT |
| | RYSWRVLPQGFKNSPTLFEQQLSHILTPVRKTFPNSLIIQYMDDILLASPAPGELAALTDKVTN |
| | ALTKEGLPLSPEKTQATPGPIHFLGQVISQDCITYETLPSINVKSTWSLAELQSMLGELQWVSK |
| | GTPVLRSSLHQLYLALRGHRDPRDTIKLTSIQVQALRTIQKALTLNCRSRLVNQLPILALIMLR |
| | PTGTTAVLFQTKQKWPLVWLHTPHPATSLRPWGQLLANAVIILDKYSLQHYGQVCKSFHHNI |
| | SNQALTYYLHTSDQSSVAILLQHSHRFHNLGAQPSGPWRSLLQMPQIFQNIDVLRPPFTISPVV |
| | INHAPCLFSDGSASKAAFIIWDRQVIHQQVLSLPSTCSAQAGELFGLLAGLQKSQPWVALNIFL |
| | DSKFLIGHLRRMALGAFPGPSTQCELHTQLLPLLQGKTVYVHHVRSHTLLQDPISRLNEATDA |
| | LMLAPLLPL (SEQ ID NO: 20231) |
| HTL32_ | GLEHLPPPPEVSQFPLNPERLQALTDLVSRALEAKHIEPYQGPGNNPIFPVKKPNGKWRFIHDL |
| Q0R5R2_ | RATNSVTRDLASPSPGPPDLTSLPQGLPHLRTIDLTDAFFQIPLPTIFQPYFAFTLPQPNNYGPGT |
| 2mut | RYSWRVLPQGFKNSPTLFQQQLSHILTPVRKTFPNSLIIQYMDDILLASPAPGELAALTDKVTN |
| | ALTKEGLPLSPEKTQATPGPIHFLGQVISQDCITYETLPSINVKSTWSLAELQSMLGELQWVSK |
| | GTPVLRSSLHQLYLALRGHRDPRDTIKLTSIQVQALRTIQKALTLNCRSRLVNQLPILALIMLR |
| | PTGTTAVLFQTKQKWPLVWLHTPHPATSLRPWGQLLANAVIILDKYSLQHYGQVCKSFHHNI |
| | SNQALTYYLHTSDQSSVAILLQHSHRFHNLGAQPSGPWRSLLQMPQIFQNIDVLRPPFTISPVV |
| | INHAPCLFSDGSASKAAFIIWDRQVIHQQVLSLPSTCSAQAGELFGLLAGLQKSQPWVALNIFL |
| | DSKFLIGHLRRMAWGAFPGPSTQCELHTQLLPLLQGKTVYVHHVRSHTLLQDPISRLNEATD |
| | ALMLAPLLPL (SEQ ID NO: 20232) |
| HTL32_ | GLEHLPPPPEVSQFPLNPERLQALTDLVSRALEAKHIEPYQGPGNNPIFPVKKPNGKWRFIHDL |
| Q0R5R2_ | RATNSVTRDLASPSPGPPDLTSPPQGLPHLRTIDLTDAFFQIPLPTIFQPYFAFTLPQPNNYGPGT |
| 2mutB | RYSWRVLPQGFKNSPTLFQQQLSHILTPVRKTFPNSLIIQYMDDILLASPAPGELAALTDKVTN |
| | ALTKEGLPLSPEKTQATPGPIHFLGQVISQDCITYETLPSINVKSTWSLAELQSMLGELQWVSK |
| | GTPVLRSSLHQLYLALRGHRDPRDTIKLTSIQVQALRTIQKALTLNCRSRLVNQLPILALIMLR |
| | PTGTTAVLFQTKQKWPLVWLHTPHPATSLRPWGQLLANAVIILDKYSLQHYGQVCKSFHHNI |
| | SNQALTYYLHTSDQSSVAILLQHSHRFHNLGAQPSGPWRSLLQMPQIFQNIDVLRPPFTISPVV |
| | INHAPCLFSDGSASKAAFIIWDRQVIHQQVLSLPSTCSAQAGELFGLLAGLQKSQPWVALNIFL |
| | DSKFLIGHLRRMAWGAFPGPSTQCELHTQLLPLLQGKTVYVHHVRSHTLLQDPISRLNEATD |
| | ALMLAPLLPL (SEQ ID NO: 20233) |
| HTL3P_ | GLEHLPPPPEVSQFPLNPERLQALTDLVSRALEAKHIEPYQGPGNNPIFPVKKPNGKWRFIHDL |
| Q4U0X6 | RATNSLTRDLASPSPGPPDLTSLPQDLPHLRTIDLTDAFFQIPLPAVFQPYFAFTLPQPNNHGPG |
| | TRYSWRVLPQGFKNSPTLFEQQLSHILAPVRKAFPNSLIIQYMDDILLASPALRELTALTDKVT |
| | NALTKEGLPMSLEKTQATPGSIHFLGQVISPDCITYETLPSIHVKSIWSLAELQSMLGELQWVS |
| | KGTPVLRSSLHQLYLALRGHRDPRDTIELTSTQVQALKTIQKALALNCRSRLVSQLPILALIILR |
| | PTGTTAVLFQTKQKWPLVWLHTPHPATSLRPWGQLLANAIITLDKYSLQHYGQICKSFHHNIS |
| | NQALTYYLHTSDQSSVAILLQHSHRFHNLGAQPSGPWRSLLQVPQIFQNIDVLRPPFIISPVVID |
| | HAPCLFSDGATSKAAFILWDKQVIHQQVLPLPSTCSAQAGELFGLLAGLQKSKPWPALNIFLD |
| | SKFLIGHLRRMALGAFLGPSTQCDLHARLFPLLQGKTVYVHHVRSHTLLQDPISRLNEATDAL |
| | MLAPLLPL (SEQ ID NO: 20234) |
| HTL3P_ | GLEHLPPPPEVSQFPLNPERLQALTDLVSRALEAKHIEPYQGPGNNPIFPVKKPNGKWRFIHDL |
| Q4U0X6_ | RATNSLTRDLASPSPGPPDLTSLPQDLPHLRTIDLTDAFFQIPLPAVFQPYFAFTLPQPNNHGPG |
| 2mut | TRYSWRVLPQGFKNSPTLFQQQLSHILAPVRKAFPNSLIIQYMDDILLASPALRELTALTDKVT |
| | NALTKEGLPMSLEKTQATPGSIHFLGQVISPDCITYETLPSIHVKSIWSLAELQSMLGELQWVS |
| | KGTPVLRSSLHQLYLALRGHRDPRDTIELTSTQVQALKTIQKALALNCRSRLVSQLPILALIILR |
| | PTGTTAVLFQTKQKWPLVWLHTPHPATSLRPWGQLLANAIITLDKYSLQHYGQICKSFHHNIS |
| | NQALTYYLHTSDQSSVAILLQHSHRFHNLGAQPSGPWRSLLQVPQIFQNIDVLRPPFIISPVVID |
| | HAPCLFSDGATSKAAFILWDKQVIHQQVLPLPSTCSAQAGELFGLLAGLQKSKPWPALNIFLD |
| | SKFLIGHLRRMAWGAFLGPSTQCDLHARLFPLLQGKTVYVHHVRSHTLLQDPISRLNEATDA |
| | LMLAPLLPL (SEQ ID NO: 20235) |
| HTL3P_ | GLEHLPPPPEVSQFPLNPERLQALTDLVSRALEAKHIEPYQGPGNNPIFPVKKPNGKWRFIHDL |
| Q4U0X6_ | RATNSLTRDLASPSPGPPDLTSPPQDLPHLRTIDLTDAFFQIPLPAVFQPYFAFTLPQPNNHGPG |
| 2mutB | TRYSWRVLPQGFKNSPTLFQQQLSHILAPVRKAFPNSLIIQYMDDILLASPALRELTALTDKVT |
| | NALTKEGLPMSLEKTQATPGSIHFLGQVISPDCITYETLPSIHVKSIWSLAELQSMLGELQWVS |
| | KGTPVLRSSLHQLYLALRGHRDPRDTIELTSTQVQALKTIQKALALNCRSRLVSQLPILALIILR |
| | PTGTTAVLFQTKQKWPLVWLHTPHPATSLRPWGQLLANAIITLDKYSLQHYGQICKSFHHNIS |
| | NQALTYYLHTSDQSSVAILLQHSHRFHNLGAQPSGPWRSLLQVPQIFQNIDVLRPPFIISPVVID |
| | HAPCLFSDGATSKAAFILWDKQVIHQQVLPLPSTCSAQAGELFGLLAGLQKSKPWPALNIFLD |
| | SKFLIGHLRRMAWGAFLGPSTQCDLHARLFPLLQGKTVYVHHVRSHTLLQDPISRLNEATDA |
| | LMLAPLLPL (SEQ ID NO: 20236) |
| HTLV2_ | HLPPPPQVDQFPLNLPERLQALNDLVSKALEAGHIEPYSGPGNNPVFPVKKPNGKWRFIHDLR |
| P03363_ | ATNAITTTLTSPSPGPPDLTSLPTALPHLQTIDLTDAFFQIPLPKQYQPYFAFTIPQPCNYGPGTR |
| 2mut | YAWTVLPQGFKNSPTLFQQQLAAVLNPMRKMFPTSTIVQYMDDILLASPTNEELQQLSQLTL |
| | QALTTHGLPISQEKTQQTPGQIRFLGQVISPNHITYESTPTIPIKSQWTLTELQVILGEIQWVSKG |
| | TPILRKHLQSLYSALHPYRDPRACITLTPQQLHALHAIQQALQHNCRGRLNPALPLLGLISLST |
| | SGTTSVIFQPKQNWPLAWLHTPHPPTSLCPWGHLLACTILTLDKYTLQHYGQLCQSFHHNMS |
| | KQALCDFLRNSPHPSVGILIHHMGRFHNLGSQPSGPWKTLLHLPTLLQEPRLLRPIFTLSPVVL |
| | DTAPCLFSDGSPQKAAYVLWDQTILQQDITPLPSHETHSAQKGELLALICGLRAAKPWPSLNIF |
| | LDSKYLIKYLHSLAIGAFLGTSAHQTLQAALPPLLQGKTIYLHHVRSHTNLPDPISTFNEYTDS |
| | LILAPLVPL (SEQ ID NO: 20237) |
| JSRV_ | PLGTSDSPVTHADPIDWKSEEPVWVDQWPLTQEKLSAAQQLVQEQLRLGHIEPSTSAWNSPIF |
| P31623 | VIKKKSGKWRLLQDLRKVNETMMHMGALQPGLPTPSAIPDKSYIIVIDLKDCFYTIPLAPQDC |
| | KRFAFSLPSVNFKEPMQRYQWRVLPQGMTNSPTLCQKFVATAIAPVRQRFPQLYLVHYMDDI |
| | LLAHTDEHLLYQAFSILKQHLSLNGLVIADEKIQTHFPYNYLGFSLYPRVYNTQLVKLQTDHL |
| | KTLNDFQKLLGDINWIRPYLKLPTYTLQPLFDILKGDSDPASPRTLSLEGRTALQSIEEAIRQQQ |
| | ITYCDYQRSWGLYILPTPRAPTGVLYQDKPLRWIYLSATPTKHLLPYYELVAKIIAKGRHEAIQ |
| | YFGMEPPFICVPYALEQQDWLFQFSDNWSIAFANYPGQITHHYPSDKLLQFASSHAFIFPKIVR |
| | RQPIPEATLIFTDGSSNGTAALIINHQTYYAQTSFSSAQVVELFAVHQALLTVPTSFNLFTDSSY |
| | VVGALQMIETVPIIGTTSPEVLNLFTLIQQVLHCRQHPCFFGHIRAHSTLPGALVQGNHTADVL |
| | TKQVFFQS (SEQ ID NO: 20238) |
| JSRV_ | PLGTSDSPVTHADPIDWKSEEPVWVDQWPLTQEKLSAAQQLVQEQLRLGHIEPSTSAWNSPIF |
| P31623_ | VIKKKSGKWRLLQDLRKVNETMMHMGALQPGLPTPSPIPDKSYIIVIDLKDCFYTIPLAPQDC |
| 2mutB | KRFAFSLPSVNFKEPMQRYQWRVLPQGMTNSPTLCQKFVATAIAPVRQRFPQLYLVHYMDDI |
| | LLAHTDEHLLYQAFSILKQHLSLNGLVIADEKIQTHFPYNYLGFSLYPRVYNTQLVKLQTDHL |
| | KTLNDFQKLLGDINWIRPYLKLPTYTLQPLFDILKGDSDPASPRTLSLEGRTALQSIEEAIRQQQ |
| | ITYCDYQRSWGLYILPTPRAPTGVLYQDKPLRWIYLSATPTKHLLPYYELVAKIIAKGRHEAIQ |
| | YFGMEPPFICVPYALEQQDWLFQFSDNWSIAFANYPGQITHHYPSDKLLQFASSHAFIFPKIVR |
| | RQPIPEATLIFTDGSSNGTAALIINHQTYYAQTSFSSAQVVELFAVHQALLTVPTSFNLFTDSSY |
| | VVGALQMIETVPIIGTTSPEVLNLFTLIQQVLHCRQHPCFFGHIRAHSTLPGALVQGNHTADVL |
| | TKQVFFQS (SEQ ID NO: 20239) |
| KORV_ | TLGDQGSRGSDPLPEPRVTLTVEGIPTEFLVNTGAEHSVLTKPMGKMGSKRTVVAGATGSKV |
| Q9TTC1 | YPWTTKRLLKIGQKQVTHSFLVIPECPAPLLGRDLLTKLKAQIQFSTEGPQVTWEDRPAMCLV |
| | LNLEEEYRLHEKPVPPSIDPSWLQLFPMVWAEKAGMGLANQVPPVVVELKSDASPVAVRQY |
| | PMSKEAREGIRPHIQRFLDLGILVPCQSPWNTPLLPVKKPGTNDYRPVQDLREVNKRVQDIHP |
| | TVPNPYNLLSSLPPSHTWYSVLDLKDAFFCLKLHPNSQPLFAFEWRDPEKGNTGQLTWTRLP |
| | QGFKNSPTLFDEALHRDLASFRALNPQVVMLQYVDDLLVAAPTYRDCKEGTRRLLQELSKL |
| | GYRVSAKKAQLCREEVTYLGYLLKGGKRWLTPARKATVMKIPTPTTPRQVREFLGTAGFCR |
| | LWIPGFASLAAPLYPLTREKVPFTWTEAHQEAFGRIKEALLSAPALALPDLTKPFALYVDEKE |
| | GVARGVLTQTLGPWRRPVAYLSKKLDPVASGWPTCLKAIAAVALLLKDADKLTLGQNVLVI |
| | APHNLESIVRQPPDRWMTNARMTHYQSLLLNERVSFAPPAILNPATLLPVESDDTPIHICSEIL |
| | AEETGTRPDLRDQPLPGVPAWYTDGSSFIMDGRRQAGAAIVDNKRTVWASNLPEGTSAQKA |
| | ELIALTQALRLAEGKSINIYTDSRYAFATAHVHGAIYKQRGLLTSAGKDIKNKEEILALLEAIH |
| | LPKRVAIIHCPGHQRGTDPVATGNRKADEAAKQAAQSTRILTETTKN (SEQ ID NO: 20240) |
| KORV_ | TLGDQGSRGSDPLPEPRVTLTVEGIPTEFLVNTGAEHSVLTKPMGKMGSKRTVVAGATGSKV |
| Q9TTC1_ | YPWTTKRLLKIGQKQVTHSFLVIPECPAPLLGRDLLTKLKAQIQFSTEGPQVTWEDRPAMCLV |
| 3mut | LNLEEEYRLHEKPVPPSIDPSWLQLFPMVWAEKAGMGLANQVPPVVVELKSDASPVAVRQY |
| | PMSKEAREGIRPHIQRFLDLGILVPCQSPWNTPLLPVKKPGTNDYRPVQDLREVNKRVQDIHP |
| | TVPNPYNLLSSLPPSHTWYSVLDLKDAFFCLKLHPNSQPLFAFEWRDPEKGNTGQLTWTRLP |
| | QGFKNSPTLFNEALHRDLASFRALNPQVVMLQYVDDLLVAAPTYRDCKEGTRRLLQELSKL |
| | GYRVSAKKAQLCREEVTYLGYLLKGGKRWLTPARKATVMKIPTPTTPRQVREFLGTAGFCR |
| | LWIPGFASLAAPLYPLTRPKVPFTWTEAHQEAFGRIKEALLSAPALALPDLTKPFALYVDEKE |
| | GVARGVLTQTLGPWRRPVAYLSKKLDPVASGWPTCLKAIAAVALLLKDADKLTLGQNVLVI |
| | APHNLESIVRQPPDRWMTNARMTHYQSLLLNERVSFAPPAILNPATLLPVESDDTPIHICSEIL |
| | AEETGTRPDLRDQPLPGVPAWYTDGSSFIMDGRRQAGAAIVDNKRTVWASNLPEGTSAQKA |
| | ELIALTQALRLAEGKSINIYTDSRYAFATAHVHGAIYKQRGWLTSAGKDIKNKEEILALLEAIH |
| | LPKRVAIIHCPGHQRGTDPVATGNRKADEAAKQAAQSTRILTETTKN (SEQ ID NO: 20241) |
| KORV_ | TLGDQGSRGSDPLPEPRVTLTVEGIPTEFLVNTGAEHSVLTKPMGKMGSKRTVVAGATGSKV |
| Q9TTC1_ | YPWTTKRLLKIGQKQVTHSFLVIPECPAPLLGRDLLTKLKAQIQFSTEGPQVTWEDRPAMCLV |
| 3mutA | LNLEEEYRLHEKPVPPSIDPSWLQLFPMVWAEKAGMGLANQVPPVVVELKSDASPVAVRQY |
| | PMSKEAREGIRPHIQRFLDLGILVPCQSPWNTPLLPVKKPGTNDYRPVQDLREVNKRVQDIHP |
| | TVPNPYNLLSSLPPSHTWYSVLDLKDAFFCLKLHPNSQPLFAFEWRDPEKGNTGQLTWTRLP |
| | QGFKNSPTLFNEALHRDLASFRALNPQVVMLQYVDDLLVAAPTYRDCKEGTRRLLQELSKL |
| | GYRVSAKKAQLCREEVTYLGYLLKGGKRWLTPARKATVMKIPTPTTPRQVREFLGKAGFCR |
| | LFIPGFASLAAPLYPLTRPKVPFTWTEAHQEAFGRIKEALLSAPALALPDLTKPFALYVDEKEG |
| | VARGVLTQTLGPWRRPVAYLSKKLDPVASGWPTCLKAIAAVALLLKDADKLTLGQNVLVIA |
| | PHNLESIVRQPPDRWMTNARMTHYQSLLLNERVSFAPPAILNPATLLPVESDDTPIHICSEILAE |
| | ETGTRPDLRDQPLPGVPAWYTDGSSFIMDGRRQAGAAIVDNKRTVWASNLPEGTSAQKAELI |
| | ALTQALRLAEGKSINIYTDSRYAFATAHVHGAIYKQRGWLTSAGKDIKNKEEILALLEAIHLP |
| | KRVAIIHCPGHQRGTDPVATGNRKADEAAKQAAQSTRILTETTKN (SEQ ID NO: 20242) |
| KORV_ | LLGRDLLTKLKAQIQFSTEGPQVTWEDRPAMCLVLNLEEEYRLHEKPVPPSIDPSWLQLFPMV |
| Q9TTC1- | WAEKAGMGLANQVPPVVVELKSDASPVAVRQYPMSKEAREGIRPHIQRFLDLGILVPCQSPW |
| Pro | NTPLLPVKKPGTNDYRPVQDLREVNKRVQDIHPTVPNPYNLLSSLPPSHTWYSVLDLKDAFF |
| | CLKLHPNSQPLFAFEWRDPEKGNTGQLTWTRLPQGFKNSPTLFDEALHRDLASFRALNPQVV |
| | MLQYVDDLLVAAPTYRDCKEGTRRLLQELSKLGYRVSAKKAQLCREEVTYLGYLLKGGKR |
| | WLTPARKATVMKIPTPTTPRQVREFLGTAGFCRLWIPGFASLAAPLYPLTREKVPFTWTEAHQ |
| | EAFGRIKEALLSAPALALPDLTKPFALYVDEKEGVARGVLTQTLGPWRRPVAYLSKKLDPVA |
| | SGWPTCLKAIAAVALLLKDADKLTLGQNVLVIAPHNLESIVRQPPDRWMTNARMTHYQSLL |
| | LNERVSFAPPAILNPATLLPVESDDTPIHICSEILAEETGTRPDLRDQPLPGVPAWYTDGSSFIM |
| | DGRRQAGAAIVDNKRTVWASNLPEGTSAQKAELIALTQALRLAEGKSINIYTDSRYAFATAH |
| | VHGAIYKQRGLLTSAGKDIKNKEEILALLEAIHLPKRVAIIHCPGHQRGTDPVATGNRKADEA |
| | AKQAAQSTRILTETTKN (SEQ ID NO: 20243) |
| KORV_ | LLGRDLLTKLKAQIQFSTEGPQVTWEDRPAMCLVLNLEEEYRLHEKPVPPSIDPSWLQLFPMV |
| Q9TTC1- | WAEKAGMGLANQVPPVVVELKSDASPVAVRQYPMSKEAREGIRPHIQRFLDLGILVPCQSPW |
| Pro_3mut | NTPLLPVKKPGTNDYRPVQDLREVNKRVQDIHPTVPNPYNLLSSLPPSHTWYSVLDLKDAFF |
| | CLKLHPNSQPLFAFEWRDPEKGNTGQLTWTRLPQGFKNSPTLFNEALHRDLASFRALNPQVV |
| | MLQYVDDLLVAAPTYRDCKEGTRRLLQELSKLGYRVSAKKAQLCREEVTYLGYLLKGGKR |
| | WLTPARKATVMKIPTPTTPRQVREFLGTAGFCRLWIPGFASLAAPLYPLTRPKVPFTWTEAHQ |
| | EAFGRIKEALLSAPALALPDLTKPFALYVDEKEGVARGVLTQTLGPWRRPVAYLSKKLDPVA |
| | SGWPTCLKAIAAVALLLKDADKLTLGQNVLVIAPHNLESIVRQPPDRWMTNARMTHYQSLL |
| | LNERVSFAPPAILNPATLLPVESDDTPIHICSEILAEETGTRPDLRDQPLPGVPAWYTDGSSFIM |
| | DGRRQAGAAIVDNKRTVWASNLPEGTSAQKAELIALTQALRLAEGKSINIYTDSRYAFATAH |
| | VHGAIYKQRGWLTSAGKDIKNKEEILALLEAIHLPKRVAIIHCPGHQRGTDPVATGNRKADEA |
| | AKQAAQSTRILTETTKN (SEQ ID NO: 20244) |
| KORV_ | LLGRDLLTKLKAQIQFSTEGPQVTWEDRPAMCLVLNLEEEYRLHEKPVPPSIDPSWLQLFPMV |
| Q9TTC1- | WAEKAGMGLANQVPPVVVELKSDASPVAVRQYPMSKEAREGIRPHIQRFLDLGILVPCQSPW |
| Pro_3mutA | NTPLLPVKKPGTNDYRPVQDLREVNKRVQDIHPTVPNPYNLLSSLPPSHTWYSVLDLKDAFF |
| | CLKLHPNSQPLFAFEWRDPEKGNTGQLTWTRLPQGFKNSPTLFNEALHRDLASFRALNPQVV |
| | MLQYVDDLLVAAPTYRDCKEGTRRLLQELSKLGYRVSAKKAQLCREEVTYLGYLLKGGKR |
| | WLTPARKATVMKIPTPTTPRQVREFLGKAGFCRLFIPGFASLAAPLYPLTRPKVPFTWTEAHQ |
| | EAFGRIKEALLSAPALALPDLTKPFALYVDEKEGVARGVLTQTLGPWRRPVAYLSKKLDPVA |
| | SGWPTCLKAIAAVALLLKDADKLTLGQNVLVIAPHNLESIVRQPPDRWMTNARMTHYQSLL |
| | LNERVSFAPPAILNPATLLPVESDDTPIHICSEILAEETGTRPDLRDQPLPGVPAWYTDGSSFIM |
| | DGRRQAGAAIVDNKRTVWASNLPEGTSAQKAELIALTQALRLAEGKSINIYTDSRYAFATAH |
| | VHGAIYKQRGWLTSAGKDIKNKEEILALLEAIHLPKRVAIIHCPGHQRGTDPVATGNRKADEA |
| | AKQAAQSTRILTETTKN (SEQ ID NO: 20245) |
| MLVAV_ | TLNLEDEYRLYETSAEPEVSPGSTWLSDFPQAWAETGGMGLAVRQAPLIIPLKATSTPVSIKQ |
| P03356 | YPMSQEAKLGIKPHIQRLLDQGILVPCQSPWNTPLLPVKKPGTNDYRPVQDLREVNKRVEDIH |
| | PTVPNPYNLLSGLPPSHRWYTVLDLKDAFFCLRLHPTSQPLFAFEWRDPGMGISGQLTWTRLP |
| | QGFKNSPTLFDEALHRDLADFRIQHPDLILLQYVDDILLAATSELDCQQGTRALLLTLGNLGY |
| | RASAKKAQLCQKQVKYLGYLLKEGQRWLTEARKETVMGQPTPKTPRQLREFLGTAGFCRL |
| | WIPGFAEMAAPLYPLTKTGTLFNWGPDQQKAYQEIKQALLTAPALGLPDLTKPFELFVDEKQ |
| | GYAKGVLTQKLGPWRRPVAYLSKKLDPVAAGWPPCLRMVAAIAVLRKDAGKLTMGQPLVI |
| | LAPHAVEALVKQPPDRWLSNARMTHYQAMLLDTDRVQFGPVVALNPATLLPLPEEGAPHDC |
| | LEILAETHGTRPDLTDQPIPDADHTWYTDGSSFLQEGQRKAGAAVTTETEVIWARALPAGTS |
| | AQRAELIALTQALKMAEGKRLNVYTDSRYAFATAHIHGEIYRRRGLLTSEGREIKNKSEILAL |
| | LKALFLPKRLSIIHCLGHQKGDSAEARGNRLADQAAREAAIKTPPDTSTLL (SEQ ID NO: |
| | 20246) |
| MLVAV_ | TLNLEDEYRLYETSAEPEVSPGSTWLSDFPQAWAETGGMGLAVRQAPLIIPLKATSTPVSIKQ |
| P03356_ | YPMSQEAKLGIKPHIQRLLDQGILVPCQSPWNTPLLPVKKPGTNDYRPVQDLREVNKRVEDIH |
| 3mut | PTVPNPYNLLSGLPPSHRWYTVLDLKDAFFCLRLHPTSQPLFAFEWRDPGMGISGQLTWTRLP |
| | QGFKNSPTLFNEALHRDLADFRIQHPDLILLQYVDDILLAATSELDCQQGTRALLLTLGNLGY |
| | RASAKKAQLCQKQVKYLGYLLKEGQRWLTEARKETVMGQPTPKTPRQLREFLGTAGFCRL |
| | WIPGFAEMAAPLYPLTKPGTLFNWGPDQQKAYQEIKQALLTAPALGLPDLTKPFELFVDEKQ |
| | GYAKGVLTQKLGPWRRPVAYLSKKLDPVAAGWPPCLRMVAAIAVLRKDAGKLTMGQPLVI |
| | LAPHAVEALVKQPPDRWLSNARMTHYQAMLLDTDRVQFGPVVALNPATLLPLPEEGAPHDC |
| | LEILAETHGTRPDLTDQPIPDADHTWYTDGSSFLQEGQRKAGAAVTTETEVIWARALPAGTS |
| | AQRAELIALTQALKMAEGKRLNVYTDSRYAFATAHIHGEIYRRRGWLTSEGREIKNKSEILAL |
| | LKALFLPKRLSIIHCLGHQKGDSAEARGNRLADQAAREAAIKTPPDTSTLL (SEQ ID NO: |
| | 20247) |
| MLVAV_ | TLNLEDEYRLYETSAEPEVSPGSTWLSDFPQAWAETGGMGLAVRQAPLIIPLKATSTPVSIKQ |
| P03356_ | YPMSQEAKLGIKPHIQRLLDQGILVPCQSPWNTPLLPVKKPGTNDYRPVQDLREVNKRVEDIH |
| 3mutA | PTVPNPYNLLSGLPPSHRWYTVLDLKDAFFCLRLHPTSQPLFAFEWRDPGMGISGQLTWTRLP |
| | QGFKNSPTLFNEALHRDLADFRIQHPDLILLQYVDDILLAATSELDCQQGTRALLLTLGNLGY |
| | RASAKKAQLCQKQVKYLGYLLKEGQRWLTEARKETVMGQPTPKTPRQLREFLGKAGFCRLF |
| | IPGFAEMAAPLYPLTKPGTLFNWGPDQQKAYQEIKQALLTAPALGLPDLTKPFELFVDEKQG |
| | YAKGVLTQKLGPWRRPVAYLSKKLDPVAAGWPPCLRMVAAIAVLRKDAGKLTMGQPLVIL |
| | APHAVEALVKQPPDRWLSNARMTHYQAMLLDTDRVQFGPVVALNPATLLPLPEEGAPHDCL |
| | EILAETHGTRPDLTDQPIPDADHTWYTDGSSFLQEGQRKAGAAVTTETEVIWARALPAGTSA |
| | QRAELIALTQALKMAEGKRLNVYTDSRYAFATAHIHGEIYRRRGWLTSEGREIKNKSEILALL |
| | KALFLPKRLSIIHCLGHQKGDSAEARGNRLADQAAREAAIKTPPDTSTLL (SEQ ID NO: 20248) |
| MLVBM_ | TLGIEDEYRLHETSTEPDVSLGSTWLSDFPQAWAETGGMGLAVRQAPLIIPLKATSTPVSIQQY |
| Q7SVK7 | PMSHEARLGIKPHIQRLLDQGILVPCQSPWNTPLLPVKKPGTNDYRPVQDLREVNKRVEDIHP |
| | TVPNPYNLLSGLPPSHQWYTVLDLKDAFFCLRLHPTSQPLFAFEWRDPGMGISGQLTWTRLP |
| | QGFKNSPTLFDEALHRDLADFRIQHPDLILLQYVDDILLAATSELDCQQGTRALLQTLGDLGY |
| | RASAKKAQICQKQVKYLGYLLREGQRWLTEARKETVMGQPVPKTPRQLREFLGTAGFCRLW |
| | IPGFAEMAAPLYPLTKTGTLFSWGPDQQKAYQEIKQALLTAPALGLPDLTKPFELFVDEKQGY |
| | AKGVLTQKLGPWRRPVAYLSKKLDPVAAGWPPCLRMVAAIAVLTKDAGKLTMGQPLVILA |
| | PHAVEALVKQPPDRWLSNARMTHYQAMLLDTDRVQFGPVVALNPATLLPLPEEGAPHDCLE |
| | ILAETHGTRPDLTDQPIPDADHTWYTDGSSFLQEGQRKAGAAVTTETEVIWAGALPAGTSAQ |
| | RAELIALTQALKMAEGKRLNVYTDSRYAFATAHIHGEIYRRRGLLTSEGREIKNKSEILALLK |
| | ALFLPKRLSIIHCLGHQKGDSAEARGNRLADQAAREAAIKTPPDTSTLL (SEQ ID NO: 20249) |
| MLVBM_ | TLGIEDEYRLHETSTEPDVSLGSTWLSDFPQAWAETGGMGLAVRQAPLIIPLKATSTPVSIQQY |
| Q7SVK7 | PMSHEARLGIKPHIQRLLDQGILVPCQSPWNTPLLPVKKPGTNDYRPVQDLREVNKRVEDIHP |
| | TVPNPYNLLSGLPPSHQWYTVLDLKDAFFCLRLHPTSQPLFAFEWRDPGMGISGQLTWTRLP |
| | QGFKNSPTLFDEALHRDLADFRIQHPDLILLQYVDDILLAATSELDCQQGTRALLQTLGDLGY |
| | RASAKKAQICQKQVKYLGYLLREGQRWLTEARKETVMGQPVPKTPRQLREFLGTAGFCRLW |
| | IPGFAEMAAPLYPLTKTGTLFSWGPDQQKAYQEIKQALLTAPALGLPDLTKPFELFVDEKQGY |
| | AKGVLTQKLGPWRRPVAYLSKKLDPVAAGWPPCLRMVAAIAVLTKDAGKLTMGQPLVILA |
| | PHAVEALVKQPPDRWLSNARMTHYQAMLLDTDRVQFGPVVALNPATLLPLPEEGAPHDCLE |
| | ILAETHGTRPDLTDQPIPDADHTWYTDGSSFLQEGQRKAGAAVTTETEVIWAGALPAGTSAQ |
| | RAELIALTQALKMAEGKRLNVYTDSRYAFATAHIHGEIYRRRGLLTSEGREIKNKSEILALLK |
| | ALFLPKRLSIIHCLGHQKGDSAEARGNRLADQAAREAAIKTPPDTSTLL (SEQ ID NO: 20249) |
| MLVBM_ | TLGIEDEYRLHETSTEPDVSLGSTWLSDFPQAWAETGGMGLAVRQAPLIIPLKATSTPVSIQQY |
| Q7SVK7_ | PMSHEARLGIKPHIQRLLDQGILVPCQSPWNTPLLPVKKPGTNDYRPVQDLREVNKRVEDIHP |
| 3mut | TVPNPYNLLSGLPPSHQWYTVLDLKDAFFCLRLHPTSQPLFAFEWRDPGMGISGQLTWTRLP |
| | QGFKNSPTLFNEALHRDLADFRIQHPDLILLQYVDDILLAATSELDCQQGTRALLQTLGDLGY |
| | RASAKKAQICQKQVKYLGYLLREGQRWLTEARKETVMGQPVPKTPRQLREFLGTAGFCRLW |
| | IPGFAEMAAPLYPLTKPGTLFSWGPDQQKAYQEIKQALLTAPALGLPDLTKPFELFVDEKQGY |
| | AKGVLTQKLGPWRRPVAYLSKKLDPVAAGWPPCLRMVAAIAVLTKDAGKLTMGQPLVILA |
| | PHAVEALVKQPPDRWLSNARMTHYQAMLLDTDRVQFGPVVALNPATLLPLPEEGAPHDCLE |
| | ILAETHGTRPDLTDQPIPDADHTWYTDGSSFLQEGQRKAGAAVTTETEVIWAGALPAGTSAQ |
| | RAELIALTQALKMAEGKRLNVYTDSRYAFATAHIHGEIYRRRGWLTSEGREIKNKSEILALLK |
| | ALFLPKRLSIIHCLGHQKGDSAEARGNRLADQAAREAAIKTPPDTSTLL (SEQ ID NO: 20250) |
| MLVBM_ | TLGIEDEYRLHETSTEPDVSLGSTWLSDFPQAWAETGGMGLAVRQAPLIIPLKATSTPVSIQQY |
| Q7SVK7_ | PMSHEARLGIKPHIQRLLDQGILVPCQSPWNTPLLPVKKPGTNDYRPVQDLREVNKRVEDIHP |
| 3mut | TVPNPYNLLSGLPPSHQWYTVLDLKDAFFCLRLHPTSQPLFAFEWRDPGMGISGQLTWTRLP |
| | QGFKNSPTLFNEALHRDLADFRIQHPDLILLQYVDDILLAATSELDCQQGTRALLQTLGDLGY |
| | RASAKKAQICQKQVKYLGYLLREGQRWLTEARKETVMGQPVPKTPRQLREFLGTAGFCRLW |
| | IPGFAEMAAPLYPLTKPGTLFSWGPDQQKAYQEIKQALLTAPALGLPDLTKPFELFVDEKQGY |
| | AKGVLTQKLGPWRRPVAYLSKKLDPVAAGWPPCLRMVAAIAVLTKDAGKLTMGQPLVILA |
| | PHAVEALVKQPPDRWLSNARMTHYQAMLLDTDRVQFGPVVALNPATLLPLPEEGAPHDCLE |
| | ILAETHGTRPDLTDQPIPDADHTWYTDGSSFLQEGQRKAGAAVTTETEVIWAGALPAGTSAQ |
| | RAELIALTQALKMAEGKRLNVYTDSRYAFATAHIHGEIYRRRGWLTSEGREIKNKSEILALLK |
| | ALFLPKRLSIIHCLGHQKGDSAEARGNRLADQAAREAAIKTPPDTSTLL (SEQ ID NO: 20250) |
| MLVBM_ | LGIEDEYRLHETSTEPDVSLGSTWLSDFPQAWAETGGMGLAVRQAPLIIPLKATSTPVSIQQYP |
| Q7SVK7_ | MSHEARLGIKPHIQRLLDQGILVPCQSPWNTPLLPVKKPGTNDYRPVQDLREVNKRVEDIHPT |
| 3mutA_ | VPNPYNLLSGLPPSHQWYTVLDLKDAFFCLRLHPTSQPLFAFEWRDPGMGISGQLTWTRLPQ |
| WS | GFKNSPTLFNEALHRDLADFRIQHPDLILLQYVDDILLAATSELDCQQGTRALLQTLGDLGYR |
| | ASAKKAQICQKQVKYLGYLLREGQRWLTEARKETVMGQPVPKTPRQLREFLGKAGFCRLFIP |
| | GFAEMAAPLYPLTKPGTLFSWGPDQQKAYQEIKQALLTAPALGLPDLTKPFELFVDEKQGYA |
| | KGVLTQKLGPWRRPVAYLSKKLDPVAAGWPPCLRMVAAIAVLTKDAGKLTMGQPLVILAP |
| | HAVEALVKQPPDRWLSNARMTHYQAMLLDTDRVQFGPVVALNPATLLPLPEEGAPHDCLEI |
| | LAETHGTRPDLTDQPIPDADHTWYTDGSSFLQEGQRKAGAAVTTETEVIWAGALPAGTSAQR |
| | AELIALTQALKMAEGKRLNVYTDSRYAFATAHIHGEIYRRRGWLTSEGREIKNKSEILALLKA |
| | LFLPKRLSIIHCLGHQKGDSAEARGNRLADQAAREAAIKTPPDTSTLLI (SEQ ID NO: 20251) |
| MLVBM_ | LGIEDEYRLHETSTEPDVSLGSTWLSDFPQAWAETGGMGLAVRQAPLIIPLKATSTPVSIQQYP |
| Q7SVK7_ | MSHEARLGIKPHIQRLLDQGILVPCQSPWNTPLLPVKKPGTNDYRPVQDLREVNKRVEDIHPT |
| 3mutA_ | VPNPYNLLSGLPPSHQWYTVLDLKDAFFCLRLHPTSQPLFAFEWRDPGMGISGQLTWTRLPQ |
| WS | GFKNSPTLFNEALHRDLADFRIQHPDLILLQYVDDILLAATSELDCQQGTRALLQTLGDLGYR |
| | ASAKKAQICQKQVKYLGYLLREGQRWLTEARKETVMGQPVPKTPRQLREFLGKAGFCRLFIP |
| | GFAEMAAPLYPLTKPGTLFSWGPDQQKAYQEIKQALLTAPALGLPDLTKPFELFVDEKQGYA |
| | KGVLTQKLGPWRRPVAYLSKKLDPVAAGWPPCLRMVAAIAVLTKDAGKLTMGQPLVILAP |
| | HAVEALVKQPPDRWLSNARMTHYQAMLLDTDRVQFGPVVALNPATLLPLPEEGAPHDCLEI |
| | LAETHGTRPDLTDQPIPDADHTWYTDGSSFLQEGQRKAGAAVTTETEVIWAGALPAGTSAQR |
| | AELIALTQALKMAEGKRLNVYTDSRYAFATAHIHGEIYRRRGWLTSEGREIKNKSEILALLKA |
| | LFLPKRLSIIHCLGHQKGDSAEARGNRLADQAAREAAIKTPPDTSTLLI (SEQ ID NO: 20251) |
| MLVCB_ | TLNIEDEYRLHETSKEPDVSLGSTWLSDFPQAWAETGGMGLAVRQAPLIIPLKATSTPVSIKQ |
| P08361 | YPMSQEARLGIKPHIQRLLDQGILVPCQSPWNTPLLPVKKPGTNDYRPVQDLREVNKRVEDIH |
| | PTVPNPYNLLSGLPPSHQWYTVLDLKDAFFCLRLHPTSQPLFAFEWRDPEMGISGQLTWTRLP |
| | QGFKNSPTLFDEALHRDLAGFRIQHPDLILLQYVDDLLLAATSELDCQQGTRALLQTLGDLGY |
| | RASAKKAQICQKQVKYLGYLLKEGQRWLTEARKETVMGQPIPKTPRQLREFLGTAGFCRLWI |
| | PGFAEMAAPLYPLTKTGTLFNWGPDQQKAFQEIKQALLTAPALGLPDLTKPFELFVDEKQGY |
| | AKGVLTQKLGPWRRPVAYLSKKLDPVAAGWPPCLRMVAAIAVLTKDAGKLTMGQPLVILA |
| | PHAVEALVKQPPDRWLSNARMTHYQALLLDTDRVQFGPVVALNPATLLPLPEEGLQHDCLD |
| | ILAEAHGTRSDLMDQPLPDADHTWYTDGSSFLQEGQRKAGAAVTTETEVIWARALPAGTSA |
| | QRAELIALTQALKMAEGKKLNVYTDSRYAFATAHIHGEIYRRRGLLTSEGKEIKNKDEILALL |
| | KALFLPKRLSIIHCPGHQKGNSAEARGNRMADQAAREVATRETPETSTLL (SEQ ID NO: |
| | 20252) |
| MLVCB_ | TLNIEDEYRLHETSKEPDVSLGSTWLSDFPQAWAETGGMGLAVRQAPLIIPLKATSTPVSIKQ |
| P08361_ | YPMSQEARLGIKPHIQRLLDQGILVPCQSPWNTPLLPVKKPGTNDYRPVQDLREVNKRVEDIH |
| 3mut | PTVPNPYNLLSGLPPSHQWYTVLDLKDAFFCLRLHPTSQPLFAFEWRDPEMGISGQLTWTRLP |
| | QGFKNSPTLFNEALHRDLAGFRIQHPDLILLQYVDDLLLAATSELDCQQGTRALLQTLGDLGY |
| | RASAKKAQICQKQVKYLGYLLKEGQRWLTEARKETVMGQPIPKTPRQLREFLGTAGFCRLWI |
| | PGFAEMAAPLYPLTKPGTLFNWGPDQQKAFQEIKQALLTAPALGLPDLTKPFELFVDEKQGY |
| | AKGVLTQKLGPWRRPVAYLSKKLDPVAAGWPPCLRMVAAIAVLTKDAGKLTMGQPLVILA |
| | PHAVEALVKQPPDRWLSNARMTHYQALLLDTDRVQFGPVVALNPATLLPLPEEGLQHDCLD |
| | ILAEAHGTRSDLMDQPLPDADHTWYTDGSSFLQEGQRKAGAAVTTETEVIWARALPAGTSA |
| | QRAELIALTQALKMAEGKKLNVYTDSRYAFATAHIHGEIYRRRGWLTSEGKEIKNKDEILAL |
| | LKALFLPKRLSIIHCPGHQKGNSAEARGNRMADQAAREVATRETPETSTLL (SEQ ID NO: |
| | 20253) |
| MLVCB_ | TLNIEDEYRLHETSKEPDVSLGSTWLSDFPQAWAETGGMGLAVRQAPLIIPLKATSTPVSIKQ |
| P08361_ | YPMSQEARLGIKPHIQRLLDQGILVPCQSPWNTPLLPVKKPGTNDYRPVQDLREVNKRVEDIH |
| 3mutA | PTVPNPYNLLSGLPPSHQWYTVLDLKDAFFCLRLHPTSQPLFAFEWRDPEMGISGQLTWTRLP |
| | QGFKNSPTLFNEALHRDLAGFRIQHPDLILLQYVDDLLLAATSELDCQQGTRALLQTLGDLGY |
| | RASAKKAQICQKQVKYLGYLLKEGQRWLTEARKETVMGQPIPKTPRQLREFLGKAGFCRLFI |
| | PGFAEMAAPLYPLTKPGTLFNWGPDQQKAFQEIKQALLTAPALGLPDLTKPFELFVDEKQGY |
| | AKGVLTQKLGPWRRPVAYLSKKLDPVAAGWPPCLRMVAAIAVLTKDAGKLTMGQPLVILA |
| | PHAVEALVKQPPDRWLSNARMTHYQALLLDTDRVQFGPVVALNPATLLPLPEEGLQHDCLD |
| | ILAEAHGTRSDLMDQPLPDADHTWYTDGSSFLQEGQRKAGAAVTTETEVIWARALPAGTSA |
| | QRAELIALTQALKMAEGKKLNVYTDSRYAFATAHIHGEIYRRRGWLTSEGKEIKNKDEILAL |
| | LKALFLPKRLSIIHCPGHQKGNSAEARGNRMADQAAREVATRETPETSTLL (SEQ ID NO: |
| | 20254) |
| MLVF5_ | TLNIEDEYRLHETSKGPDVPLGSTWLSDFPQAWAETGGMGLAFRQAPLIISLKATSTPVSIKQY |
| P26810 | PMSQEARLGIKPHIQRLLDQGILVPCQSPWNTPLLPVKKPGTNDYRPVQDLREVNKRVEDIHP |
| | TVPNPYNLLSGLPPSHQWYTVLDLKDAFFCLRLHPTSQSLFAFEWKDPEMGISGQLTWTRLP |
| | QGFKNSPTLFDEALHRDLADFRIQHPDLILLQYVDDLLLAATSELDCQQGTRALLQTLGDLGY |
| | RASAKKAQICQKQVKYLGYLLKEGQRWLTEARKETVMGQPTPKTPRQLREFLGTAGLCRLW |
| | IPGFAEMAAPLYPLTKTGTLFKWGPDQQKAYQEIKQALLTAPALGLPDLTKPFELFVDEKQG |
| | YAKGVLTQKLGPWRRPVAYLSKKLDPVAAGWPPCLRMVAAIAVLTKDVGKLTMGQPLVIL |
| | APHAVEALVKQPPDRWLSNARMTHYQALLLDTDRVQFGPIVALNPATLLPLPEEGLQHDCL |
| | DILAEAHGTRPDLTDQPLPDADHTWYTDGSSFLQEGQRRAGAAVTTETEVIWAKALPAGTSA |
| | QRAELIALTQALKMAAGKKLNVYTDSRYAFATAHIHGEIYRRRGLLTSEGKEIKNKDEILALL |
| | KALFLPKRLSIIHCPGHQKGNHAEARGNRMADQAAREVATRETPETSTLL (SEQ ID NO: |
| | 20255) |
| MLVF5_ | TLNIEDEYRLHETSKGPDVPLGSTWLSDFPQAWAETGGMGLAFRQAPLIISLKATSTPVSIKQY |
| P26810_ | PMSQEARLGIKPHIQRLLDQGILVPCQSPWNTPLLPVKKPGTNDYRPVQDLREVNKRVEDIHP |
| 3mut | TVPNPYNLLSGLPPSHQWYTVLDLKDAFFCLRLHPTSQSLFAFEWKDPEMGISGQLTWTRLP |
| | QGFKNSPTLFNEALHRDLADFRIQHPDLILLQYVDDLLLAATSELDCQQGTRALLQTLGDLGY |
| | RASAKKAQICQKQVKYLGYLLKEGQRWLTEARKETVMGQPTPKTPRQLREFLGTAGLCRLW |
| | IPGFAEMAAPLYPLTKPGTLFKWGPDQQKAYQEIKQALLTAPALGLPDLTKPFELFVDEKQG |
| | YAKGVLTQKLGPWRRPVAYLSKKLDPVAAGWPPCLRMVAAIAVLTKDVGKLTMGQPLVIL |
| | APHAVEALVKQPPDRWLSNARMTHYQALLLDTDRVQFGPIVALNPATLLPLPEEGLQHDCL |
| | DILAEAHGTRPDLTDQPLPDADHTWYTDGSSFLQEGQRRAGAAVTTETEVIWAKALPAGTSA |
| | QRAELIALTQALKMAAGKKLNVYTDSRYAFATAHIHGEIYRRRGWLTSEGKEIKNKDEILAL |
| | LKALFLPKRLSIIHCPGHQKGNHAEARGNRMADQAAREVATRETPETSTLL (SEQ ID NO: |
| | 20256) |
| MLVF5_ | TLNIEDEYRLHETSKGPDVPLGSTWLSDFPQAWAETGGMGLAFRQAPLIISLKATSTPVSIKQY |
| P26810_ | PMSQEARLGIKPHIQRLLDQGILVPCQSPWNTPLLPVKKPGTNDYRPVQDLREVNKRVEDIHP |
| 3mutA | TVPNPYNLLSGLPPSHQWYTVLDLKDAFFCLRLHPTSQSLFAFEWKDPEMGISGQLTWTRLP |
| | QGFKNSPTLFNEALHRDLADFRIQHPDLILLQYVDDLLLAATSELDCQQGTRALLQTLGDLGY |
| | RASAKKAQICQKQVKYLGYLLKEGQRWLTEARKETVMGQPTPKTPRQLREFLGKAGLCRLF |
| | IPGFAEMAAPLYPLTKPGTLFKWGPDQQKAYQEIKQALLTAPALGLPDLTKPFELFVDEKQG |
| | YAKGVLTQKLGPWRRPVAYLSKKLDPVAAGWPPCLRMVAAIAVLTKDVGKLTMGQPLVIL |
| | APHAVEALVKQPPDRWLSNARMTHYQALLLDTDRVQFGPIVALNPATLLPLPEEGLQHDCL |
| | DILAEAHGTRPDLTDQPLPDADHTWYTDGSSFLQEGQRRAGAAVTTETEVIWAKALPAGTSA |
| | QRAELIALTQALKMAAGKKLNVYTDSRYAFATAHIHGEIYRRRGWLTSEGKEIKNKDEILAL |
| | LKALFLPKRLSIIHCPGHQKGNHAEARGNRMADQAAREVATRETPETSTLL (SEQ ID NO: |
| | 20257) |
| MLVFF_ | TLNIEDEYRLHETSKGPDVPLGSTWLSDFPQAWAETGGMGLAVRQAPLIIPLKATSTPVSIKQ |
| P26809_ | YPMSQEARLGIKPHIQRLLDQGILVPCQSPWNTPLLPVKKPGTNDYRPVQDLREVNKRVEDIH |
| 3mut | PTVPNPYNLLSGLPPSHQWYTVLDLKDAFFCLRLHPTSQSLFAFEWRDPEMGISGQLTWTRLP |
| | QGFKNSPTLFNEALHRDLADFRIQHPDLILLQYVDDLLLAATSELDCQQGTRALLQTLGDLGY |
| | RASAKKAQICQKQVKYLGYLLKEGQRWLTEARKETVMGQPTPKTPRQLREFLGTAGFCRLW |
| | IPGFAEMAAPLYPLTKPGTLFEWGPDQQKAYQEIKQALLTAPALGLPDLTKPFELFVDEKQGY |
| | AKGVLTQKLGPWRRPVAYLSKKLDPVAAGWPPCLRMVAAIAVLTKDAGKLTMGQPLVILA |
| | PHAVEALVKQPPDRWLSNARMTHYQALLLDTDRVQFGPIVALNPATLLPLPEEGLQHDCLDI |
| | LAEAHGTRPDLTDQPLPDADHTWYTDGSSFLQEGQRKAGAAVTTETEVVWAKALPAGTSA |
| | QRAELIALTQALKMAEGKKLNVYTDSRYAFATAHIHGEIYRRRGWLTSEGKEIKNKDEILAL |
| | LKALFLPKRLSIIHCPGHQKGNRAEARGNRMADQAAREVATRETPETSTLL (SEQ ID NO: |
| | 20258) |
| MLVFF_ | TLNIEDEYRLHETSKGPDVPLGSTWLSDFPQAWAETGGMGLAVRQAPLIIPLKATSTPVSIKQ |
| P26809_ | YPMSQEARLGIKPHIQRLLDQGILVPCQSPWNTPLLPVKKPGTNDYRPVQDLREVNKRVEDIH |
| 3mutA | PTVPNPYNLLSGLPPSHQWYTVLDLKDAFFCLRLHPTSQSLFAFEWRDPEMGISGQLTWTRLP |
| | QGFKNSPTLFNEALHRDLADFRIQHPDLILLQYVDDLLLAATSELDCQQGTRALLQTLGDLGY |
| | RASAKKAQICQKQVKYLGYLLKEGQRWLTEARKETVMGQPTPKTPRQLREFLGKAGFCRLFI |
| | PGFAEMAAPLYPLTKPGTLFEWGPDQQKAYQEIKQALLTAPALGLPDLTKPFELFVDEKQGY |
| | AKGVLTQKLGPWRRPVAYLSKKLDPVAAGWPPCLRMVAAIAVLTKDAGKLTMGQPLVILA |
| | PHAVEALVKQPPDRWLSNARMTHYQALLLDTDRVQFGPIVALNPATLLPLPEEGLQHDCLDI |
| | LAEAHGTRPDLTDQPLPDADHTWYTDGSSFLQEGQRKAGAAVTTETEVVWAKALPAGTSA |
| | QRAELIALTQALKMAEGKKLNVYTDSRYAFATAHIHGEIYRRRGWLTSEGKEIKNKDEILAL |
| | LKALFLPKRLSIIHCPGHQKGNRAEARGNRMADQAAREVATRETPETSTLL (SEQ ID NO: |
| | 20259) |
| MLVMS_ | TLNIEDEHRLHETSKEPDVSLGSTWLSDFPQAWAETGGMGLAVRQAPLIIPLKATSTPVSIKQ |
| P03355 | YPMSQEARLGIKPHIQRLLDQGILVPCQSPWNTPLLPVKKPGTNDYRPVQDLREVNKRVEDIH |
| | PTVPNPYNLLSGLPPSHQWYTVLDLKDAFFCLRLHPTSQPLFAFEWRDPEMGISGQLTWTRLP |
| | QGFKNSPTLFDEALHRDLADFRIQHPDLILLQYVDDLLLAATSELDCQQGTRALLQTLGNLGY |
| | RASAKKAQICQKQVKYLGYLLKEGQRWLTEARKETVMGQPTPKTPRQLREFLGTAGFCRLW |
| | IPGFAEMAAPLYPLTKTGTLFNWGPDQQKAYQEIKQALLTAPALGLPDLTKPFELFVDEKQG |
| | YAKGVLTQKLGPWRRPVAYLSKKLDPVAAGWPPCLRMVAAIAVLTKDAGKLTMGQPLVIL |
| | APHAVEALVKQPPDRWLSNARMTHYQALLLDTDRVQFGPVVALNPATLLPLPEEGLQHNCL |
| | DILAEAHGTRPDLTDQPLPDADHTWYTDGSSLLQEGQRKAGAAVTTETEVIWAKALPAGTS |
| | AQRAELIALTQALKMAEGKKLNVYTDSRYAFATAHIHGEIYRRRGLLTSEGKEIKNKDEILAL |
| | LKALFLPKRLSIIHCPGHQKGHSAEARGNRMADQAARKAAITETPDTSTLL (SEQ ID NO: |
| | 20260) |
| MLVMS_ | TLNIEDEHRLHETSKEPDVSLGSTWLSDFPQAWAETGGMGLAVRQAPLIIPLKATSTPVSIKQ |
| P03355 | YPMSQEARLGIKPHIQRLLDQGILVPCQSPWNTPLLPVKKPGTNDYRPVQDLREVNKRVEDIH |
| | PTVPNPYNLLSGLPPSHQWYTVLDLKDAFFCLRLHPTSQPLFAFEWRDPEMGISGQLTWTRLP |
| | QGFKNSPTLFDEALHRDLADFRIQHPDLILLQYVDDLLLAATSELDCQQGTRALLQTLGNLGY |
| | RASAKKAQICQKQVKYLGYLLKEGQRWLTEARKETVMGQPTPKTPRQLREFLGTAGFCRLW |
| | IPGFAEMAAPLYPLTKTGTLFNWGPDQQKAYQEIKQALLTAPALGLPDLTKPFELFVDEKQG |
| | YAKGVLTQKLGPWRRPVAYLSKKLDPVAAGWPPCLRMVAAIAVLTKDAGKLTMGQPLVIL |
| | APHAVEALVKQPPDRWLSNARMTHYQALLLDTDRVQFGPVVALNPATLLPLPEEGLQHNCL |
| | DILAEAHGTRPDLTDQPLPDADHTWYTDGSSLLQEGQRKAGAAVTTETEVIWAKALPAGTS |
| | AQRAELIALTQALKMAEGKKLNVYTDSRYAFATAHIHGEIYRRRGLLTSEGKEIKNKDEILAL |
| | LKALFLPKRLSIIHCPGHQKGHSAEARGNRMADQAARKAAITETPDTSTLL (SEQ ID NO: |
| | 20260) |
| MLVMS_ | TLNIEDEHRLHETSKEPDVSLGSTWLSDFPQAWAETGGMGLAVRQAPLIIPLKATSTPVSIKQ |
| P03355_ | YPMSQEARLGIKPHIQRLLDQGILVPCQSPWNTPLLPVKKPGTNDYRPVQDLREVNKRVEDIH |
| 3mut | PTVPNPYNLLSGLPPSHQWYTVLDLKDAFFCLRLHPTSQPLFAFEWRDPEMGISGQLTWTRLP |
| | QGFKNSPTLFNEALHRDLADFRIQHPDLILLQYVDDLLLAATSELDCQQGTRALLQTLGNLGY |
| | RASAKKAQICQKQVKYLGYLLKEGQRWLTEARKETVMGQPTPKTPRQLREFLGTAGFCRLW |
| | IPGFAEMAAPLYPLTKPGTLFNWGPDQQKAYQEIKQALLTAPALGLPDLTKPFELFVDEKQG |
| | YAKGVLTQKLGPWRRPVAYLSKKLDPVAAGWPPCLRMVAAIAVLTKDAGKLTMGQPLVIL |
| | APHAVEALVKQPPDRWLSNARMTHYQALLLDTDRVQFGPVVALNPATLLPLPEEGLQHNCL |
| | DILAEAHGTRPDLTDQPLPDADHTWYTDGSSLLQEGQRKAGAAVTTETEVIWAKALPAGTS |
| | AQRAELIALTQALKMAEGKKLNVYTDSRYAFATAHIHGEIYRRRGWLTSEGKEIKNKDEILA |
| | LLKALFLPKRLSIIHCPGHQKGHSAEARGNRMADQAARKAAITETPDTSTLL (SEQ ID NO: |
| | 20261) |
| MLVMS_ | TLNIEDEHRLHETSKEPDVSLGSTWLSDFPQAWAETGGMGLAVRQAPLIIPLKATSTPVSIKQ |
| P03355_ | YPMSQEARLGIKPHIQRLLDQGILVPCQSPWNTPLLPVKKPGTNDYRPVQDLREVNKRVEDIH |
| 3mut | PTVPNPYNLLSGLPPSHQWYTVLDLKDAFFCLRLHPTSQPLFAFEWRDPEMGISGQLTWTRLP |
| | QGFKNSPTLFNEALHRDLADFRIQHPDLILLQYVDDLLLAATSELDCQQGTRALLQTLGNLGY |
| | RASAKKAQICQKQVKYLGYLLKEGQRWLTEARKETVMGQPTPKTPRQLREFLGTAGFCRLW |
| | IPGFAEMAAPLYPLTKPGTLFNWGPDQQKAYQEIKQALLTAPALGLPDLTKPFELFVDEKQG |
| | YAKGVLTQKLGPWRRPVAYLSKKLDPVAAGWPPCLRMVAAIAVLTKDAGKLTMGQPLVIL |
| | APHAVEALVKQPPDRWLSNARMTHYQALLLDTDRVQFGPVVALNPATLLPLPEEGLQHNCL |
| | DILAEAHGTRPDLTDQPLPDADHTWYTDGSSLLQEGQRKAGAAVTTETEVIWAKALPAGTS |
| | AQRAELIALTQALKMAEGKKLNVYTDSRYAFATAHIHGEIYRRRGWLTSEGKEIKNKDEILA |
| | LLKALFLPKRLSIIHCPGHQKGHSAEARGNRMADQAARKAAITETPDTSTLL (SEQ ID NO: |
| | 20261) |
| MLVMS_ | TLNIEDEHRLHETSKEPDVSLGSTWLSDFPQAWAETGGMGLAVRQAPLIIPLKATSTPVSIKQ |
| P03355_ | YPMSQEARLGIKPHIQRLLDQGILVPCQSPWNTPLLPVKKPGTNDYRPVQDLREVNKRVEDIH |
| 3mutA_ | PTVPNPYNLLSGLPPSHQWYTVLDLKDAFFCLRLHPTSQPLFAFEWRDPEMGISGQLTWTRLP |
| WS | QGFKNSPTLFNEALHRDLADFRIQHPDLILLQYVDDLLLAATSELDCQQGTRALLQTLGNLGY |
| | RASAKKAQICQKQVKYLGYLLKEGQRWLTEARKETVMGQPTPKTPRQLREFLGKAGFCRLFI |
| | PGFAEMAAPLYPLTKPGTLFNWGPDQQKAYQEIKQALLTAPALGLPDLTKPFELFVDEKQGY |
| | AKGVLTQKLGPWRRPVAYLSKKLDPVAAGWPPCLRMVAAIAVLTKDAGKLTMGQPLVILA |
| | PHAVEALVKQPPDRWLSNARMTHYQALLLDTDRVQFGPVVALNPATLLPLPEEGLQHNCLD |
| | ILAEAHGTRPDLTDQPLPDADHTWYTDGSSLLQEGQRKAGAAVTTETEVIWAKALPAGTSA |
| | QRAELIALTQALKMAEGKKLNVYTDSRYAFATAHIHGEIYRRRGWLTSEGKEIKNKDEILAL |
| | LKALFLPKRLSIIHCPGHQKGHSAEARGNRMADQAARKAAITETPDTSTLL (SEQ ID NO: |
| | 20262) |
| MLVMS_ | TLNIEDEHRLHETSKEPDVSLGSTWLSDFPQAWAETGGMGLAVRQAPLIIPLKATSTPVSIKQ |
| P03355_ | YPMSQEARLGIKPHIQRLLDQGILVPCQSPWNTPLLPVKKPGTNDYRPVQDLREVNKRVEDIH |
| 3mutA_ | PTVPNPYNLLSGLPPSHQWYTVLDLKDAFFCLRLHPTSQPLFAFEWRDPEMGISGQLTWTRLP |
| WS | QGFKNSPTLFNEALHRDLADFRIQHPDLILLQYVDDLLLAATSELDCQQGTRALLQTLGNLGY |
| | RASAKKAQICQKQVKYLGYLLKEGQRWLTEARKETVMGQPTPKTPRQLREFLGKAGFCRLFI |
| | PGFAEMAAPLYPLTKPGTLFNWGPDQQKAYQEIKQALLTAPALGLPDLTKPFELFVDEKQGY |
| | AKGVLTQKLGPWRRPVAYLSKKLDPVAAGWPPCLRMVAAIAVLTKDAGKLTMGQPLVILA |
| | PHAVEALVKQPPDRWLSNARMTHYQALLLDTDRVQFGPVVALNPATLLPLPEEGLQHNCLD |
| | ILAEAHGTRPDLTDQPLPDADHTWYTDGSSLLQEGQRKAGAAVTTETEVIWAKALPAGTSA |
| | QRAELIALTQALKMAEGKKLNVYTDSRYAFATAHIHGEIYRRRGWLTSEGKEIKNKDEILAL |
| | LKALFLPKRLSIIHCPGHQKGHSAEARGNRMADQAARKAAITETPDTSTLL (SEQ ID NO: |
| | 20262) |
| MLVMS_ | TLNIEDEYRLHETSKEPDVSLGSTWLSDFPQAWAETGGMGLAVRQAPLIIPLKATSTPVSIKQ |
| P03355_ | YPMSQEARLGIKPHIQRLLDQGILVPCQSPWNTPLLPVKKPGTNDYRPVQDLREVNKRVEDIH |
| PLV919 | PTVPNPYNLLSGLPPSHQWYTVLDLKDAFFCLRLHPTSQPLFAFEWRDPEMGISGQLTWTRLP |
| | QGFKNSPTLFNEALHRDLADFRIQHPDLILLQYVDDLLLAATSELDCQQGTRALLQTLGNLGY |
| | RASAKKAQICQKQVKYLGYLLKEGQRWLTEARKETVMGQPTPKTPRQLREFLGKAGFCRLFI |
| | PGFAEMAAPLYPLTKPGTLFNWGPDQQKAYQEIKQALLTAPALGLPDLTKPFELFVDEKQGY |
| | AKGVLTQKLGPWRRPVAYLSKKLDPVAAGWPPCLRMVAAIAVLTKDAGKLTMGQPLVILA |
| | PHAVEALVKQPPDRWLSNARMTHYQALLLDTDRVQFGPVVALNPATLLPLPEEGLQHNCLD |
| | ILAEAHGTRPDLTDQPLPDADHTWYTDGSSLLQEGQRKAGAAVTTETEVIWAKALPAGTSA |
| | QRAELIALTQALKMAEGKKLNVYTDSRYAFATAHIHGEIYRRRGWLTSEGKEIKNKDEILAL |
| | LKALFLPKRLSIIHCPGHQKGHSAEARGNRMADQAARKAAITETPDTSTLLIENSSPSGGSKRT |
| | ADGSEFE (SEQ ID NO: 20263) |
| MLVMS_ | TLNIEDEYRLHETSKEPDVSLGSTWLSDFPQAWAETGGMGLAVRQAPLIIPLKATSTPVSIKQ |
| P03355_ | YPMSQEARLGIKPHIQRLLDQGILVPCQSPWNTPLLPVKKPGTNDYRPVQDLREVNKRVEDIH |
| PLV919 | PTVPNPYNLLSGLPPSHQWYTVLDLKDAFFCLRLHPTSQPLFAFEWRDPEMGISGQLTWTRLP |
| | QGFKNSPTLFNEALHRDLADFRIQHPDLILLQYVDDLLLAATSELDCQQGTRALLQTLGNLGY |
| | RASAKKAQICQKQVKYLGYLLKEGQRWLTEARKETVMGQPTPKTPRQLREFLGKAGFCRLFI |
| | PGFAEMAAPLYPLTKPGTLFNWGPDQQKAYQEIKQALLTAPALGLPDLTKPFELFVDEKQGY |
| | AKGVLTQKLGPWRRPVAYLSKKLDPVAAGWPPCLRMVAAIAVLTKDAGKLTMGQPLVILA |
| | PHAVEALVKQPPDRWLSNARMTHYQALLLDTDRVQFGPVVALNPATLLPLPEEGLQHNCLD |
| | ILAEAHGTRPDLTDQPLPDADHTWYTDGSSLLQEGQRKAGAAVTTETEVIWAKALPAGTSA |
| | QRAELIALTQALKMAEGKKLNVYTDSRYAFATAHIHGEIYRRRGWLTSEGKEIKNKDEILAL |
| | LKALFLPKRLSIIHCPGHQKGHSAEARGNRMADQAARKAAITETPDTSTLLIENSSPSGGSKRT |
| | ADGSEFE (SEQ ID NO: 20263) |
| MLVRD_ | TLNIEDEYRLHEISTEPDVSPGSTWLSDFPQAWAETGGMGLAVRQAPLIIPLKATSTPVSIKQY |
| P11227 | PMSQEAKLGIKPHIQRLLDQGILVPCQSPWNTPLLPVKKPGTNDYRPVQGLREVNKRVEDIHP |
| | TVPNPYNLLSGLPTSHRWYTVLDLKDAFFCLRLHPTSQPLFASEWRDPGMGISGQLTWTRLP |
| | QGFKNSPTLFDEALHRGLADFRIQHPDLILLQYVDDLLLAATSELDCQQGTRALLKTLGNLGY |
| | RASAKKAQICQKQVKYLGYLLREGQRWLTEARKETVMGQPTPKTPRQLREFLGTAGFCRLW |
| | IPRFAEMAAPLYPLTKTGTLFNWGPDQQKAYHEIKQALLTAPALGLPDLTKPFELFVDEKQG |
| | YAKGVLTQKLGPWRRPVAYLSKKLDPVAAGWPPCLRMVAAIAVLTKDAGKLTMGQPLVIL |
| | APHAVEALVKQPPDRWLSNARMTHYQAMLLDTDRVQFGPVVALNPATLLPLPEEGAPHDCL |
| | EILAETHGTEPDLTDQPIPDADHTWYTDGSSFLQEGQRKAGAAVTTETEVIWARALPAGTSA |
| | QRAELIALTQALKMAEGKRLNVYTDSRYAFATAHIHGEIYKRRGLLTSEGREIKNKSEILALL |
| | KALFLPKRLSIIHCLGHQKGDSAEARGNRLADQAAREAAIKTPPDTSTLL (SEQ ID NO: 20264) |
| MLVRD_ | TLNIEDEYRLHEISTEPDVSPGSTWLSDFPQAWAETGGMGLAVRQAPLIIPLKATSTPVSIKQY |
| P11227_ | PMSQEAKLGIKPHIQRLLDQGILVPCQSPWNTPLLPVKKPGTNDYRPVQGLREVNKRVEDIHP |
| 3mut | TVPNPYNLLSGLPTSHRWYTVLDLKDAFFCLRLHPTSQPLFASEWRDPGMGISGQLTWTRLP |
| | QGFKNSPTLFNEALHRGLADFRIQHPDLILLQYVDDLLLAATSELDCQQGTRALLKTLGNLGY |
| | RASAKKAQICQKQVKYLGYLLREGQRWLTEARKETVMGQPTPKTPRQLREFLGTAGFCRLW |
| | IPRFAEMAAPLYPLTKPGTLFNWGPDQQKAYHEIKQALLTAPALGLPDLTKPFELFVDEKQG |
| | YAKGVLTQKLGPWRRPVAYLSKKLDPVAAGWPPCLRMVAAIAVLTKDAGKLTMGQPLVIL |
| | APHAVEALVKQPPDRWLSNARMTHYQAMLLDTDRVQFGPVVALNPATLLPLPEEGAPHDCL |
| | EILAETHGTEPDLTDQPIPDADHTWYTDGSSFLQEGQRKAGAAVTTETEVIWARALPAGTSA |
| | QRAELIALTQALKMAEGKRLNVYTDSRYAFATAHIHGEIYKRRGWLTSEGREIKNKSEILALL |
| | KALFLPKRLSIIHCLGHQKGDSAEARGNRLADQAAREAAIKTPPDTSTLL (SEQ ID NO: 20265) |
| MMTVB_ | WVQEISDSRPMLHIYLNGRRFLGLLNTGADKTCIAGRDWPANWPIHQTESSLQGLGMACGV |
| P03365 | ARSSQPLRWQHEDKSGIIHPFVIPTLPFTLWGRDIMKDIKVRLMTDSPDDSQDLMIGAIESNLF |
| | ADQISWKSDQPVWLNQWPLKQEKLQALQQLVTEQLQLGHLEESNSPWNTPVFVIKKKSGK |
| | WRLLQDLRAVNATMHDMGALQPGLPSPVAVPKGWEIIIIDLQDCFFNIKLHPEDCKRFAFSVP |
| | SPNFKRPYQRFQWKVLPQGMKNSPTLCQKFVDKAILTVRDKYQDSYIVHYMDDILLAHPSRS |
| | IVDEILTSMIQALNKHGLVVSTEKIQKYDNLKYLGTHIQGDSVSYQKLQIRTDKLRTLNDFQK |
| | LLGNINWIRPFLKLTTGELKPLFEILNGDSNPISTRKLTPEACKALQLMNERLSTARVKRLDLS |
| | QPWSLCILKTEYTPTACLWQDGVVEWIHLPHISPKVITPYDIFCTQLIIKGRHRSKELFSKDPDY |
| | IVVPYTKVQFDLLLQEKEDWPISLLGFLGEVHFHLPKDPLLTFTLQTAIIFPHMTSTTPLEKGIVI |
| | FTDGSANGRSVTYIQGREPIIKENTQNTAQQAEIVAVITAFEEVSQPFNLYTDSKYVTGLFPEIE |
| | TATLSPRTKIYTELKHLQRLIHKRQEKFYIGHIRGHTGLPGPLAQGNAYADSLTRILT (SEQ ID |
| | NO: 20266) |
| MMTVB_ | WVQEISDSRPMLHIYLNGRRFLGLLNTGADKTCIAGRDWPANWPIHQTESSLQGLGMACGV |
| P03365 | ARSSQPLRWQHEDKSGIIHPFVIPTLPFTLWGRDIMKDIKVRLMTDSPDDSQDLMIGAIESNLF |
| | ADQISWKSDQPVWLNQWPLKQEKLQALQQLVTEQLQLGHLEESNSPWNTPVFVIKKKSGK |
| | WRLLQDLRAVNATMHDMGALQPGLPSPVAVPKGWEIIIIDLQDCFFNIKLHPEDCKRFAFSVP |
| | SPNFKRPYQRFQWKVLPQGMKNSPTLCQKFVDKAILTVRDKYQDSYIVHYMDDILLAHPSRS |
| | IVDEILTSMIQALNKHGLVVSTEKIQKYDNLKYLGTHIQGDSVSYQKLQIRTDKLRTLNDFQK |
| | LLGNINWIRPFLKLTTGELKPLFEILNGDSNPISTRKLTPEACKALQLMNERLSTARVKRLDLS |
| | QPWSLCILKTEYTPTACLWQDGVVEWIHLPHISPKVITPYDIFCTQLIIKGRHRSKELFSKDPDY |
| | IVVPYTKVQFDLLLQEKEDWPISLLGFLGEVHFHLPKDPLLTFTLQTAIIFPHMTSTTPLEKGIVI |
| | FTDGSANGRSVTYIQGREPIIKENTQNTAQQAEIVAVITAFEEVSQPFNLYTDSKYVTGLFPEIE |
| | TATLSPRTKIYTELKHLQRLIHKRQEKFYIGHIRGHTGLPGPLAQGNAYADSLTRILT (SEQ ID |
| | NO: 20266) |
| MMTVB_ | WVQEISDSRPMLHIYLNGRRFLGLLNTGADKTCIAGRDWPANWPIHQTESSLQGLGMACGV |
| P03365_ | ARSSQPLRWQHEDKSGIIHPFVIPTLPFTLWGRDIMKDIKVRLMTDSPDDSQDLMIGAIESNLF |
| 2mut | ADQISWKSDQPVWLNQWPLKQEKLQALQQLVTEQLQLGHLEESNSPWNTPVFVIKKKSGK |
| | WRLLQDLRAVNATMHDMGALQPGLPSPVAVPKGWEIIIIDLQDCFFNIKLHPEDCKRFAFSVP |
| | SPNFKRPYQRFQWKVLPQGMKNSPTLCQKFVDKAILTVRDKYQDSYIVHYMDDILLAHPSRS |
| | IVDEILTSMIQALNKHGLVVSTEKIQKYDNLKYLGTHIQGDSVSYQKLQIRTDKLRTLNDFQK |
| | LLGNINWIRPFLKLTTGELKPLFEILNPDSNPISTRKLTPEACKALQLMNERLSTARVKRLDLS |
| | QPWSLCILKTEYTPTACLWQDGVVEWIHLPHISPKVITPYDIFCTQLIIKGRHRSKELFSKDPDY |
| | IVVPYTKVQFDLLLQEKEDWPISLLGFLGEVHFHLPKDPLLTFTLQTAIIFPHMTSTTPLEKGIVI |
| | FTDGSANGRSVTYIQGREPIIKENTQNTAQQAEIVAVITAFEEVSQPFNLYTDSKYVTGLFPEIE |
| | TATLSPRTKIYTELKHLQRLIHKRQEKFYIGHIRGHTGLPGPLAQGNAYADSLTRILT (SEQ ID |
| | NO: 20267) |
| MMTVB_ | VQEISDSRPMLHIYLNGRRFLGLLDTGADKTCIAGRDWPANWPIHQTESSLQGLGMACGVAR |
| P03365_ | SSQPLRWQHEDKSGIIHPFVIPTLPFTLWGRDIMKDIKVRLMTDSPDDSQDLMIGAIESNLFAD |
| 2mut_ | QISWKSDQPVWLNQWPLKQEKLQALQQLVTEQLQLGHLEESNSPWNTPVFVIKKKSGKWRL |
| WS | LQDLRAVNATMHDMGALQPGLPSPVAVPKGWEIIIIDLQDCFFNIKLHPEDCKRFAFSVPSPNF |
| | KRPYQRFQWKVLPQGMKNSPTLCQKFVDKAILTVRDKYQDSYIVHYMDDILLAHPSRSIVDE |
| | ILTSMIQALNKHGLVVSTEKIQKYDNLKYLGTHIQGDSVSYQKLQIRTDKLRTLNDFQKLLGN |
| | INWIRPFLKLTTGELKPLFEILNPDSNPISTRKLTPEACKALQLMNERLSTARVKRLDLSQPWS |
| | LCILKTEYTPTACLWQDGVVEWIHLPHISPKVITPYDIFCTQLIIKGRHRSKELFSKDPDYIVVP |
| | YTKVQFDLLLQEKEDWPISLLGFLGEVHFHLPKDPLLTFTLQTAIIFPHMTSTTPLEKGIVIFTD |
| | GSANGRSVTYIQGREPIIKENTQNTAQQAEIVAVITAFEEVSQPFNLYTDSKYVTGLFPEIETAT |
| | LSPRTKIYTELKHLQRLIHKRQEKFYIGHIRGHTGLPGPLAQGNAYADSLTRILTA (SEQ ID |
| | NO: 20268) |
| MMTVB_ | VQEISDSRPMLHIYLNGRRFLGLLDTGADKTCIAGRDWPANWPIHQTESSLQGLGMACGVAR |
| P03365_ | SSQPLRWQHEDKSGIIHPFVIPTLPFTLWGRDIMKDIKVRLMTDSPDDSQDLMIGAIESNLFAD |
| 2mut_ | QISWKSDQPVWLNQWPLKQEKLQALQQLVTEQLQLGHLEESNSPWNTPVFVIKKKSGKWRL |
| WS | LQDLRAVNATMHDMGALQPGLPSPVAVPKGWEIIIIDLQDCFFNIKLHPEDCKRFAFSVPSPNF |
| | KRPYQRFQWKVLPQGMKNSPTLCQKFVDKAILTVRDKYQDSYIVHYMDDILLAHPSRSIVDE |
| | ILTSMIQALNKHGLVVSTEKIQKYDNLKYLGTHIQGDSVSYQKLQIRTDKLRTLNDFQKLLGN |
| | INWIRPFLKLTTGELKPLFEILNPDSNPISTRKLTPEACKALQLMNERLSTARVKRLDLSQPWS |
| | LCILKTEYTPTACLWQDGVVEWIHLPHISPKVITPYDIFCTQLIIKGRHRSKELFSKDPDYIVVP |
| | YTKVQFDLLLQEKEDWPISLLGFLGEVHFHLPKDPLLTFTLQTAIIFPHMTSTTPLEKGIVIFTD |
| | GSANGRSVTYIQGREPIIKENTQNTAQQAEIVAVITAFEEVSQPFNLYTDSKYVTGLFPEIETAT |
| | LSPRTKIYTELKHLQRLIHKRQEKFYIGHIRGHTGLPGPLAQGNAYADSLTRILTA (SEQ ID |
| | NO: 20268) |
| MMTVB_ | WVQEISDSRPMLHIYLNGRRFLGLLNTGADKTCIAGRDWPANWPIHQTESSLQGLGMACGV |
| P03365_ | ARSSQPLRWQHEDKSGIIHPFVIPTLPFTLWGRDIMKDIKVRLMTDSPDDSQDLMIGAIESNLF |
| 2mutB | ADQISWKSDQPVWLNQWPLKQEKLQALQQLVTEQLQLGHLEESNSPWNTPVFVIKKKSGK |
| | WRLLQDLRAVNATMHDMGALQPGLPSPVAPPKGWEIIIIDLQDCFFNIKLHPEDCKRFAFSVP |
| | SPNFKRPYQRFQWKVLPQGMKNSPTLCQKFVDKAILTVRDKYQDSYIVHYMDDILLAHPSRS |
| | IVDEILTSMIQALNKHGLVVSTEKIQKYDNLKYLGTHIQGDSVSYQKLQIRTDKLRTLNDFQK |
| | LLGNINWIRPFLKLTTGELKPLFEILNPDSNPISTRKLTPEACKALQLMNERLSTARVKRLDLS |
| | QPWSLCILKTEYTPTACLWQDGVVEWIHLPHISPKVITPYDIFCTQLIIKGRHRSKELFSKDPDY |
| | IVVPYTKVQFDLLLQEKEDWPISLLGFLGEVHFHLPKDPLLTFTLQTAIIFPHMTSTTPLEKGIVI |
| | FTDGSANGRSVTYIQGREPIIKENTQNTAQQAEIVAVITAFEEVSQPFNLYTDSKYVTGLFPEIE |
| | TATLSPRTKIYTELKHLQRLIHKRQEKFYIGHIRGHTGLPGPLAQGNAYADSLTRILT (SEQ ID |
| | NO: 20269) |
| MMTVB_ | WVQEISDSRPMLHIYLNGRRFLGLLNTGADKTCIAGRDWPANWPIHQTESSLQGLGMACGV |
| P03365_ | ARSSQPLRWQHEDKSGIIHPFVIPTLPFTLWGRDIMKDIKVRLMTDSPDDSQDLMIGAIESNLF |
| 2mutB | ADQISWKSDQPVWLNQWPLKQEKLQALQQLVTEQLQLGHLEESNSPWNTPVFVIKKKSGK |
| | WRLLQDLRAVNATMHDMGALQPGLPSPVAPPKGWEIIIIDLQDCFFNIKLHPEDCKRFAFSVP |
| | SPNFKRPYQRFQWKVLPQGMKNSPTLCQKFVDKAILTVRDKYQDSYIVHYMDDILLAHPSRS |
| | IVDEILTSMIQALNKHGLVVSTEKIQKYDNLKYLGTHIQGDSVSYQKLQIRTDKLRTLNDFQK |
| | LLGNINWIRPFLKLTTGELKPLFEILNPDSNPISTRKLTPEACKALQLMNERLSTARVKRLDLS |
| | QPWSLCILKTEYTPTACLWQDGVVEWIHLPHISPKVITPYDIFCTQLIIKGRHRSKELFSKDPDY |
| | IVVPYTKVQFDLLLQEKEDWPISLLGFLGEVHFHLPKDPLLTFTLQTAIIFPHMTSTTPLEKGIVI |
| | FTDGSANGRSVTYIQGREPIIKENTQNTAQQAEIVAVITAFEEVSQPFNLYTDSKYVTGLFPEIE |
| | TATLSPRTKIYTELKHLQRLIHKRQEKFYIGHIRGHTGLPGPLAQGNAYADSLTRILT (SEQ ID |
| | NO: 20269) |
| MMTVB_ | VQEISDSRPMLHIYLNGRRFLGLLDTGADKTCIAGRDWPANWPIHQTESSLQGLGMACGVAR |
| P03365_ | SSQPLRWQHEDKSGIIHPFVIPTLPFTLWGRDIMKDIKVRLMTDSPDDSQDLMIGAIESNLFAD |
| 2mutB_ | QISWKSDQPVWLNQWPLKQEKLQALQQLVTEQLQLGHLEESNSPWNTPVFVIKKKSGKWRL |
| WS | LQDLRAVNATMHDMGALQPGLPSPPAVPKGWEIIIIDLQDCFFNIKLHPEDCKRFAFSVPSPNF |
| | KRPYQRFQWKVLPQGMKNSPTLCQKFVDKAILTVRDKYQDSYIVHYMDDILLAHPSRSIVDE |
| | ILTSMIQALNKHGLVVSTEKIQKYDNLKYLGTHIQGDSVSYQKLQIRTDKLRTLNDFQKLLGN |
| | INWIRPFLKLTTGELKPLFEILNPDSNPISTRKLTPEACKALQLMNERLSTARVKRLDLSQPWS |
| | LCILKTEYTPTACLWQDGVVEWIHLPHISPKVITPYDIFCTQLIIKGRHRSKELFSKDPDYIVVP |
| | YTKVQFDLLLQEKEDWPISLLGFLGEVHFHLPKDPLLTFTLQTAIIFPHMTSTTPLEKGIVIFTD |
| | GSANGRSVTYIQGREPIIKENTQNTAQQAEIVAVITAFEEVSQPFNLYTDSKYVTGLFPEIETAT |
| | LSPRTKIYTELKHLQRLIHKRQEKFYIGHIRGHTGLPGPLAQGNAYADSLTRILTA (SEQ ID |
| | NO: 20270) |
| MMTVB_ | VQEISDSRPMLHIYLNGRRFLGLLDTGADKTCIAGRDWPANWPIHQTESSLQGLGMACGVAR |
| P03365_ | SSQPLRWQHEDKSGIIHPFVIPTLPFTLWGRDIMKDIKVRLMTDSPDDSQDLMIGAIESNLFAD |
| 2mutB_ | QISWKSDQPVWLNQWPLKQEKLQALQQLVTEQLQLGHLEESNSPWNTPVFVIKKKSGKWRL |
| WS | LQDLRAVNATMHDMGALQPGLPSPPAVPKGWEIIIIDLQDCFFNIKLHPEDCKRFAFSVPSPNF |
| | KRPYQRFQWKVLPQGMKNSPTLCQKFVDKAILTVRDKYQDSYIVHYMDDILLAHPSRSIVDE |
| | ILTSMIQALNKHGLVVSTEKIQKYDNLKYLGTHIQGDSVSYQKLQIRTDKLRTLNDFQKLLGN |
| | INWIRPFLKLTTGELKPLFEILNPDSNPISTRKLTPEACKALQLMNERLSTARVKRLDLSQPWS |
| | LCILKTEYTPTACLWQDGVVEWIHLPHISPKVITPYDIFCTQLIIKGRHRSKELFSKDPDYIVVP |
| | YTKVQFDLLLQEKEDWPISLLGFLGEVHFHLPKDPLLTFTLQTAIIFPHMTSTTPLEKGIVIFTD |
| | GSANGRSVTYIQGREPIIKENTQNTAQQAEIVAVITAFEEVSQPFNLYTDSKYVTGLFPEIETAT |
| | LSPRTKIYTELKHLQRLIHKRQEKFYIGHIRGHTGLPGPLAQGNAYADSLTRILTA (SEQ ID |
| | NO: 20270) |
| MMTVB_ | VQEISDSRPMLHIYLNGRRFLGLLDTGADKTCIAGRDWPANWPIHQTESSLQGLGMACGVAR |
| P03365_ | SSQPLRWQHEDKSGIIHPFVIPTLPFTLWGRDIMKDIKVRLMTDSPDDSQDLMIGAIESNLFAD |
| WS | QISWKSDQPVWLNQWPLKQEKLQALQQLVTEQLQLGHLEESNSPWNTPVFVIKKKSGKWRL |
| | LQDLRAVNATMHDMGALQPGLPSPVAVPKGWEIIIIDLQDCFFNIKLHPEDCKRFAFSVPSPNF |
| | KRPYQRFQWKVLPQGMKNSPTLCQKFVDKAILTVRDKYQDSYIVHYMDDILLAHPSRSIVDE |
| | ILTSMIQALNKHGLVVSTEKIQKYDNLKYLGTHIQGDSVSYQKLQIRTDKLRTLNDFQKLLGN |
| | INWIRPFLKLTTGELKPLFEILNGDSNPISTRKLTPEACKALQLMNERLSTARVKRLDLSQPWS |
| | LCILKTEYTPTACLWQDGVVEWIHLPHISPKVITPYDIFCTQLIIKGRHRSKELFSKDPDYIVVP |
| | YTKVQFDLLLQEKEDWPISLLGFLGEVHFHLPKDPLLTFTLQTAIIFPHMTSTTPLEKGIVIFTD |
| | GSANGRSVTYIQGREPIIKENTQNTAQQAEIVAVITAFEEVSQPFNLYTDSKYVTGLFPEIETAT |
| | LSPRTKIYTELKHLQRLIHKRQEKFYIGHIRGHTGLPGPLAQGNAYADSLTRILTA (SEQ ID |
| | NO: 20271) |
| MMTVB_ | VQEISDSRPMLHIYLNGRRFLGLLDTGADKTCIAGRDWPANWPIHQTESSLQGLGMACGVAR |
| P03365_ | SSQPLRWQHEDKSGIIHPFVIPTLPFTLWGRDIMKDIKVRLMTDSPDDSQDLMIGAIESNLFAD |
| WS | QISWKSDQPVWLNQWPLKQEKLQALQQLVTEQLQLGHLEESNSPWNTPVFVIKKKSGKWRL |
| | LQDLRAVNATMHDMGALQPGLPSPVAVPKGWEIIIIDLQDCFFNIKLHPEDCKRFAFSVPSPNF |
| | KRPYQRFQWKVLPQGMKNSPTLCQKFVDKAILTVRDKYQDSYIVHYMDDILLAHPSRSIVDE |
| | ILTSMIQALNKHGLVVSTEKIQKYDNLKYLGTHIQGDSVSYQKLQIRTDKLRTLNDFQKLLGN |
| | INWIRPFLKLTTGELKPLFEILNGDSNPISTRKLTPEACKALQLMNERLSTARVKRLDLSQPWS |
| | LCILKTEYTPTACLWQDGVVEWIHLPHISPKVITPYDIFCTQLIIKGRHRSKELFSKDPDYIVVP |
| | YTKVQFDLLLQEKEDWPISLLGFLGEVHFHLPKDPLLTFTLQTAIIFPHMTSTTPLEKGIVIFTD |
| | GSANGRSVTYIQGREPIIKENTQNTAQQAEIVAVITAFEEVSQPFNLYTDSKYVTGLFPEIETAT |
| | LSPRTKIYTELKHLQRLIHKRQEKFYIGHIRGHTGLPGPLAQGNAYADSLTRILTA (SEQ ID |
| | NO: 20271) |
| MMTVB_ | GRDIMKDIKVRLMTDSPDDSQDLMIGAIESNLFADQISWKSDQPVWLNQWPLKQEKLQALQ |
| P03365- | QLVTEQLQLGHLEESNSPWNTPVFVIKKKSGKWRLLQDLRAVNATMHDMGALQPGLPSPVA |
| Pro | VPKGWEIIIIDLQDCFFNIKLHPEDCKRFAFSVPSPNFKRPYQRFQWKVLPQGMKNSPTLCQKF |
| | VDKAILTVRDKYQDSYIVHYMDDILLAHPSRSIVDEILTSMIQALNKHGLVVSTEKIQKYDNL |
| | KYLGTHIQGDSVSYQKLQIRTDKLRTLNDFQKLLGNINWIRPFLKLTTGELKPLFEILNGDSNP |
| | ISTRKLTPEACKALQLMNERLSTARVKRLDLSQPWSLCILKTEYTPTACLWQDGVVEWIHLP |
| | HISPKVITPYDIFCTQLIIKGRHRSKELFSKDPDYIVVPYTKVQFDLLLQEKEDWPISLLGFLGE |
| | VHFHLPKDPLLTFTLQTAIIFPHMTSTTPLEKGIVIFTDGSANGRSVTYIQGREPIIKENTQNTAQ |
| | QAEIVAVITAFEEVSQPFNLYTDSKYVTGLFPEIETATLSPRTKIYTELKHLQRLIHKRQEKFYI |
| | GHIRGHTGLPGPLAQGNAYADSLTRILT (SEQ ID NO: 20272) |
| MMTVB_ | GRDIMKDIKVRLMTDSPDDSQDLMIGAIESNLFADQISWKSDQPVWLNQWPLKQEKLQALQ |
| P03365- | QLVTEQLQLGHLEESNSPWNTPVFVIKKKSGKWRLLQDLRAVNATMHDMGALQPGLPSPVA |
| Pro | VPKGWEIIIIDLQDCFFNIKLHPEDCKRFAFSVPSPNFKRPYQRFQWKVLPQGMKNSPTLCQKF |
| | VDKAILTVRDKYQDSYIVHYMDDILLAHPSRSIVDEILTSMIQALNKHGLVVSTEKIQKYDNL |
| | KYLGTHIQGDSVSYQKLQIRTDKLRTLNDFQKLLGNINWIRPFLKLTTGELKPLFEILNGDSNP |
| | ISTRKLTPEACKALQLMNERLSTARVKRLDLSQPWSLCILKTEYTPTACLWQDGVVEWIHLP |
| | HISPKVITPYDIFCTQLIIKGRHRSKELFSKDPDYIVVPYTKVQFDLLLQEKEDWPISLLGFLGE |
| | VHFHLPKDPLLTFTLQTAIIFPHMTSTTPLEKGIVIFTDGSANGRSVTYIQGREPIIKENTQNTAQ |
| | QAEIVAVITAFEEVSQPFNLYTDSKYVTGLFPEIETATLSPRTKIYTELKHLQRLIHKRQEKFYI |
| | GHIRGHTGLPGPLAQGNAYADSLTRILT (SEQ ID NO: 20272) |
| MMTVB_ | GRDIMKDIKVRLMTDSPDDSQDLMIGAIESNLFADQISWKSDQPVWLNQWPLKQEKLQALQ |
| P03365- | QLVTEQLQLGHLEESNSPWNTPVFVIKKKSGKWRLLQDLRAVNATMHDMGALQPGLPSPVA |
| Pro_2mut | VPKGWEIIIIDLQDCFFNIKLHPEDCKRFAFSVPSPNFKRPYQRFQWKVLPQGMKNSPTLCQKF |
| | VDKAILTVRDKYQDSYIVHYMDDILLAHPSRSIVDEILTSMIQALNKHGLVVSTEKIQKYDNL |
| | KYLGTHIQGDSVSYQKLQIRTDKLRTLNDFQKLLGNINWIRPFLKLTTGELKPLFEILNPDSNPI |
| | STRKLTPEACKALQLMNERLSTARVKRLDLSQPWSLCILKTEYTPTACLWQDGVVEWIHLPH |
| | ISPKVITPYDIFCTQLIIKGRHRSKELFSKDPDYIVVPYTKVQFDLLLQEKEDWPISLLGFLGEV |
| | HFHLPKDPLLTFTLQTAIIFPHMTSTTPLEKGIVIFTDGSANGRSVTYIQGREPIIKENTQNTAQQ |
| | AEIVAVITAFEEVSQPFNLYTDSKYVTGLFPEIETATLSPRTKIYTELKHLQRLIHKRQEKFYIG |
| | HIRGHTGLPGPLAQGNAYADSLTRILT (SEQ ID NO: 20273) |
| MMTVB_ | GRDIMKDIKVRLMTDSPDDSQDLMIGAIESNLFADQISWKSDQPVWLNQWPLKQEKLQALQ |
| P03365- | QLVTEQLQLGHLEESNSPWNTPVFVIKKKSGKWRLLQDLRAVNATMHDMGALQPGLPSPVA |
| Pro_2mut | VPKGWEIIIIDLQDCFFNIKLHPEDCKRFAFSVPSPNFKRPYQRFQWKVLPQGMKNSPTLCQKF |
| | VDKAILTVRDKYQDSYIVHYMDDILLAHPSRSIVDEILTSMIQALNKHGLVVSTEKIQKYDNL |
| | KYLGTHIQGDSVSYQKLQIRTDKLRTLNDFQKLLGNINWIRPFLKLTTGELKPLFEILNPDSNPI |
| | STRKLTPEACKALQLMNERLSTARVKRLDLSQPWSLCILKTEYTPTACLWQDGVVEWIHLPH |
| | ISPKVITPYDIFCTQLIIKGRHRSKELFSKDPDYIVVPYTKVQFDLLLQEKEDWPISLLGFLGEV |
| | HFHLPKDPLLTFTLQTAIIFPHMTSTTPLEKGIVIFTDGSANGRSVTYIQGREPIIKENTQNTAQQ |
| | AEIVAVITAFEEVSQPFNLYTDSKYVTGLFPEIETATLSPRTKIYTELKHLQRLIHKRQEKFYIG |
| | HIRGHTGLPGPLAQGNAYADSLTRILT (SEQ ID NO: 20273) |
| MMTVB_ | GRDIMKDIKVRLMTDSPDDSQDLMIGAIESNLFADQISWKSDQPVWLNQWPLKQEKLQALQ |
| P03365- | QLVTEQLQLGHLEESNSPWNTPVFVIKKKSGKWRLLQDLRAVNATMHDMGALQPGLPSPVA |
| Pro_2mutB | PPKGWEIIIIDLQDCFFNIKLHPEDCKRFAFSVPSPNFKRPYQRFQWKVLPQGMKNSPTLCQKF |
| | VDKAILTVRDKYQDSYIVHYMDDILLAHPSRSIVDEILTSMIQALNKHGLVVSTEKIQKYDNL |
| | KYLGTHIQGDSVSYQKLQIRTDKLRTLNDFQKLLGNINWIRPFLKLTTGELKPLFEILNPDSNPI |
| | STRKLTPEACKALQLMNERLSTARVKRLDLSQPWSLCILKTEYTPTACLWQDGVVEWIHLPH |
| | ISPKVITPYDIFCTQLIIKGRHRSKELFSKDPDYIVVPYTKVQFDLLLQEKEDWPISLLGFLGEV |
| | HFHLPKDPLLTFTLQTAIIFPHMTSTTPLEKGIVIFTDGSANGRSVTYIQGREPIIKENTQNTAQQ |
| | AEIVAVITAFEEVSQPFNLYTDSKYVTGLFPEIETATLSPRTKIYTELKHLQRLIHKRQEKFYIG |
| | HIRGHTGLPGPLAQGNAYADSLTRILT (SEQ ID NO: 20274) |
| MMTVB_ | GRDIMKDIKVRLMTDSPDDSQDLMIGAIESNLFADQISWKSDQPVWLNQWPLKQEKLQALQ |
| P03365- | QLVTEQLQLGHLEESNSPWNTPVFVIKKKSGKWRLLQDLRAVNATMHDMGALQPGLPSPVA |
| Pro_2mutB | PPKGWEIIIIDLQDCFFNIKLHPEDCKRFAFSVPSPNFKRPYQRFQWKVLPQGMKNSPTLCQKF |
| | VDKAILTVRDKYQDSYIVHYMDDILLAHPSRSIVDEILTSMIQALNKHGLVVSTEKIQKYDNL |
| | KYLGTHIQGDSVSYQKLQIRTDKLRTLNDFQKLLGNINWIRPFLKLTTGELKPLFEILNPDSNPI |
| | STRKLTPEACKALQLMNERLSTARVKRLDLSQPWSLCILKTEYTPTACLWQDGVVEWIHLPH |
| | ISPKVITPYDIFCTQLIIKGRHRSKELFSKDPDYIVVPYTKVQFDLLLQEKEDWPISLLGFLGEV |
| | HFHLPKDPLLTFTLQTAIIFPHMTSTTPLEKGIVIFTDGSANGRSVTYIQGREPIIKENTQNTAQQ |
| | AEIVAVITAFEEVSQPFNLYTDSKYVTGLFPEIETATLSPRTKIYTELKHLQRLIHKRQEKFYIG |
| | HIRGHTGLPGPLAQGNAYADSLTRILT (SEQ ID NO: 20274) |
| MPMV | LTAAIDILAPQQCAEPITWKSDEPVWVDQWPLTNDKLAAAQQLVQEQLEAGHITESSSPWNT |
| P07572 | PIFVIKKKSGKWRLLQDLRAVNATMVLMGALQPGLPSPVAIPQGYLKIIIDLKDCFFSIPLHPS |
| | DQKRFAFSLPSTNFKEPMQRFQWKVLPQGMANSPTLCQKYVATAIHKVRHAWKQMYIIHY |
| | MDDILIAGKDGQQVLQCFDQLKQELTAAGLHIAPEKVQLQDPYTYLGFELNGPKITNQKAVI |
| | RKDKLQTLNDFQKLLGDINWLRPYLKLTTGDLKPLFDTLKGDSDPNSHRSLSKEALASLEKV |
| | ETAIAEQFVTHINYSLPLIFLIFNTALTPTGLFWQDNPIMWIHLPASPKKVLLPYYDAIADLIILG |
| | RDHSKKYFGIEPSTIIQPYSKSQIDWLMQNTEMWPIACASFVGILDNHYPPNKLIQFCKLHTFV |
| | FPQIISKTPLNNALLVFTDGSSTGMAAYTLTDTTIKFQTNLNSAQLVELQALIAVLSAFPNQPL |
| | NIYTDSAYLAHSIPLLETVAQIKHISETAKLFLQCQQLIYNRSIPFYIGHVRAHSGLPGPIAQGN |
| | QRADLATKIVASNINT (SEQ ID NO: 20275) |
| MPMV_ | LTAAIDILAPQQCAEPITWKSDEPVWVDQWPLTNDKLAAAQQLVQEQLEAGHITESSSPWNT |
| P07572_ | PIFVIKKKSGKWRLLQDLRAVNATMVLMGALQPGLPSPVAPPQGYLKIIIDLKDCFFSIPLHPS |
| 2mutB | DQKRFAFSLPSTNFKEPMQRFQWKVLPQGMANSPTLCQKYVATAIHKVRHAWKQMYIIHY |
| | MDDILIAGKDGQQVLQCFDQLKQELTAAGLHIAPEKVQLQDPYTYLGFELNGPKITNQKAVI |
| | RKDKLQTLNDFQKLLGDINWLRPYLKLTTGDLKPLFDTLKPDSDPNSHRSLSKEALASLEKVE |
| | TAIAEQFVTHINYSLPLIFLIFNTALTPTGLFWQDNPIMWIHLPASPKKVLLPYYDAIADLIILGR |
| | DHSKKYFGIEPSTIIQPYSKSQIDWLMQNTEMWPIACASFVGILDNHYPPNKLIQFCKLHTFVF |
| | PQIISKTPLNNALLVFTDGSSTGMAAYTLTDTTIKFQTNLNSAQLVELQALIAVLSAFPNQPLNI |
| | YTDSAYLAHSIPLLETVAQIKHISETAKLFLQCQQLIYNRSIPFYIGHVRAHSGLPGPIAQGNQR |
| | ADLATKIVASNINT (SEQ ID NO: 20276) |
| PERV_ | TLQLDDEYRLYSPLVKPDQNIQFWLEQFPQAWAETAGMGLAKQVPPQVIQLKASATPVSVR |
| Q4VFZ2 | QYPLSKEAQEGIRPHVQRLIQQGILVPVQSPWNTPLLPVRKPGTNDYRPVQDLREVNKRVQDI |
| | HPTVPNPYNLLCALPPQRSWYTVLDLKDAFFCLRLHPTSQPLFAFEWRDPGTGRTGQLTWTR |
| | LPQGFKNSPTIFDEALHRDLANFRIQHPQVTLLQYVDDLLLAGATKQDCLEGTKALLLELSDL |
| | GYRASAKKAQICRREVTYLGYSLRDGQRWLTEARKKTVVQIPAPTTAKQVREFLGTAGFCRL |
| | WIPGFATLAAPLYPLTKEKGEFSWAPEHQKAFDAIKKALLSAPALALPDVTKPFTLYVDERK |
| | GVARGVLTQTLGPWRRPVAYLSKKLDPVASGWPVCLKAIAAVAILVKDADKLTLGQNITVIA |
| | PHALENIVRQPPDRWMTNARMTHYQSLLLTERVTFAPPAALNPATLLPEETDEPVTHDCHQL |
| | LIEETGVRKDLTDIPLTGEVLTWFTDGSSYVVEGKRMAGAAVVDGTRTIWASSLPEGTSAQK |
| | AELMALTQALRLAEGKSINIYTDSRYAFATAHVHGAIYKQRGLLTSAGREIKNKEEILSLLEA |
| | LHLPKRLAIIHCPGHQKAKDPISRGNQMADRVAKQAAQGVNLL (SEQ ID NO: 20277) |
| PERV_ | TLQLDDEYRLYSPLVKPDQNIQFWLEQFPQAWAETAGMGLAKQVPPQVIQLKASATPVSVR |
| Q4VFZ2 | QYPLSKEAQEGIRPHVQRLIQQGILVPVQSPWNTPLLPVRKPGTNDYRPVQDLREVNKRVQDI |
| | HPTVPNPYNLLCALPPQRSWYTVLDLKDAFFCLRLHPTSQPLFAFEWRDPGTGRTGQLTWTR |
| | LPQGFKNSPTIFDEALHRDLANFRIQHPQVTLLQYVDDLLLAGATKQDCLEGTKALLLELSDL |
| | GYRASAKKAQICRREVTYLGYSLRDGQRWLTEARKKTVVQIPAPTTAKQVREFLGTAGFCRL |
| | WIPGFATLAAPLYPLTKEKGEFSWAPEHQKAFDAIKKALLSAPALALPDVTKPFTLYVDERK |
| | GVARGVLTQTLGPWRRPVAYLSKKLDPVASGWPVCLKAIAAVAILVKDADKLTLGQNITVIA |
| | PHALENIVRQPPDRWMTNARMTHYQSLLLTERVTFAPPAALNPATLLPEETDEPVTHDCHQL |
| | LIEETGVRKDLTDIPLTGEVLTWFTDGSSYVVEGKRMAGAAVVDGTRTIWASSLPEGTSAQK |
| | AELMALTQALRLAEGKSINIYTDSRYAFATAHVHGAIYKQRGLLTSAGREIKNKEEILSLLEA |
| | LHLPKRLAIIHCPGHQKAKDPISRGNQMADRVAKQAAQGVNLL (SEQ ID NO: 20277) |
| PERV_ | TLQLDDEYRLYSPLVKPDQNIQFWLEQFPQAWAETAGMGLAKQVPPQVIQLKASATPVSVR |
| Q4VFZ2_ | QYPLSKEAQEGIRPHVQRLIQQGILVPVQSPWNTPLLPVRKPGTNDYRPVQDLREVNKRVQDI |
| 3mut | HPTVPNPYNLLCALPPQRSWYTVLDLKDAFFCLRLHPTSQPLFAFEWRDPGTGRTGQLTWTR |
| | LPQGFKNSPTIFNEALHRDLANFRIQHPQVTLLQYVDDLLLAGATKQDCLEGTKALLLELSDL |
| | GYRASAKKAQICRREVTYLGYSLRDGQRWLTEARKKTVVQIPAPTTAKQVREFLGTAGFCRL |
| | WIPGFATLAAPLYPLTKPKGEFSWAPEHQKAFDAIKKALLSAPALALPDVTKPFTLYVDERKG |
| | VARGVLTQTLGPWRRPVAYLSKKLDPVASGWPVCLKAIAAVAILVKDADKLTLGQNITVIAP |
| | HALENIVRQPPDRWMTNARMTHYQSLLLTERVTFAPPAALNPATLLPEETDEPVTHDCHQLL |
| | IEETGVRKDLTDIPLTGEVLTWFTDGSSYVVEGKRMAGAAVVDGTRTIWASSLPEGTSAQKA |
| | ELMALTQALRLAEGKSINIYTDSRYAFATAHVHGAIYKQRGWLTSAGREIKNKEEILSLLEAL |
| | HLPKRLAIIHCPGHQKAKDPISRGNQMADRVAKQAAQGVNLL (SEQ ID NO: 20278) |
| PERV_ | TLQLDDEYRLYSPLVKPDQNIQFWLEQFPQAWAETAGMGLAKQVPPQVIQLKASATPVSVR |
| Q4VFZ2_ | QYPLSKEAQEGIRPHVQRLIQQGILVPVQSPWNTPLLPVRKPGTNDYRPVQDLREVNKRVQDI |
| 3mut | HPTVPNPYNLLCALPPQRSWYTVLDLKDAFFCLRLHPTSQPLFAFEWRDPGTGRTGQLTWTR |
| | LPQGFKNSPTIFNEALHRDLANFRIQHPQVTLLQYVDDLLLAGATKQDCLEGTKALLLELSDL |
| | GYRASAKKAQICRREVTYLGYSLRDGQRWLTEARKKTVVQIPAPTTAKQVREFLGTAGFCRL |
| | WIPGFATLAAPLYPLTKPKGEFSWAPEHQKAFDAIKKALLSAPALALPDVTKPFTLYVDERKG |
| | VARGVLTQTLGPWRRPVAYLSKKLDPVASGWPVCLKAIAAVAILVKDADKLTLGQNITVIAP |
| | HALENIVRQPPDRWMTNARMTHYQSLLLTERVTFAPPAALNPATLLPEETDEPVTHDCHQLL |
| | IEETGVRKDLTDIPLTGEVLTWFTDGSSYVVEGKRMAGAAVVDGTRTIWASSLPEGTSAQKA |
| | ELMALTQALRLAEGKSINIYTDSRYAFATAHVHGAIYKQRGWLTSAGREIKNKEEILSLLEAL |
| | HLPKRLAIIHCPGHQKAKDPISRGNQMADRVAKQAAQGVNLL (SEQ ID NO: 20278) |
| PERV_ | LDDEYRLYSPLVKPDQNIQFWLEQFPQAWAETAGMGLAKQVPPQVIQLKASATPVSVRQYP |
| Q4VFZ2_ | LSKEAQEGIRPHVQRLIQQGILVPVQSPWNTPLLPVRKPGTNDYRPVQDLREVNKRVQDIHPT |
| 3mutA_ | VPNPYNLLCALPPQRSWYTVLDLKDAFFCLRLHPTSQPLFAFEWRDPGTGRTGQLTWTRLPQ |
| WS | GFKNSPTIFNEALHRDLANFRIQHPQVTLLQYVDDLLLAGATKQDCLEGTKALLLELSDLGYR |
| | ASAKKAQICRREVTYLGYSLRDGQRWLTEARKKTVVQIPAPTTAKQVREFLGKAGFCRLFIP |
| | GFATLAAPLYPLTKPKGEFSWAPEHQKAFDAIKKALLSAPALALPDVTKPFTLYVDERKGVA |
| | RGVLTQTLGPWRRPVAYLSKKLDPVASGWPVCLKAIAAVAILVKDADKLTLGQNITVIAPHA |
| | LENIVRQPPDRWMTNARMTHYQSLLLTERVTFAPPAALNPATLLPEETDEPVTHDCHQLLIEE |
| | TGVRKDLTDIPLTGEVLTWFTDGSSYVVEGKRMAGAAVVDGTRTIWASSLPEGTSAQKAEL |
| | MALTQALRLAEGKSINIYTDSRYAFATAHVHGAIYKQRGWLTSAGREIKNKEEILSLLEALHL |
| | PKRLAIIHCPGHQKAKDPISRGNQMADRVAKQAAQGVNLLP (SEQ ID NO: 20279) |
| PERV_ | LDDEYRLYSPLVKPDQNIQFWLEQFPQAWAETAGMGLAKQVPPQVIQLKASATPVSVRQYP |
| Q4VFZ2_ | LSKEAQEGIRPHVQRLIQQGILVPVQSPWNTPLLPVRKPGTNDYRPVQDLREVNKRVQDIHPT |
| 3mutA_ | VPNPYNLLCALPPQRSWYTVLDLKDAFFCLRLHPTSQPLFAFEWRDPGTGRTGQLTWTRLPQ |
| WS | GFKNSPTIFNEALHRDLANFRIQHPQVTLLQYVDDLLLAGATKQDCLEGTKALLLELSDLGYR |
| | ASAKKAQICRREVTYLGYSLRDGQRWLTEARKKTVVQIPAPTTAKQVREFLGKAGFCRLFIP |
| | GFATLAAPLYPLTKPKGEFSWAPEHQKAFDAIKKALLSAPALALPDVTKPFTLYVDERKGVA |
| | RGVLTQTLGPWRRPVAYLSKKLDPVASGWPVCLKAIAAVAILVKDADKLTLGQNITVIAPHA |
| | LENIVRQPPDRWMTNARMTHYQSLLLTERVTFAPPAALNPATLLPEETDEPVTHDCHQLLIEE |
| | TGVRKDLTDIPLTGEVLTWFTDGSSYVVEGKRMAGAAVVDGTRTIWASSLPEGTSAQKAEL |
| | MALTQALRLAEGKSINIYTDSRYAFATAHVHGAIYKQRGWLTSAGREIKNKEEILSLLEALHL |
| | PKRLAIIHCPGHQKAKDPISRGNQMADRVAKQAAQGVNLLP (SEQ ID NO: 20279) |
| SFV1_ | MDPLQLLQPLEAEIKGTKLKAHWNSGATITCVPEAFLEDERPIQTMLIKTIHGEKQQDVYYLT |
| P23074 | FKVQGRKVEAEVLASPYDYILLNPSDVPWLMKKPLQLTVLVPLHEYQERLLQQTALPKEQKE |
| | LLQKLFLKYDALWQHWENQVGHRRIKPHNIATGTLAPRPQKQYPINPKAKPSIQIVIDDLLKQ |
| | GVLIQQNSTMNTPVYPVPKPDGKWRMVLDYREVNKTIPLIAAQNQHSAGILSSIYRGKYKTT |
| | LDLTNGFWAHPITPESYWLTAFTWQGKQYCWTRLPQGFLNSPALFTADVVDLLKEIPNVQA |
| | YVDDIYISHDDPQEHLEQLEKIFSILLNAGYVVSLKKSEIAQREVEFLGFNITKEGRGLTDTFKQ |
| | KLLNITPPKDLKQLQSILGLLNFARNFIPNYSELVKPLYTIVANANGKFISWTEDNSNQLQHIIS |
| | VLNQADNLEERNPETRLIIKVNSSPSAGYIRYYNEGSKRPIMYVNYIFSKAEAKFTQTEKLLTT |
| | MHKGLIKAMDLAMGQEILVYSPIVSMTKIQRTPLPERKALPVRWITWMTYLEDPRIQFHYDK |
| | SLPELQQIPNVTEDVIAKTKHPSEFAMVFYTDGSAIKHPDVNKSHSAGMGIAQVQFIPEYKIVH |
| | QWSIPLGDHTAQLAEIAAVEFACKKALKISGPVLIVTDSFYVAESANKELPYWKSNGFLNNK |
| | KKPLRHVSKWKSIAECLQLKPDIIIMHEKGHQQPMTTLHTEGNNLADKLATQGSYVVH (SEQ |
| | ID NO: 20280) |
| SFV1_ | MDPLQLLQPLEAEIKGTKLKAHWNSGATITCVPEAFLEDERPIQTMLIKTIHGEKQQDVYYLT |
| P23074_ | FKVQGRKVEAEVLASPYDYILLNPSDVPWLMKKPLQLTVLVPLHEYQERLLQQTALPKEQKE |
| 2mut | LLQKLFLKYDALWQHWENQVGHRRIKPHNIATGTLAPRPQKQYPINPKAKPSIQIVIDDLLKQ |
| | GVLIQQNSTMNTPVYPVPKPDGKWRMVLDYREVNKTIPLIAAQNQHSAGILSSIYRGKYKTT |
| | LDLTNGFWAHPITPESYWLTAFTWQGKQYCWTRLPQGFLNSPALFNADVVDLLKEIPNVQA |
| | YVDDIYISHDDPQEHLEQLEKIFSILLNAGYVVSLKKSEIAQREVEFLGFNITKEGRGLTDTFKQ |
| | KLLNITPPKDLKQLQSILGLLNFARNFIPNYSELVKPLYTIVAPANGKFISWTEDNSNQLQHIIS |
| | VLNQADNLEERNPETRLIIKVNSSPSAGYIRYYNEGSKRPIMYVNYIFSKAEAKFTQTEKLLTT |
| | MHKGLIKAMDLAMGQEILVYSPIVSMTKIQRTPLPERKALPVRWITWMTYLEDPRIQFHYDK |
| | SLPELQQIPNVTEDVIAKTKHPSEFAMVFYTDGSAIKHPDVNKSHSAGMGIAQVQFIPEYKIVH |
| | QWSIPLGDHTAQLAEIAAVEFACKKALKISGPVLIVTDSFYVAESANKELPYWKSNGFLNNK |
| | KKPLRHVSKWKSIAECLQLKPDIIIMHEKGHQQPMTTLHTEGNNLADKLATQGSYVVH (SEQ |
| | ID NO: 20281) |
| SFV1_ | MDPLQLLQPLEAEIKGTKLKAHWNSGATITCVPEAFLEDERPIQTMLIKTIHGEKQQDVYYLT |
| P23074_ | FKVQGRKVEAEVLASPYDYILLNPSDVPWLMKKPLQLTVLVPLHEYQERLLQQTALPKEQKE |
| 2mutA | LLQKLFLKYDALWQHWENQVGHRRIKPHNIATGTLAPRPQKQYPINPKAKPSIQIVIDDLLKQ |
| | GVLIQQNSTMNTPVYPVPKPDGKWRMVLDYREVNKTIPLIAAQNQHSAGILSSIYRGKYKTT |
| | LDLTNGFWAHPITPESYWLTAFTWQGKQYCWTRLPQGFLNSPALFNADVVDLLKEIPNVQA |
| | YVDDIYISHDDPQEHLEQLEKIFSILLNAGYVVSLKKSEIAQREVEFLGFNITKEGRGLTDTFKQ |
| | KLLNITPPKDLKQLQSILGKLNFARNFIPNYSELVKPLYTIVAPANGKFISWTEDNSNQLQHIIS |
| | VLNQADNLEERNPETRLIIKVNSSPSAGYIRYYNEGSKRPIMYVNYIFSKAEAKFTQTEKLLTT |
| | MHKGLIKAMDLAMGQEILVYSPIVSMTKIQRTPLPERKALPVRWITWMTYLEDPRIQFHYDK |
| | SLPELQQIPNVTEDVIAKTKHPSEFAMVFYTDGSAIKHPDVNKSHSAGMGIAQVQFIPEYKIVH |
| | QWSIPLGDHTAQLAEIAAVEFACKKALKISGPVLIVTDSFYVAESANKELPYWKSNGFLNNK |
| | KKPLRHVSKWKSIAECLQLKPDIIIMHEKGHQQPMTTLHTEGNNLADKLATQGSYVVH (SEQ |
| | ID NO: 20282) |
| SFV1_ | VPWLMKKPLQLTVLVPLHEYQERLLQQTALPKEQKELLQKLFLKYDALWQHWENQVGHRR |
| P23074- | IKPHNIATGTLAPRPQKQYPINPKAKPSIQIVIDDLLKQGVLIQQNSTMNTPVYPVPKPDGKWR |
| Pro | MVLDYREVNKTIPLIAAQNQHSAGILSSIYRGKYKTTLDLTNGFWAHPITPESYWLTAFTWQG |
| | KQYCWTRLPQGFLNSPALFTADVVDLLKEIPNVQAYVDDIYISHDDPQEHLEQLEKIFSILLNA |
| | GYVVSLKKSEIAQREVEFLGFNITKEGRGLTDTFKQKLLNITPPKDLKQLQSILGLLNFARNFIP |
| | NYSELVKPLYTIVANANGKFISWTEDNSNQLQHIISVLNQADNLEERNPETRLIIKVNSSPSAG |
| | YIRYYNEGSKRPIMYVNYIFSKAEAKFTQTEKLLTTMHKGLIKAMDLAMGQEILVYSPIVSMT |
| | KIQRTPLPERKALPVRWITWMTYLEDPRIQFHYDKSLPELQQIPNVTEDVIAKTKHPSEFAMV |
| | FYTDGSAIKHPDVNKSHSAGMGIAQVQFIPEYKIVHQWSIPLGDHTAQLAEIAAVEFACKKAL |
| | KISGPVLIVTDSFYVAESANKELPYWKSNGFLNNKKKPLRHVSKWKSIAECLQLKPDIIIMHE |
| | KGHQQPMTTLHTEGNNLADKLATQGSYVVH (SEQ ID NO: 20283) |
| SFV1_ | VPWLMKKPLQLTVLVPLHEYQERLLQQTALPKEQKELLQKLFLKYDALWQHWENQVGHRR |
| P23074- | IKPHNIATGTLAPRPQKQYPINPKAKPSIQIVIDDLLKQGVLIQQNSTMNTPVYPVPKPDGKWR |
| Pro_2mut | MVLDYREVNKTIPLIAAQNQHSAGILSSIYRGKYKTTLDLTNGFWAHPITPESYWLTAFTWQG |
| | KQYCWTRLPQGFLNSPALFNADVVDLLKEIPNVQAYVDDIYISHDDPQEHLEQLEKIFSILLN |
| | AGYVVSLKKSEIAQREVEFLGFNITKEGRGLTDTFKQKLLNITPPKDLKQLQSILGLLNFARNF |
| | IPNYSELVKPLYTIVAPANGKFISWTEDNSNQLQHIISVLNQADNLEERNPETRLIIKVNSSPSA |
| | GYIRYYNEGSKRPIMYVNYIFSKAEAKFTQTEKLLTTMHKGLIKAMDLAMGQEILVYSPIVSM |
| | TKIQRTPLPERKALPVRWITWMTYLEDPRIQFHYDKSLPELQQIPNVTEDVIAKTKHPSEFAM |
| | VFYTDGSAIKHPDVNKSHSAGMGIAQVQFIPEYKIVHQWSIPLGDHTAQLAEIAAVEFACKKA |
| | LKISGPVLIVTDSFYVAESANKELPYWKSNGFLNNKKKPLRHVSKWKSIAECLQLKPDIIIMHE |
| | KGHQQPMTTLHTEGNNLADKLATQGSYVVH (SEQ ID NO: 20284) |
| SFV1_ | VPWLMKKPLQLTVLVPLHEYQERLLQQTALPKEQKELLQKLFLKYDALWQHWENQVGHRR |
| P23074- | IKPHNIATGTLAPRPQKQYPINPKAKPSIQIVIDDLLKQGVLIQQNSTMNTPVYPVPKPDGKWR |
| Pro_2mutA | MVLDYREVNKTIPLIAAQNQHSAGILSSIYRGKYKTTLDLTNGFWAHPITPESYWLTAFTWQG |
| | KQYCWTRLPQGFLNSPALFNADVVDLLKEIPNVQAYVDDIYISHDDPQEHLEQLEKIFSILLN |
| | AGYVVSLKKSEIAQREVEFLGFNITKEGRGLTDTFKQKLLNITPPKDLKQLQSILGKLNFARNF |
| | IPNYSELVKPLYTIVAPANGKFISWTEDNSNQLQHIISVLNQADNLEERNPETRLIIKVNSSPSA |
| | GYIRYYNEGSKRPIMYVNYIFSKAEAKFTQTEKLLTTMHKGLIKAMDLAMGQEIL VYSPIVSM |
| | TKIQRTPLPERKALPVRWITWMTYLEDPRIQFHYDKSLPELQQIPNVTEDVIAKTKHPSEFAM |
| | VFYTDGSAIKHPDVNKSHSAGMGIAQVQFIPEYKIVHQWSIPLGDHTAQLAEIAAVEFACKKA |
| | LKISGPVLIVTDSFYVAESANKELPYWKSNGFLNNKKKPLRHVSKWKSIAECLQLKPDIIIMHE |
| | KGHQQPMTTLHTEGNNLADKLATQGSYVVH (SEQ ID NO: 20285) |
| SFV3L_ | MDPLQLLQPLEAEIKGTKLKAHWNSGATITCVPQAFLEEEVPIKNIWIKTIHGEKEQPVYYLTF |
| P27401 | KIQGRKVEAEVISSPYDYILVSPSDIPWLMKKPLQLTTLVPLQEYEERLLKQTMLTGSYKEKL |
| | QSLFLKYDALWQHWENQVGHRRIKPHHIATGTVNPRPQKQYPINPKAKASIQTVINDLLKQG |
| | VLIQQNSIMNTPVYPVPKPDGKWRMVLDYREVNKTIPLIAAQNQHSAGILSSIFRGKYKTTLD |
| | LSNGFWAHSITPESYWLTAFTWLGQQYCWTRLPQGFLNSPALFTADVVDLLKEVPNVQVYV |
| | DDIYISHDDPREHLEQLEKVFSLLLNAGYVVSLKKSEIAQHEVEFLGFNITKEGRGLTETFKQK |
| | LLNITPPRDLKQLQSILGLLNFARNFIPNFSELVKPLYNIIATANGKYITWTTDNSQQLQNIISML |
| | NSAENLEERNPEVRLIMKVNTSPSAGYIRFYNEFAKRPIMYLNYVYTKAEVKFTNTEKLLTTI |
| | HKGLIKALDLGMGQEILVYSPIVSMTKIQKTPLPERKALPIRWITWMSYLEDPRIQFHYDKTLP |
| | ELQQVPTVTDDIIAKIKHPSEFSMVFYTDGSAIKHPNVNKSHNAGMGIAQVQFKPEFTVINTW |
| | SIPLGDHTAQLAEVAAVEFACKKALKIDGPVLIVTDSFYVAESVNKELPYWQSNGFFNNKKK |
| | PLKHVSKWKSIADCIQLKPDIIIIHEKGHQPTASTFHTEGNNLADKLATQGSYVVN (SEQ ID |
| | NO: 20286) |
| SFV3L_ | MDPLQLLQPLEAEIKGTKLKAHWNSGATITCVPQAFLEEEVPIKNIWIKTIHGEKEQPVYYLTF |
| P27401_ | KIQGRKVEAEVISSPYDYILVSPSDIPWLMKKPLQLTTLVPLQEYEERLLKQTMLTGSYKEKL |
| 2mut | QSLFLKYDALWQHWENQVGHRRIKPHHIATGTVNPRPQKQYPINPKAKASIQTVINDLLKQG |
| | VLIQQNSIMNTPVYPVPKPDGKWRMVLDYREVNKTIPLIAAQNQHSAGILSSIFRGKYKTTLD |
| | LSNGFWAHSITPESYWLTAFTWLGQQYCWTRLPQGFLNSPALFNADVVDLLKEVPNVQVYV |
| | DDIYISHDDPREHLEQLEKVFSLLLNAGYVVSLKKSEIAQHEVEFLGFNITKEGRGLTETFKQK |
| | LLNITPPRDLKQLQSILGLLNFARNFIPNFSELVKPLYNIIATAPGKYITWTTDNSQQLQNIISML |
| | NSAENLEERNPEVRLIMKVNTSPSAGYIRFYNEFAKRPIMYLNYVYTKAEVKFTNTEKLLTTI |
| | HKGLIKALDLGMGQEILVYSPIVSMTKIQKTPLPERKALPIRWITWMSYLEDPRIQFHYDKTLP |
| | ELQQVPTVTDDIIAKIKHPSEFSMVFYTDGSAIKHPNVNKSHNAGMGIAQVQFKPEFTVINTW |
| | SIPLGDHTAQLAEVAAVEFACKKALKIDGPVLIVTDSFYVAESVNKELPYWQSNGFENNKKK |
| | PLKHVSKWKSIADCIQLKPDIIIIHEKGHQPTASTFHTEGNNLADKLATQGSYVVN (SEQ ID |
| | NO: 20287) |
| SFV3L_ | MDPLQLLQPLEAEIKGTKLKAHWNSGATITCVPQAFLEEEVPIKNIWIKTIHGEKEQPVYYLTF |
| P27401_ | KIQGRKVEAEVISSPYDYILVSPSDIPWLMKKPLQLTTLVPLQEYEERLLKQTMLTGSYKEKL |
| 2mutA | QSLFLKYDALWQHWENQVGHRRIKPHHIATGTVNPRPQKQYPINPKAKASIQTVINDLLKQG |
| | VLIQQNSIMNTPVYPVPKPDGKWRMVLDYREVNKTIPLIAAQNQHSAGILSSIFRGKYKTTLD |
| | LSNGFWAHSITPESYWLTAFTWLGQQYCWTRLPQGFLNSPALFNADVVDLLKEVPNVQVYV |
| | DDIYISHDDPREHLEQLEKVFSLLLNAGYVVSLKKSEIAQHEVEFLGFNITKEGRGLTETFKQK |
| | LLNITPPRDLKQLQSILGKLNFARNFIPNFSELVKPLYNIIATAPGKYITWTTDNSQQLQNIISML |
| | NSAENLEERNPEVRLIMKVNTSPSAGYIRFYNEFAKRPIMYLNYVYTKAEVKFTNTEKLLTTI |
| | HKGLIKALDLGMGQEILVYSPIVSMTKIQKTPLPERKALPIRWITWMSYLEDPRIQFHYDKTLP |
| | ELQQVPTVTDDIIAKIKHPSEFSMVFYTDGSAIKHPNVNKSHNAGMGIAQVQFKPEFTVINTW |
| | SIPLGDHTAQLAEVAAVEFACKKALKIDGPVLIVTDSFYVAESVNKELPYWQSNGFENNKKK |
| | PLKHVSKWKSIADCIQLKPDIIIIHEKGHQPTASTFHTEGNNLADKLATQGSYVVN (SEQ ID |
| | NO: 20288) |
| SFV3L_ | IPWLMKKPLQLTTLVPLQEYEERLLKQTMLTGSYKEKLQSLFLKYDALWQHWENQVGHRRI |
| P27401- | KPHHIATGTVNPRPQKQYPINPKAKASIQTVINDLLKQGVLIQQNSIMNTPVYPVPKPDGKWR |
| Pro | MVLDYREVNKTIPLIAAQNQHSAGILSSIFRGKYKTTLDLSNGFWAHSITPESYWLTAFTWLG |
| | QQYCWTRLPQGFLNSPALFTADVVDLLKEVPNVQVYVDDIYISHDDPREHLEQLEKVFSLLL |
| | NAGYVVSLKKSEIAQHEVEFLGFNITKEGRGLTETFKQKLLNITPPRDLKQLQSILGLLNFARN |
| | FIPNFSELVKPLYNIIATANGKYITWTTDNSQQLQNIISMLNSAENLEERNPEVRLIMKVNTSPS |
| | AGYIRFYNEFAKRPIMYLNYVYTKAEVKFTNTEKLLTTIHKGLIKALDLGMGQEILVYSPIVS |
| | MTKIQKTPLPERKALPIRWITWMSYLEDPRIQFHYDKTLPELQQVPTVTDDIIAKIKHPSEFSM |
| | VFYTDGSAIKHPNVNKSHNAGMGIAQVQFKPEFTVINTWSIPLGDHTAQLAEVAAVEFACKK |
| | ALKIDGPVLIVTDSFYVAESVNKELPYWQSNGFFNNKKKPLKHVSKWKSIADCIQLKPDIIIIH |
| | EKGHQPTASTFHTEGNNLADKLATQGSYVVN (SEQ ID NO: 20289) |
| SFV3L_ | IPWLMKKPLQLTTLVPLQEYEERLLKQTMLTGSYKEKLQSLFLKYDALWQHWENQVGHRRI |
| P27401- | KPHHIATGTVNPRPQKQYPINPKAKASIQTVINDLLKQGVLIQQNSIMNTPVYPVPKPDGKWR |
| Pro_2mut | MVLDYREVNKTIPLIAAQNQHSAGILSSIFRGKYKTTLDLSNGFWAHSITPESYWLTAFTWLG |
| | QQYCWTRLPQGFLNSPALFNADVVDLLKEVPNVQVYVDDIYISHDDPREHLEQLEKVFSLLL |
| | NAGYVVSLKKSEIAQHEVEFLGFNITKEGRGLTETFKQKLLNITPPRDLKQLQSILGLLNFARN |
| | FIPNFSELVKPLYNIIATAPGKYITWTTDNSQQLQNIISMLNSAENLEERNPEVRLIMKVNTSPS |
| | AGYIRFYNEFAKRPIMYLNYVYTKAEVKFTNTEKLLTTIHKGLIKALDLGMGQEILVYSPIVS |
| | MTKIQKTPLPERKALPIRWITWMSYLEDPRIQFHYDKTLPELQQVPTVTDDIIAKIKHPSEFSM |
| | VFYTDGSAIKHPNVNKSHNAGMGIAQVQFKPEFTVINTWSIPLGDHTAQLAEVAAVEFACKK |
| | ALKIDGPVLIVTDSFYVAESVNKELPYWQSNGFFNNKKKPLKHVSKWKSIADCIQLKPDIIIIH |
| | EKGHQPTASTFHTEGNNLADKLATQGSYVVN (SEQ ID NO: 20290) |
| SFV3L_ | IPWLMKKPLQLTTLVPLQEYEERLLKQTMLTGSYKEKLQSLFLKYDALWQHWENQVGHRRI |
| P27401- | KPHHIATGTVNPRPQKQYPINPKAKASIQTVINDLLKQGVLIQQNSIMNTPVYPVPKPDGKWR |
| Pro_2mutA | MVLDYREVNKTIPLIAAQNQHSAGILSSIFRGKYKTTLDLSNGFWAHSITPESYWLTAFTWLG |
| | QQYCWTRLPQGFLNSPALFNADVVDLLKEVPNVQVYVDDIYISHDDPREHLEQLEKVFSLLL |
| | NAGYVVSLKKSEIAQHEVEFLGFNITKEGRGLTETFKQKLLNITPPRDLKQLQSILGKLNFARN |
| | FIPNFSELVKPLYNIIATAPGKYITWTTDNSQQLQNIISMLNSAENLEERNPEVRLIMKVNTSPS |
| | AGYIRFYNEFAKRPIMYLNYVYTKAEVKFTNTEKLLTTIHKGLIKALDLGMGQEILVYSPIVS |
| | MTKIQKTPLPERKALPIRWITWMSYLEDPRIQFHYDKTLPELQQVPTVTDDIIAKIKHPSEFSM |
| | VFYTDGSAIKHPNVNKSHNAGMGIAQVQFKPEFTVINTWSIPLGDHTAQLAEVAAVEFACKK |
| | ALKIDGPVLIVTDSFYVAESVNKELPYWQSNGFFNNKKKPLKHVSKWKSIADCIQLKPDIIIIH |
| | EKGHQPTASTFHTEGNNLADKLATQGSYVVN (SEQ ID NO: 20291) |
| SFVCP_ | MNPLQLLQPLPAEVKGTKLLAHWNSGATITCIPESFLEDEQPIKQTLIKTIHGEKQQNVYYLTF |
| Q87040 | KVKGRKVEAEVIASPYEYILLSPTDVPWLTQQPLQLTILVPLQEYQDRILNKTALPEEQKQQL |
| | KALFTKYDNLWQHWENQVGHRKIRPHNIATGDYPPRPQKQYPINPKAKPSIQIVIDDLLKQG |
| | VLTPQNSTMNTPVYPVPKPDGRWRMVLDYREVNKTIPLTAAQNQHSAGILATIVRQKYKTTL |
| | DLANGFWAHPITPDSYWLTAFTWQGKQYCWTRLPQGFLNSPALFTADAVDLLKEVPNVQV |
| | YVDDIYLSHDNPHEHIQQLEKVFQILLQAGYVVSLKKSEIGQRTVEFLGFNITKEGRGLTDTFK |
| | TKLLNVTPPKDLKQLQSILGLLNFARNFIPNFAELVQTLYNLIASSKGKYIEWTEDNTKQLNK |
| | VIEALNTASNLEERLPDQRLVIKVNTSPSAGYVRYYNESGKKPIMYLNYVFSKAELKFSMLEK |
| | LLTTMHKALIKAMDLAMGQEILVYSPIVSMTKIQKTPLPERKALPIRWITWMTYLEDPRIQFH |
| | YDKTLPELKHIPDVYTSSIPPLKHPSQYEGVFCTDGSAIKSPDPTKSNNAGMGIVHAIYNPEYKI |
| | LNQWSIPLGHHTAQMAEIAAVEFACKKALKVPGPVLVITDSFYVAESANKELPYWKSNGFVN |
| | NKKEPLKHISKWKSIAECLSIKPDITIQHEKGHQPINTSIHTEGNALADKLATQGSYVVN (SEQ |
| | ID NO: 20292) |
| SFVCP_ | MNPLQLLQPLPAEVKGTKLLAHWNSGATITCIPESFLEDEQPIKQTLIKTIHGEKQQNVYYLTF |
| Q87040_ | KVKGRKVEAEVIASPYEYILLSPTDVPWLTQQPLQLTILVPLQEYQDRILNKTALPEEQKQQL |
| 2mut | KALFTKYDNLWQHWENQVGHRKIRPHNIATGDYPPRPQKQYPINPKAKPSIQIVIDDLLKQG |
| | VLTPQNSTMNTPVYPVPKPDGRWRMVLDYREVNKTIPLTAAQNQHSAGILATIVRQKYKTTL |
| | DLANGFWAHPITPDSYWLTAFTWQGKQYCWTRLPQGFLNSPALFNADAVDLLKEVPNVQV |
| | YVDDIYLSHDNPHEHIQQLEKVFQILLQAGYVVSLKKSEIGQRTVEFLGFNITKEGRGLTDTFK |
| | TKLLNVTPPKDLKQLQSILGLLNFARNFIPNFAELVQTLYNLIASSPGKYIEWTEDNTKQLNKV |
| | IEALNTASNLEERLPDQRLVIKVNTSPSAGYVRYYNESGKKPIMYLNYVFSKAELKFSMLEKL |
| | LTTMHKALIKAMDLAMGQEILVYSPIVSMTKIQKTPLPERKALPIRWITWMTYLEDPRIQFHY |
| | DKTLPELKHIPDVYTSSIPPLKHPSQYEGVFCTDGSAIKSPDPTKSNNAGMGIVHAIYNPEYKIL |
| | NQWSIPLGHHTAQMAEIAAVEFACKKALKVPGPVLVITDSFYVAESANKELPYWKSNGFVN |
| | NKKEPLKHISKWKSIAECLSIKPDITIQHEKGHQPINTSIHTEGNALADKLATQGSYVVN (SEQ |
| | ID NO: 20293) |
| SFVCP_ | MNPLQLLQPLPAEVKGTKLLAHWNSGATITCIPESFLEDEQPIKQTLIKTIHGEKQQNVYYLTF |
| Q87040_ | KVKGRKVEAEVIASPYEYILLSPTDVPWLTQQPLQLTILVPLQEYQDRILNKTALPEEQKQQL |
| 2mutA | KALFTKYDNLWQHWENQVGHRKIRPHNIATGDYPPRPQKQYPINPKAKPSIQIVIDDLLKQG |
| | VLTPQNSTMNTPVYPVPKPDGRWRMVLDYREVNKTIPLTAAQNQHSAGILATIVRQKYKTTL |
| | DLANGFWAHPITPDSYWLTAFTWQGKQYCWTRLPQGFLNSPALFNADAVDLLKEVPNVQV |
| | YVDDIYLSHDNPHEHIQQLEKVFQILLQAGYVVSLKKSEIGQRTVEFLGFNITKEGRGLTDTFK |
| | TKLLNVTPPKDLKQLQSILGKLNFARNFIPNFAELVQTLYNLIASSPGKYIEWTEDNTKQLNK |
| | VIEALNTASNLEERLPDQRLVIKVNTSPSAGYVRYYNESGKKPIMYLNYVFSKAELKFSMLEK |
| | LLTTMHKALIKAMDLAMGQEILVYSPIVSMTKIQKTPLPERKALPIRWITWMTYLEDPRIQFH |
| | YDKTLPELKHIPDVYTSSIPPLKHPSQYEGVFCTDGSAIKSPDPTKSNNAGMGIVHAIYNPEYKI |
| | LNQWSIPLGHHTAQMAEIAAVEFACKKALKVPGPVLVITDSFYVAESANKELPYWKSNGFVN |
| | NKKEPLKHISKWKSIAECLSIKPDITIQHEKGHQPINTSIHTEGNALADKLATQGSYVVN (SEQ |
| | ID NO: 20294) |
| SFVCP_ | VPWLTQQPLQLTILVPLQEYQDRILNKTALPEEQKQQLKALFTKYDNLWQHWENQVGHRKI |
| Q87040- | RPHNIATGDYPPRPQKQYPINPKAKPSIQIVIDDLLKQGVLTPQNSTMNTPVYPVPKPDGRWR |
| Pro | MVLDYREVNKTIPLTAAQNQHSAGILATIVRQKYKTTLDLANGFWAHPITPDSYWLTAFTWQ |
| | GKQYCWTRLPQGFLNSPALFTADAVDLLKEVPNVQVYVDDIYLSHDNPHEHIQQLEKVFQIL |
| | LQAGYVVSLKKSEIGQRTVEFLGFNITKEGRGLTDTFKTKLLNVTPPKDLKQLQSILGLLNFA |
| | RNFIPNFAELVQTLYNLIASSKGKYIEWTEDNTKQLNKVIEALNTASNLEERLPDQRLVIKVNT |
| | SPSAGYVRYYNESGKKPIMYLNYVFSKAELKFSMLEKLLTTMHKALIKAMDLAMGQEILVY |
| | SPIVSMTKIQKTPLPERKALPIRWITWMTYLEDPRIQFHYDKTLPELKHIPDVYTSSIPPLKHPS |
| | QYEGVFCTDGSAIKSPDPTKSNNAGMGIVHAIYNPEYKILNQWSIPLGHHTAQMAEIAAVEFA |
| | CKKALKVPGPVLVITDSFYVAESANKELPYWKSNGFVNNKKEPLKHISKWKSIAECLSIKPDI |
| | TIQHEKGHQPINTSIHTEGNALADKLATQGSYVVN (SEQ ID NO: 20295) |
| SFVCP_ | VPWLTQQPLQLTILVPLQEYQDRILNKTALPEEQKQQLKALFTKYDNLWQHWENQVGHRKI |
| Q87040- | RPHNIATGDYPPRPQKQYPINPKAKPSIQIVIDDLLKQGVLTPQNSTMNTPVYPVPKPDGRWR |
| Pro_2mut | MVLDYREVNKTIPLTAAQNQHSAGILATIVRQKYKTTLDLANGFWAHPITPDSYWLTAFTWQ |
| | GKQYCWTRLPQGFLNSPALFNADAVDLLKEVPNVQVYVDDIYLSHDNPHEHIQQLEKVFQIL |
| | LQAGYVVSLKKSEIGQRTVEFLGFNITKEGRGLTDTFKTKLLNVTPPKDLKQLQSILGLLNFA |
| | RNFIPNFAELVQTLYNLIASSPGKYIEWTEDNTKQLNKVIEALNTASNLEERLPDQRLVIKVNT |
| | SPSAGYVRYYNESGKKPIMYLNYVFSKAELKFSMLEKLLTTMHKALIKAMDLAMGQEILVY |
| | SPIVSMTKIQKTPLPERKALPIRWITWMTYLEDPRIQFHYDKTLPELKHIPDVYTSSIPPLKHPS |
| | QYEGVFCTDGSAIKSPDPTKSNNAGMGIVHAIYNPEYKILNQWSIPLGHHTAQMAEIAAVEFA |
| | CKKALKVPGPVLVITDSFYVAESANKELPYWKSNGFVNNKKEPLKHISKWKSIAECLSIKPDI |
| | TIQHEKGHQPINTSIHTEGNALADKLATQGSYVVN (SEQ ID NO: 20296) |
| SFVCP_ | VPWLTQQPLQLTILVPLQEYQDRILNKTALPEEQKQQLKALFTKYDNLWQHWENQVGHRKI |
| Q87040- | RPHNIATGDYPPRPQKQYPINPKAKPSIQIVIDDLLKQGVLTPQNSTMNTPVYPVPKPDGRWR |
| Pro_2mutA | MVLDYREVNKTIPLTAAQNQHSAGILATIVRQKYKTTLDLANGFWAHPITPDSYWLTAFTWQ |
| | GKQYCWTRLPQGFLNSPALFNADAVDLLKEVPNVQVYVDDIYLSHDNPHEHIQQLEKVFQIL |
| | LQAGYVVSLKKSEIGQRTVEFLGFNITKEGRGLTDTFKTKLLNVTPPKDLKQLQSILGKLNFA |
| | RNFIPNFAELVQTLYNLIASSPGKYIEWTEDNTKQLNKVIEALNTASNLEERLPDQRLVIKVNT |
| | SPSAGYVRYYNESGKKPIMYLNYVFSKAELKFSMLEKLLTTMHKALIKAMDLAMGQEILVY |
| | SPIVSMTKIQKTPLPERKALPIRWITWMTYLEDPRIQFHYDKTLPELKHIPDVYTSSIPPLKHPS |
| | QYEGVFCTDGSAIKSPDPTKSNNAGMGIVHAIYNPEYKILNQWSIPLGHHTAQMAEIAAVEFA |
| | CKKALKVPGPVLVITDSFYVAESANKELPYWKSNGFVNNKKEPLKHISKWKSIAECLSIKPDI |
| | TIQHEKGHQPINTSIHTEGNALADKLATQGSYVVN (SEQ ID NO: 20297) |
| SMRVH_ | PRSRAIDIPVPHADKISWKITDPVWVDQWPLTYEKTLAAIALVQEQLAAGHIEPTNSPWNTPIF |
| P03364 | IIKKKSGSWRLLQDLRAVNKVMVPMGALQPGLPSPVAIPLNYHKIVIDLKDCFFTIPLHPEDRP |
| | YFAFSVPQINFQSPMPRYQWKVLPQGMANSPTLCQKFVAAAIAPVRSQWPEAYILHYMDDIL |
| | LACDSAEAAKACYAHIISCLTSYGLKIAPDKVQVSEPFSYLGFELHHQQVFTPRVCLKTDHLK |
| | TLNDFQKLLGDIQWLRPYLKLPTSALVPLNNILKGDPNPLSVRALTPEAKQSLALINKAIQNQS |
| | VQQISYNLPLVLLLLPTPHTPTAVFWQPNGTDPTKNGSPLLWLHLPASPSKVLLTYPSLLAMLI |
| | IKGRYTGRQLFGRDPHSIIIPYTQDQLTWLLQTSDEWAIALSSFTGDIDNHYPSDPVIQFAKLH |
| | QFIFPKITKCAPIPQATLVFTDGSSNGIAAYVIDNQPISIKSPYLSAQLVELYAILQVFTVLAHQP |
| | FNLYTDSAYIAQSVPLLETVPFIKSSTNATPLFSKLQQLILNRQHPFFIGHLRAHLNLPGPLAEG |
| | NALADAATQIFPIISD (SEQ ID NO: 20298) |
| SMRVH_ | PRSRAIDIPVPHADKISWKITDPVWVDQWPLTYEKTLAAIALVQEQLAAGHIEPTNSPWNTPIF |
| P03364_ | IIKKKSGSWRLLQDLRAVNKVMVPMGALQPGLPSPVAIPLNYHKIVIDLKDCFFTIPLHPEDRP |
| 2mut | YFAFSVPQINFQSPMPRYQWKVLPQGMANSPTLCQKFVAAAIAPVRSQWPEAYILHYMDDIL |
| | LACDSAEAAKACYAHIISCLTSYGLKIAPDKVQVSEPFSYLGFELHHQQVFTPRVCLKTDHLK |
| | TLNDFQKLLGDIQWLRPYLKLPTSALVPLNNILKPDPNPLSVRALTPEAKQSLALINKAIQNQS |
| | VQQISYNLPLVLLLLPTPHTPTAVFWQPNGTDPTKNGSPLLWLHLPASPSKVLLTYPSLLAMLI |
| | IKGRYTGRQLFGRDPHSIIIPYTQDQLTWLLQTSDEWAIALSSFTGDIDNHYPSDPVIQFAKLH |
| | QFIFPKITKCAPIPQATLVFTDGSSNGIAAYVIDNQPISIKSPYLSAQLVELYAILQVFTVLAHQP |
| | FNLYTDSAYIAQSVPLLETVPFIKSSTNATPLFSKLQQLILNRQHPFFIGHLRAHLNLPGPLAEG |
| | NALADAATQIFPIISD (SEQ ID NO: 20299) |
| SMRVH_ | PRSRAIDIPVPHADKISWKITDPVWVDQWPLTYEKTLAAIALVQEQLAAGHIEPTNSPWNTPIF |
| P03364_ | IIKKKSGSWRLLQDLRAVNKVMVPMGALQPGLPSPVAPPLNYHKIVIDLKDCFFTIPLHPEDR |
| 2mutB | PYFAFSVPQINFQSPMPRYQWKVLPQGMANSPTLCQKFVAAAIAPVRSQWPEAYILHYMDDI |
| | LLACDSAEAAKACYAHIISCLTSYGLKIAPDKVQVSEPFSYLGFELHHQQVFTPRVCLKTDHL |
| | KTLNDFQKLLGDIQWLRPYLKLPTSALVPLNNILKPDPNPLSVRALTPEAKQSLALINKAIQNQ |
| | SVQQISYNLPLVLLLLPTPHTPTAVFWQPNGTDPTKNGSPLLWLHLPASPSKVLLTYPSLLAM |
| | LIIKGRYTGRQLFGRDPHSIIIPYTQDQLTWLLQTSDEWAIALSSFTGDIDNHYPSDPVIQFAKL |
| | HQFIFPKITKCAPIPQATLVFTDGSSNGIAAYVIDNQPISIKSPYLSAQLVELYAILQVFTVLAHQ |
| | PFNLYTDSAYIAQSVPLLETVPFIKSSTNATPLFSKLQQLILNRQHPFFIGHLRAHLNLPGPLAE |
| | GNALADAATQIFPIISD (SEQ ID NO: 20300) |
| SRV2_ | LATAVDILAPQRYADPITWKSDEPVWVDQWPLTQEKLAAAQQLVQEQLQAGHIIESNSPWN |
| P51517 | TPIFVIKKKSGKWRLLQDLRAVNATMVLMGALQPGLPSPVAIPQGYFKIVIDLKDCFFTIPLQP |
| | VDQKRFAFSLPSTNFKQPMKRYQWKVLPQGMANSPTLCQKYVAAAIEPVRKSWAQMYIIHY |
| | MDDILIAGKLGEQVLQCFAQLKQALTTTGLQIAPEKVQLQDPYTYLGFQINGPKITNQKAVIR |
| | RDKLQTLNDFQKLLGDINWLRPYLHLTTGDLKPLFDILKGDSNPNSPRSLSEAALASLQKVET |
| | AIAEQFVTQIDYTQPLTFLIFNTTLTPTGLFWQNNPVMWVHLPASPKKVLLPYYDAIADLIILG |
| | RDNSKKYFGLEPSTIIQPYSKSQIHWLMQNTETWPIACASYAGNIDNHYPPNKLIQFCKLHAV |
| | VFPRIISKTPLDNALLVFTDGSSTGIAAYTFEKTTVRFKTSHTSAQLVELQALIAVLSAFPHRAL |
| | NVYTDSAYLAHSIPLLETVSHIKHISDTAKFFLQCQQLIYNRSIPFYLGHIRAHSGLPGPLSQGN |
| | HITDLATKVVATTLTT (SEQ ID NO: 20301) |
| SRV2_ | LATAVDILAPQRYADPITWKSDEPVWVDQWPLTQEKLAAAQQLVQEQLQAGHIIESNSPWN |
| P51517_ | TPIFVIKKKSGKWRLLQDLRAVNATMVLMGALQPGLPSPVAPPQGYFKIVIDLKDCFFTIPLQP |
| 2mutB | VDQKRFAFSLPSTNFKQPMKRYQWKVLPQGMANSPTLCQKYVAAAIEPVRKSWAQMYIIHY |
| | MDDILIAGKLGEQVLQCFAQLKQALTTTGLQIAPEKVQLQDPYTYLGFQINGPKITNQKAVIR |
| | RDKLQTLNDFQKLLGDINWLRPYLHLTTGDLKPLFDILKGDSNPNSPRSLSEAALASLQKVET |
| | AIAEQFVTQIDYTQPLTFLIFNTTLTPTGLFWQNNPVMWVHLPASPKKVLLPYYDAIADLIILG |
| | RDNSKKYFGLEPSTIIQPYSKSQIHWLMQNTETWPIACASYAGNIDNHYPPNKLIQFCKLHAV |
| | VFPRIISKTPLDNALLVFTDGSSTGIAAYTFEKTTVRFKTSHTSAQLVELQALIAVLSAFPHRAL |
| | NVYTDSAYLAHSIPLLETVSHIKHISDTAKFFLQCQQLIYNRSIPFYLGHIRAHSGLPGPLSQGN |
| | HITDLATKVVATTLTT (SEQ ID NO: 20302) |
| WDSV_ | SCQTKNTLNIDEYLLQFPDQLWASLPTDIGRMLVPPITIKIKDNASLPSIRQYPLPKDKTEGLRP |
| O92815 | LISSLENQGILIKCHSPCNTPIFPIKKAGRDEYRMIHDLRAINNIVAPLTAVVASPTTVLSNLAPS |
| | LHWFTVIDLSNAFFSVPIHKDSQYLFAFTFEGHQYTWTVLPQGFIHSPTLFSQALYQSLHKIKF |
| | KISSEICIYMDDVLIASKDRDTNLKDTAVMLQHLASEGHKVSKKKLQLCQQEVVYLGQLLTP |
| | EGRKILPDRKVTVSQFQQPTTIRQIRAFLGLVGYCRHWIPEFSIHSKFLEKQLKKDTAEPFQLD |
| | DQQVEAFNKLKHAITTAPVLVVPDPAKPFQLYTSHSEHASIAVLTQKHAGRTRPIAFLSSKFD |
| | AIESGLPPCLKACASIHRSLTQADSFILGAPLIIYTTHAICTLLQRDRSQLVTASRFSKWEADLL |
| | RPELTFVACSAVSPAHLYMQSCENNIPPHDCVLLTHTISRPRPDLSDLPIPDPDMTLFSDGSYTT |
| | GRGGAAVVMHRPVTDDFIIIHQQPGGASAQTAELLALAAACHLATDKTVNIYTDSRYAYGV |
| | VHDFGHLWMHRGFVTSAGTPIKNHKEIEYLLKQIMKPKQVSVIKIEAHTKGVSMEVRGNAA |
| | ADEAAKNAVFLVQR (SEQ ID NO: 20303) |
| WDSV_ | SCQTKNTLNIDEYLLQFPDQLWASLPTDIGRMLVPPITIKIKDNASLPSIRQYPLPKDKTEGLRP |
| O92815_ | LISSLENQGILIKCHSPCNTPIFPIKKAGRDEYRMIHDLRAINNIVAPLTAVVASPTTVLSNLAPS |
| 2mut | LHWFTVIDLSNAFFSVPIHKDSQYLFAFTFEGHQYTWTVLPQGFIHSPTLFNQALYQSLHKIKF |
| | KISSEICIYMDDVLIASKDRDTNLKDTAVMLQHLASEGHKVSKKKLQLCQQEVVYLGQLLTP |
| | EGRKILPDRKVTVSQFQQPTTIRQIRAFLGLVGYCRHWIPEFSIHSKFLEKQLKPDTAEPFQLD |
| | DQQVEAFNKLKHAITTAPVLVVPDPAKPFQLYTSHSEHASIAVLTQKHAGRTRPIAFLSSKFD |
| | AIESGLPPCLKACASIHRSLTQADSFILGAPLIIYTTHAICTLLQRDRSQLVTASRFSKWEADLL |
| | RPELTFVACSAVSPAHLYMQSCENNIPPHDCVLLTHTISRPRPDLSDLPIPDPDMTLFSDGSYTT |
| | GRGGAAVVMHRPVTDDFIIIHQQPGGASAQTAELLALAAACHLATDKTVNIYTDSRYAYGV |
| | VHDFGHLWMHRGFVTSAGTPIKNHKEIEYLLKQIMKPKQVSVIKIEAHTKGVSMEVRGNAA |
| | ADEAAKNAVFLVQR (SEQ ID NO: 20304) |
| WDSV_ | SCQTKNTLNIDEYLLQFPDQLWASLPTDIGRMLVPPITIKIKDNASLPSIRQYPLPKDKTEGLRP |
| O92815_ | LISSLENQGILIKCHSPCNTPIFPIKKAGRDEYRMIHDLRAINNIVAPLTAVVASPTTVLSNLAPS |
| 2mutA | LHWFTVIDLSNAFFSVPIHKDSQYLFAFTFEGHQYTWTVLPQGFIHSPTLFNQALYQSLHKIKF |
| | KISSEICIYMDDVLIASKDRDTNLKDTAVMLQHLASEGHKVSKKKLQLCQQEVVYLGQLLTP |
| | EGRKILPDRKVTVSQFQQPTTIRQIRAFLGKVGYCRHFIPEFSIHSKFLEKQLKPDTAEPFQLDD |
| | QQVEAFNKLKHAITTAPVLVVPDPAKPFQLYTSHSEHASIAVLTQKHAGRTRPIAFLSSKFDAI |
| | ESGLPPCLKACASIHRSLTQADSFILGAPLIIYTTHAICTLLQRDRSQLVTASRFSKWEADLLRP |
| | ELTFVACSAVSPAHLYMQSCENNIPPHDCVLLTHTISRPRPDLSDLPIPDPDMTLFSDGSYTTG |
| | RGGAAVVMHRPVTDDFIIIHQQPGGASAQTAELLALAAACHLATDKTVNIYTDSRYAYGVV |
| | HDFGHLWMHRGFVTSAGTPIKNHKEIEYLLKQIMKPKQVSVIKIEAHTKGVSMEVRGNAAA |
| | DEAAKNAVFLVQR (SEQ ID NO: 20305) |
| WMSV_ | VLNLEEEYRLHEKPVPSSIDPSWLQLFPTVWAERAGMGLANQVPPVVVELRSGASPVAVRQY |
| P03359 | PMSKEAREGIRPHIQRFLDLGVLVPCQSPWNTPLLPVKKPGTNDYRPVQDLREINKRVQDIHP |
| | TVPNPYNLLSSLPPSHTWYSVLDLKDAFFCLKLHPNSQPLFAFEWRDPEKGNTGQLTWTRLP |
| | QGFKNSPTLFDEALHRDLAPFRALNPQVVLLQYVDDLLVAAPTYRDCKEGTQKLLQELSKLG |
| | YRVSAKKAQLCQKEVTYLGYLLKEGKRWLTPARKATVMKIPPPTTPRQVREFLGTAGFCRL |
| | WIPGFASLAAPLYPLTKESIPFIWTEEHQKAFDRIKEALLSAPALALPDLTKPFTLYVDERAGV |
| | ARGVLTQTLGPWRRPVAYLSKKLDPVASGWPTCLKAVAAVALLLKDADKLTLGQNVTVIAS |
| | HSLESIVRQPPDRWMTNARMTHYQSLLLNERVSFAPPAVLNPATLLPVESEATPVHRCSEILA |
| | EETGTRRDLKDQPLPGVPAWYTDGSSFIAEGKRRAGAAIVDGKRTVWASSLPEGTSAQKAEL |
| | VALTQALRLAEGKDINIYTDSRYAFATAHIHGAIYKQRGLLTSAGKDIKNKEEILALLEAIHLP |
| | KRVAIIHCPGHQKGNDPVATGNRRADEAAKQAALSTRVLAETTKP (SEQ ID NO: 20306) |
| WMSV_ | VLNLEEEYRLHEKPVPSSIDPSWLQLFPTVWAERAGMGLANQVPPVVVELRSGASPVAVRQY |
| P03359_ | PMSKEAREGIRPHIQRFLDLGVLVPCQSPWNTPLLPVKKPGTNDYRPVQDLREINKRVQDIHP |
| 3mut | TVPNPYNLLSSLPPSHTWYSVLDLKDAFFCLKLHPNSQPLFAFEWRDPEKGNTGQLTWTRLP |
| | QGFKNSPTLFNEALHRDLAPFRALNPQVVLLQYVDDLLVAAPTYRDCKEGTQKLLQELSKLG |
| | YRVSAKKAQLCQKEVTYLGYLLKEGKRWLTPARKATVMKIPPPTTPRQVREFLGTAGFCRL |
| | WIPGFASLAAPLYPLTKPSIPFIWTEEHQKAFDRIKEALLSAPALALPDLTKPFTLYVDERAGV |
| | ARGVLTQTLGPWRRPVAYLSKKLDPVASGWPTCLKAVAAVALLLKDADKLTLGQNVTVIAS |
| | HSLESIVRQPPDRWMTNARMTHYQSLLLNERVSFAPPAVLNPATLLPVESEATPVHRCSEILA |
| | EETGTRRDLKDQPLPGVPAWYTDGSSFIAEGKRRAGAAIVDGKRTVWASSLPEGTSAQKAEL |
| | VALTQALRLAEGKDINIYTDSRYAFATAHIHGAIYKQRGWLTSAGKDIKNKEEILALLEAIHLP |
| | KRVAIIHCPGHQKGNDPVATGNRRADEAAKQAALSTRVLAETTKP (SEQ ID NO: 20307) |
| WMSV_ | VLNLEEEYRLHEKPVPSSIDPSWLQLFPTVWAERAGMGLANQVPPVVVELRSGASPVAVRQY |
| P03359_ | PMSKEAREGIRPHIQRFLDLGVLVPCQSPWNTPLLPVKKPGTNDYRPVQDLREINKRVQDIHP |
| 3mutA | TVPNPYNLLSSLPPSHTWYSVLDLKDAFFCLKLHPNSQPLFAFEWRDPEKGNTGQLTWTRLP |
| | QGFKNSPTLFNEALHRDLAPFRALNPQVVLLQYVDDLLVAAPTYRDCKEGTQKLLQELSKLG |
| | YRVSAKKAQLCQKEVTYLGYLLKEGKRWLTPARKATVMKIPPPTTPRQVREFLGKAGFCRL |
| | FIPGFASLAAPLYPLTKPSIPFIWTEEHQKAFDRIKEALLSAPALALPDLTKPFTLYVDERAGVA |
| | RGVLTQTLGPWRRPVAYLSKKLDPVASGWPTCLKAVAAVALLLKDADKLTLGQNVTVIASH |
| | SLESIVRQPPDRWMTNARMTHYQSLLLNERVSFAPPAVLNPATLLPVESEATPVHRCSEILAE |
| | ETGTRRDLKDQPLPGVPAWYTDGSSFIAEGKRRAGAAIVDGKRTVWASSLPEGTSAQKAELV |
| | ALTQALRLAEGKDINIYTDSRYAFATAHIHGAIYKQRGWLTSAGKDIKNKEEILALLEAIHLPK |
| | RVAIIHCPGHQKGNDPVATGNRRADEAAKQAALSTRVLAETTKP (SEQ ID NO: 20308) |
| XMRV6_ | TLNIEDEYRLHETSKEPDVPLGSTWLSDFPQAWAETGGMGLAVRQAPLIIPLKATSTPVSIKQ |
| A1Z651 | YPMSQEARLGIKPHIQRLLDQGILVPCQSPWNTPLLPVKKPGTNDYRPVQDLREVNKRVEDIH |
| | PTVPNPYNLLSGLPPSHQWYTVLDLKDAFFCLRLHPTSQPLFAFEWRDPEMGISGQLTWTRLP |
| | QGFKNSPTLFDEALHRDLADFRIQHPDLILLQYVDDLLLAATSEQDCQRGTRALLQTLGNLG |
| | YRASAKKAQICQKQVKYLGYLLKEGQRWLTEARKETVMGQPTPKTPRQLREFLGTAGFCRL |
| | WIPGFAEMAAPLYPLTKTGTLFNWGPDQQKAYQEIKQALLTAPALGLPDLTKPFELFVDEKQ |
| | GYAKGVLTQKLGPWRRPVAYLSKKLDPVAAGWPPCLRMVAAIAVLTKDAGKLTMGQPLVI |
| | LAPHAVEALVKQPPDRWLSNARMTHYQAMLLDTDRVQFGPVVALNPATLLPLPEKEAPHDC |
| | LEILAETHGTRPDLTDQPIPDADYTWYTDGSSFLQEGQRRAGAAVTTETEVIWARALPAGTSA |
| | QRAELIALTQALKMAEGKKLNVYTDSRYAFATAHVHGEIYRRRGLLTSEGREIKNKNEILAL |
| | LKALFLPKRLSIIHCPGHQKGNSAEARGNRMADQAAREAAMKAVLETSTLL (SEQ ID NO: |
| | 20309) |
| XMRV6_ | TLNIEDEYRLHETSKEPDVPLGSTWLSDFPQAWAETGGMGLAVRQAPLIIPLKATSTPVSIKQ |
| A1Z651_ | YPMSQEARLGIKPHIQRLLDQGILVPCQSPWNTPLLPVKKPGTNDYRPVQDLREVNKRVEDIH |
| 3mut | PTVPNPYNLLSGLPPSHQWYTVLDLKDAFFCLRLHPTSQPLFAFEWRDPEMGISGQLTWTRLP |
| | QGFKNSPTLFNEALHRDLADFRIQHPDLILLQYVDDLLLAATSEQDCQRGTRALLQTLGNLG |
| | YRASAKKAQICQKQVKYLGYLLKEGQRWLTEARKETVMGQPTPKTPRQLREFLGTAGFCRL |
| | WIPGFAEMAAPLYPLTKPGTLFNWGPDQQKAYQEIKQALLTAPALGLPDLTKPFELFVDEKQ |
| | GYAKGVLTQKLGPWRRPVAYLSKKLDPVAAGWPPCLRMVAAIAVLTKDAGKLTMGQPLVI |
| | LAPHAVEALVKQPPDRWLSNARMTHYQAMLLDTDRVQFGPVVALNPATLLPLPEKEAPHDC |
| | LEILAETHGTRPDLTDQPIPDADYTWYTDGSSFLQEGQRRAGAAVTTETEVIWARALPAGTSA |
| | QRAELIALTQALKMAEGKKLNVYTDSRYAFATAHVHGEIYRRRGWLTSEGREIKNKNEILAL |
| | LKALFLPKRLSIIHCPGHQKGNSAEARGNRMADQAAREAAMKAVLETSTLL (SEQ ID NO: |
| | 20310) |
| XMRV6_ | TLNIEDEYRLHETSKEPDVPLGSTWLSDFPQAWAETGGMGLAVRQAPLIIPLKATSTPVSIKQ |
| A1Z651_ | YPMSQEARLGIKPHIQRLLDQGILVPCQSPWNTPLLPVKKPGTNDYRPVQDLREVNKRVEDIH |
| 3mutA | PTVPNPYNLLSGLPPSHQWYTVLDLKDAFFCLRLHPTSQPLFAFEWRDPEMGISGQLTWTRLP |
| | QGFKNSPTLFNEALHRDLADFRIQHPDLILLQYVDDLLLAATSEQDCQRGTRALLQTLGNLG |
| | YRASAKKAQICQKQVKYLGYLLKEGQRWLTEARKETVMGQPTPKTPRQLREFLGKAGFCRL |
| | FIPGFAEMAAPLYPLTKPGTLFNWGPDQQKAYQEIKQALLTAPALGLPDLTKPFELFVDEKQG |
| | YAKGVLTQKLGPWRRPVAYLSKKLDPVAAGWPPCLRMVAAIAVLTKDAGKLTMGQPLVIL |
| | APHAVEALVKQPPDRWLSNARMTHYQAMLLDTDRVQFGPVVALNPATLLPLPEKEAPHDCL |
| | EILAETHGTRPDLTDQPIPDADYTWYTDGSSFLQEGQRRAGAAVTTETEVIWARALPAGTSA |
| | QRAELIALTQALKMAEGKKLNVYTDSRYAFATAHVHGEIYRRRGWLTSEGREIKNKNEILAL |
| | LKALFLPKRLSIIHCPGHQKGNSAEARGNRMADQAAREAAMKAVLETSTLL (SEQ ID NO: |
| | 20311) |

[0283] In some embodiments, reverse transcriptase domains are modified, for example by site-specific mutation. In some embodiments, reverse transcriptase domains are engineered to have improved properties, e.g. SuperScript IV (SSIV) reverse transcriptase derived from the MMLV RT. In some embodiments, the reverse transcriptase domain may be engineered to have lower error rates, e.g., as described in WO2001068895, incorporated herein by reference. In some embodiments, the reverse transcriptase domain may be engineered to be more thermostable. In some embodiments, the reverse transcriptase domain may be engineered to be more processive. In some embodiments, the reverse transcriptase domain may be engineered to have tolerance to inhibitors. In some embodiments, the reverse transcriptase domain may be engineered to be faster. In some embodiments, the reverse transcriptase domain may be engineered to better tolerate modified nucleotides in the RNA template. In some embodiments, the reverse transcriptase domain may be engineered to insert modified DNA nucleotides. In some embodiments, the reverse transcriptase domain is engineered to bind a template RNA. In some embodiments, one or more mutations are chosen from D200N, L603W, T330P, D524G, E562Q, D583N, P51L, S67R, E67K, T197A, H204R, E302K, F309N, W313F, L435G, N454K, H594Q, L671P, E69K, or D653N in the RT domain of murine leukemia virus reverse transcriptase or a corresponding mutation at a corresponding position of another RT domain.

[0284] In some embodiments, an RT domain (e.g., as listed in Table 6) comprises one or more mutations as listed in Table 2 below. In some embodiment, an RT domain as listed in Table 6 comprises one, two, three, four, five, or six of the mutations listed in the corresponding row of Table 2 below.

TABLE 2
Exemplary RT domain mutations (relative to corresponding wild-
type sequences as listed in the corresponding row of Table 6)

| RT Domain Name | Mutation(s) | | | | | |
|---|---|---|---|---|---|---|
| AVIRE_P03360 | | | | | | |
| AVIRE_P03360_3mut | D200N | G330P | L605W | | | |
| AVIRE_P03360_3mutA | D200N | G330P | L605W | T306K | W313F | |
| BAEVM_P10272 | | | | | | |
| BAEVM_P10272_3mut | D198N | E328P | L602W | | | |
| BAEVM_P10272_3mutA | D198N | E328P | L602W | T304K | W311F | |
| BLVAU_P25059 | | | | | | |
| BLVAU_P25059_2mut | E159Q | G286P | | | | |
| BLVJ_P03361 | | | | | | |
| BLVJ_P03361_2mut | E159Q | L524W | | | | |
| BLVJ_P03361_2mutB | E159Q | L524W | I97P | | | |
| FFV_O93209 | D21N | | | | | |
| FFV_O93209_2mut | D21N | T293N | T419P | | | |
| FFV_O93209_2mutA | D21N | T293N | T419P | L393K | | |
| FFV_O93209-Pro | | | | | | |
| FFV_O93209-Pro_2mut | T207N | T333P | | | | |
| FFV_O93209-Pro_2mutA | T207N | T333P | L307K | | | |
| FLV_P10273 | | | | | | |
| FLV_P10273_3mut | D199N | L602W | | | | |
| FLV_P10273_3mutA | D199N | L602W | T305K | W312F | | |
| FOAMV_P14350 | D24N | | | | | |
| FOAMV_P14350_2mut | D24N | T296N | S420P | | | |
| FOAMV_P14350_2mutA | D24N | T296N | S420P | L396K | | |
| FOAMV_P14350-Pro | | | | | | |
| FOAMV_P14350-Pro_2mut | T207N | S331P | | | | |
| FOAMV_P14350-Pro_2mutA | T207N | S331P | L307K | | | |
| GALV_P21414 | | | | | | |
| GALV_P21414_3mut | D198N | E328P | L600W | | | |
| GALV_P21414_3mutA | D198N | E328P | L600W | T304K | W311F | |
| HTL1A_P03362 | | | | | | |
| HTL1A_P03362_2mut | E152Q | R279P | | | | |
| HTL1A_P03362_2mutB | E152Q | R279P | L90P | | | |
| HTL1C_P14078 | | | | | | |
| HTL1C_P14078_2mut | E152Q | R279P | | | | |
| HTL1L_P0C211 | | | | | | |
| HTL1L_P0C211_2mut | E149Q | L527W | | | | |
| HTL1L_P0C211_2mutB | E149Q | L527W | L87P | | | |
| HTL32_Q0R5R2 | | | | | | |
| HTL32_Q0R5R2_2mut | E149Q | L526W | | | | |
| HTL32_Q0R5R2_2mutB | E149Q | L526W | L87P | | | |
| HTL3P_Q4U0X6 | | | | | | |
| HTL3P_Q4U0X6_2mut | E149Q | L526W | | | | |
| HTL3P_Q4U0X6_2mutB | E149Q | L526W | L87P | | | |
| HTLV2_P03363_2mut | E147Q | G274P | | | | |
| JSRV_P31623 | | | | | | |
| JSRV_P31623_2mutB | A100P | | | | | |
| KORV_Q9TTC1 | D32N | | | | | |
| KORV_Q9TTC1_3mut | D32N | D322N | E452P | L724W | | |
| KORV_Q9TTC1_3mutA | D32N | D322N | E452P | L724W | T428K | W435F |
| KORV_Q9TTC1-Pro | | | | | | |
| KORV_Q9TTC1-Pro_3mut | D231N | E361P | L633W | | | |
| KORV_Q9TTC1-Pro_3mutA | D231N | E361P | L633W | T337K | W344F | |
| MLVAV_P03356 | | | | | | |
| MLVAV_P03356_3mut | D200N | T330P | L603W | | | |
| MLVAV_P03356_3mutA | D200N | T330P | L603W | T306K | W313F | |
| MLVBM_Q7SVK7 | | | | | | |
| MLVBM_Q7SVK7 | | | | | | |
| MLVBM_Q7SVK7_3mut | D200N | T330P | L603W | | | |
| MLVBM_Q7SVK7_3mut | D200N | T330P | L603W | | | |
| MLVBM_Q7SVK7_3mutA_WS | D199N | T329P | L602W | T305K | W312F | |
| MLVBM_Q7SVK7_3mutA_WS | D199N | T329P | L602W | T305K | W312F | |
| MLVCB_P08361 | | | | | | |
| MLVCB_P08361_3mut | D200N | T330P | L603W | | | |
| MLVCB_P08361_3mutA | D200N | T330P | L603W | T306K | W313F | |
| MLVF5_P26810 | | | | | | |
| MLVF5_P26810_3mut | D200N | T330P | L603W | | | |
| MLVF5_P26810_3mutA | D200N | T330P | L603W | T306K | W313F | |
| MLVFF_P26809_3mut | D200N | T330P | L603W | | | |
| MLVFF_P26809_3mutA | D200N | T330P | L603W | T306K | W313F | |
| MLVMS_P03355 | | | | | | |
| MLVMS_P03355 | | | | | | |
| MLVMS_P03355_3mut | D200N | T330P | L603W | | | |
| MLVMS_P03355_3mut | D200N | T330P | L603W | | | |
| MLVMS_P03355_3mutA_WS | D200N | T330P | L603W | T306K | W313F | |
| MLVMS_P03355_3mutA_WS | D200N | T330P | L603W | T306K | W313F | |
| MLVMS_P03355_PLV919 | D200N | T330P | L603W | T306K | W313F | H8Y |
| MLVMS_P03355_PLV919 | D200N | T330P | L603W | T306K | W313F | H8Y |
| MLVRD_P11227 | | | | | | |
| MLVRD_P11227_3mut | D200N | T330P | L603W | | | |
| MMTVB_P03365 | D26N | | | | | |
| MMTVB_P03365 | D26N | | | | | |
| MMTVB_P03365_2mut | D26N | G401P | | | | |
| MMTVB_P03365_2mut_WS | G400P | | | | | |
| MMTVB_P03365_2mut_WS | G400P | | | | | |
| MMTVB_P03365_2mutB | D26N | G401P | V215P | | | |
| MMTVB_P03365_2mutB | D26N | G401P | V215P | | | |
| MMTVB_P03365_2mutB_WS | G400P | V212P | | | | |
| MMTVB_P03365_2mutB_WS | G400P | V212P | | | | |
| MMTVB_P03365_WS | | | | | | |
| MMTVB_P03365_WS | | | | | | |
| MMTVB_P03365-Pro | | | | | | |
| MMTVB_P03365-Pro | | | | | | |
| MMTVB_P03365-Pro_2mut | G309P | | | | | |
| MMTVB_P03365-Pro_2mut | G309P | | | | | |
| MMTVB_P03365-Pro_2mutB | G309P | V123P | | | | |
| MMTVB_P03365-Pro_2mutB | G309P | V123P | | | | |
| MPMV_P07572 | | | | | | |
| MPMV_P07572_2mutB | G289P | I103P | | | | |
| PERV_Q4VFZ2 | | | | | | |
| PERV_Q4VFZ2 | | | | | | |
| PERV_Q4VFZ2_3mut | D199N | E329P | L602W | | | |
| PERV_Q4VFZ2_3mut | D199N | E329P | L602W | | | |
| PERV_Q4VFZ2_3mutA_WS | D196N | E326P | L599W | T302K | W309F | |
| PERV_Q4VFZ2_3mutA_WS | D196N | E326P | L599W | T302K | W309F | |
| SFV1_P23074 | D24N | | | | | |
| SFV1_P23074_2mut | D24N | T296N | N420P | | | |
| SFV1_P23074_2mutA | D24N | T296N | N420P | L396K | | |
| SFV1_P23074-Pro | | | | | | |
| SFV1_P23074-Pro_2mut | T207N | N331P | | | | |
| SFV1_P23074-Pro_2mutA | T207N | N331P | L307K | | | |
| SFV3L_P27401 | D24N | | | | | |
| SFV3L_P27401_2mut | D24N | T296N | N422P | | | |
| SFV3L_P27401_2mutA | D24N | T296N | N422P | L396K | | |
| SFV3L_P27401-Pro | | | | | | |
| SFV3L_P27401-Pro_2mut | T307N | N333P | | | | |
| SFV3L_P27401-Pro_2mutA | T307N | N333P | L307K | | | |
| SFVCP_Q87040 | D24N | | | | | |
| SFVCP_Q87040_2mut | D24N | T296N | K422P | | | |
| SFVCP_Q87040_2mutA | D24N | T296N | K422P | L396K | | |
| SFVCP_Q87040-Pro | | | | | | |
| SFVCP_Q87040-Pro_2mut | T207N | K333P | | | | |
| SFVCP_Q87040-Pro_2mutA | T207N | K333P | L307K | | | |
| SMRVH_P03364 | | | | | | |
| SMRVH_P03364_2mut | G288P | | | | | |
| SMRVH_P03364_2mutB | G288P | I102P | | | | |
| SRV2_P51517 | | | | | | |
| SRV2_P51517_2mutB | I103P | | | | | |
| WDSV_O92815 | | | | | | |
| WDSV_O92815_2mut | S183N | K312P | | | | |
| WDSV_O92815_2mutA | S183N | K312P | L288K | W295F | | |
| WMSV_P03359 | | | | | | |
| WMSV_P03359_3mut | D198N | E328P | L600W | | | |
| WMSV_P03359_3mutA | D198N | E328P | L600W | T304K | W311F | |
| XMRV6_A1Z651 | | | | | | |
| XMRV6_A1Z651_3mut | D200N | T330P | L603W | | | |
| XMRV6_A1Z651_3mutA | D200N | T330P | L603W | T306K | W313F | |

[0285] In some embodiments, a gene modifying polypeptide comprises the RT domain from a retroviral reverse transcriptase, e.g., a wild-type M-MLV RT, e.g., comprising the following sequence:

M-MLV (WT):
(SEQ ID NO: 2)
TLNIEDEYRLHETSKEPDVSLGSTWLSDFPQAWAETGGMGLAVRQAPLIIPLKATSTPVSIKQYP
MSQEARLGIKPHIQRLLDQGILVPCQSPWNTPLLPVKKPGTNDYRPVQDLREVNKRVEDIHPTVP
NPYNLLSGLPPSHQWYTVLDLKDAFFCLRLHPTSQPLFAFEWRDPEMGISGQLTWTRLPQGFKN
SPTLFDEALHRDLADFRIQHPDLILLQYVDDLLLAATSELDCQQGTRALLQTLGNLGYRASAKKA
QICQKQVKYLGYLLKEGQRWLTEARKETVMGQPTPKTPRQLREFLGTAGFCRLWIPGFAEMAA
PLYPLTKTGTLFNWGPDQQKAYQEIKQALLTAPALGLPDLTKPFELFVDEKQGYAKGVLTQKLG
PWRRPVAYLSKKLDPVAAGWPPCLRMVAAIAVLTKDAGKLTMGQPLVILAPHAVEALVKQPPD
RWLSNARMTHYQALLLDTDRVQFGPVVALNPATLLPLPEEGLQHNCLDILAEAHGTRPDLTDQP
LPDADHTWYTDGSSLLQEGQRKAGAAVTTETEVIWAKALPAGTSAQRAELIALTQALKMAEGK
KLNVYTDSRYAFATAHIHGEIYRRRGLLTSEGKEIKNKDEILALLKALFLPKRLSIIHCPGHQKGH
SAEARGNRMADQAARKAAITETPDTSTLLI

[0286] In some embodiments, a gene modifying polypeptide comprises the RT domain from a retroviral reverse transcriptase, e.g., an M-MLV RT, e.g., comprising the following sequence:

(SEQ ID NO: 3)
TLNIEDEHRLHETSKEPDVSLGSTWLSDFPQAWAETGGMGLAVRQAPLIIPLKATSTPVSIKQYP
MSQEARLGIKPHIQRLLDQGILVPCQSPWNTPLLPVKKPGTNDYRPVQDLREVNKRVEDIHPTVP
NPYNLLSGLPPSHQWYTVLDLKDAFFCLRLHPTSQPLFAFEWRDPEMGISGQLTWTRLPQGFKN
SPTLFDEALHRDLADFRIQHPDLILLQYVDDLLLAATSELDCQQGTRALLQTLGNLGYRASAKKA
QICQKQVKYLGYLLKEGQRWLTEARKETVMGQPTPKTPRQLREFLGTAGFCRLWIPGFAEMAA
PLYPLTKTGTLFNWGPDQQKAYQEIKQALLTAPALGLPDLTKPFELFVDEKQGYAKGVLTQKLG
PWRRPVAYLSKKLDPVAAGWPPCLRMVAAIAVLTKDAGKLTMGQPLVILAPHAVEALVKQPPD
RWLSNARMTHYQALLLDTDRVQFGPVVALNPATLLPLPEEGLQHNCLDILAEAHGTRPDLTDQP
LPDADHTWYTDGSSLLQEGQRKAGAAVTTETEVIWAKALPAGTSAQRAELIALTQALKMAEGK
KLNVYTDSRYAFATAHIHGEIYRRRGLLTSEGKEIKNKDEILALLKALFLPKRLSIIHCPGHQKGH
SAEARGNRMADQAARKAAITETPDTSTLL

[0287] In some embodiments, a gene modifying polypeptide comprises the RT domain from a retroviral reverse transcriptase comprising the sequence of amino acids 659-1329 of NP_057933. In embodiments, the gene modifying polypeptide further comprises one additional amino acid at the N-terminus of the sequence of amino acids 659-1329 of NP_057933, e.g., as shown below:

(SEQ ID NO: 4)
TLNIEDEHRLHETSKEPDVSLGSTWLSDFPQAWAETGGMGLAVRQAPLIIPLKATSTPVSIKQYP
MSQEARLGIKPHIQRLLDQGILVPCQSPWNTPLLPVKKPGTNDYRPVQDLREVNKRVEDIHPT
VPNPYNLLSGLPPSHQWYTVLDLKDAFFCLRLHPTSQPLFAFEWRDPEMGISGQLTWTRLP
QGFKNSPTLFDEALHRDLADFRIQHPDLILLQYVDDLLLAATSELDCQQGTRALLQTLGNL
GYRASAKKAQICQKQVKYLGYLLKEGQRWLTEARKETVMGQPTPKTPRQLREFLGTAGFCRL
WIPGFAEMAAPLYPLTKTGTLFNWGPDQQKAYQEIKQALLTAPALGLPDLTKPFELFVDEKQGY
AKGVLTQKLGPWRRPVAYLSKKLDPVAAGWPPCLRMVAAIAVLTKDAGKLTMGQPLVILAPH
AVEALVKQPPDRWLSNARMTHYQALLLDTDRVQFGPVVALNPATLLPLPEEGLQHNCLDILAE
AHGTRPDLTDQPLPDADHTWYTDGSSLLQEGQRKAGAAVTTETEVIWAKALPAGTSAQRAELI
ALTQALKMAEGKKLNVYTDSRYAFATAHIHGEIYRRRGLLTSEGKEIKNKDEILALLKALFLPKR
LSIIHCPGHQKGHSAEARGNRMADQAARKAA

Core RT (bold), annotated per above
RNAseH (underlined), annotated per above

[0288] In embodiments, the gene modifying polypeptide further comprises one additional amino acid at the C-terminus of the sequence of amino acids 659-1329 of NP_057933. In embodiments, the gene modifying polypeptide comprises an RNaseH1 domain (e.g., amino acids 1178-1318 of NP_057933).

[0289] In some embodiments, a retroviral reverse transcriptase domain, e.g., M-MLV RT, may comprise one or more mutations from a wild-type sequence that may improve features of the RT, e.g., thermostability, processivity, and/or template binding. In some embodiments, an M-MLV RT domain comprises, relative to the M-MLV (WT) sequence above, one or more mutations, e.g., selected from D200N, L603W, T330P, T306K, W313F, D524G, E562Q, D583N, P51L, S67R, E67K, T197A, H204R, E302K, F309N, L435G, N454K, H594Q, D653N, R110S, K103L, e.g., a combination of mutations, such as D200N, L603W, and T330P, optionally further including T306K and W313F. In some embodiments, an M-MLV RT used herein comprises the mutations D200N, L603W, T330P, T306K and W313F. In embodiments, the mutant M-MLV RT comprises the following amino acid sequence:

M-MLV (PE2):
(SEQ ID NO: 5)
TLNIEDEYRLHETSKEPDVSLGSTWLSDFPQAWAETGGMGLAVRQAPLIIPLKATSTPVSIKQYP
MSQEARLGIKPHIQRLLDQGILVPCQSPWNTPLLPVKKPGTNDYRPVQDLREVNKRVEDIHPTVP
NPYNLLSGLPPSHQWYTVLDLKDAFFCLRLHPTSQPLFAFEWRDPEMGISGQLTWTRLPQGFKN
SPTLFNEALHRDLADFRIQHPDLILLQYVDDLLLAATSELDCQQGTRALLQTLGNLGYRASAKKA
QICQKQVKYLGYLLKEGQRWLTEARKETVMGQPTPKTPRQLREFLGKAGFCRLFIPGFAEMAAP
LYPLTKPGTLFNWGPDQQKAYQEIKQALLTAPALGLPDLTKPFELFVDEKQGYAKGVLTQKLGP
WRRPVAYLSKKLDPVAAGWPPCLRMVAAIAVLTKDAGKLTMGQPLVILAPHAVEALVKQPPDR
WLSNARMTHYQALLLDTDRVQFGPVVALNPATLLPLPEEGLQHNCLDILAEAHGTRPDLTDQPL
PDADHTWYTDGSSLLQEGQRKAGAAVTTETEVIWAKALPAGTSAQRAELIALTQALKMAEGKK
LNVYTDSRYAFATAHIHGEIYRRRGWLTSEGKEIKNKDEILALLKALFLPKRLSIIHCPGHQKGHS
AEARGNRMADQAARKAAITETPDTSTLLI

[0290] In some embodiments, a writing domain (e.g., RT domain) comprises an RNA-binding domain, e.g., that specifically binds to an RNA sequence. In some embodiments, a template RNA comprises an RNA sequence that is specifically bound by the RNA-binding domain of the writing domain.

[0291] In some embodiments, the reverse transcription domain only recognizes and reverse transcribes a specific template, e.g., a template RNA of the system. In some embodiments, the template comprises a sequence or structure that enables recognition and reverse transcription by a reverse transcription domain. In some embodiments, the template comprises a sequence or structure that enables association with an RNA-binding domain of a polypeptide component of a genome engineering system described herein. In some embodiments, the genome engineering system reverse preferably transcribes a template comprising an association sequence over a template lacking an association sequence.

[0292] The writing domain may also comprise DNA-dependent DNA polymerase activity, e.g., comprise enzymatic activity capable of writing DNA into the genome from a template DNA sequence. In some embodiments, DNA-dependent DNA polymerization is employed to complete second-strand synthesis of a target site edit. In some embodiments, the DNA-dependent DNA polymerase activity is provided by a DNA polymerase domain in the polypeptide. In some embodiments, the DNA-dependent DNA polymerase activity is provided by a reverse transcriptase domain that is also capable of DNA-dependent DNA polymerization, e.g., second-strand synthesis. In some embodiments, the DNA-dependent DNA polymerase activity is provided by a second polypeptide of the system. In some embodiments, the DNA-dependent DNA polymerase activity is provided by an endogenous host cell polymerase that is optionally recruited to the target site by a component of the genome engineering system.

[0293] In some embodiments, the reverse transcriptase domain has a lower probability of premature termination rate (P_{off}) in vitro relative to a reference reverse transcriptase domain. In some embodiments, the reference reverse transcriptase domain is a viral reverse transcriptase domain, e.g., the RT domain from M-MLV.

[0294] In some embodiments, the reverse transcriptase domain has a lower probability of premature termination rate (P_{off}) in vitro of less than about 5×10³/nt, 5×10⁴/nt, or 5×10⁻⁶/nt, e.g., as measured on a 1094 nt RNA. In embodiments, the in vitro premature termination rate is determined as described in Bibillo and Eickbush (2002) J Biol Chem 277(38):34836-34845 (incorporated by reference herein its entirety).

[0295] In some embodiments, the reverse transcriptase domain is able to complete at least about 30% or 50% of integrations in cells. The percent of complete integrations can be measured by dividing the number of substantially full-length integration events (e.g., genomic sites that comprise at least 98% of the expected integrated sequence) by the number of total (including substantially full-length and partial) integration events in a population of cells. In embodiments, the integrations in cells is determined (e.g., across the integration site) using long-read amplicon sequencing, e.g., as described in Karst et al. (2020) bioRxiv doi.org/10.1101/645903 (incorporated by reference herein in its entirety).

[0296] In embodiments, quantifying integrations in cells comprises counting the fraction of integrations that contain at least about 75%, 80%, 85%, 90%, 95%, 96%, 97%, 98%, 99%, or 100% of the DNA sequence corresponding to the template RNA (e.g., a template RNA having a length of at least 0.05, 0.1, 0.5, 0.6, 0.7, 0.8, 0.9, 1, 1.5, 2, 3, 4, or 5 kb, e.g., a length between 0.5-0.6, 0.6-0.7, 0.7-0.8, 0.8-0.9, 1.0-1.2, 1.2-1.4, 1.4-1.6, 1.6-1.8, 1.8-2.0, 2-3, 3-4, or 4-5 kb).

[0297] In some embodiments, the reverse transcriptase domain is capable of polymerizing dNTPs in vitro. In embodiments, the reverse transcriptase domain is capable of polymerizing dNTPs in vitro at a rate between 0.1-50 nt/see (e.g., between 0.1-1, 1-10, or 10-50 nt/sec). In embodiments, polymerization of dNTPs by the reverse transcriptase domain is measured by a single-molecule assay, e.g., as described in Schwartz and Quake (2009) PNAS 106(48):20294-20299 (incorporated by reference in its entirety).

[0298] In some embodiments, the reverse transcriptase domain has an in vitro error rate (e.g., misincorporation of nucleotides) of between 1×10⁻³-1×10⁻⁴ or 1×10⁻⁴-1×10⁻⁵ substitutions/nt, e.g., as described in Yasukawa et al. (2017) Biochem Biophys Res Commun 492(2):147-153 (incorporated herein by reference in its entirety). In some embodiments, the reverse transcriptase domain has an error rate (e.g., misincorporation of nucleotides) in cells (e.g., HEK293T cells) of between 1×10⁻³-1×10⁻⁴ or 1×10⁻⁴-1×10⁻⁵ substitutions/nt, e.g., by long-read amplicon sequencing, e.g., as described in Karst et al. (2020) bioRxiv doi.org/10.1101/645903 (incorporated by reference herein in its entirety).

[0299] In some embodiments, the reverse transcriptase domain is capable of performing reverse transcription of a target RNA in vitro. In some embodiments, the reverse transcriptase requires a primer of at least 3 nucleotides to initiate reverse transcription of a template. In some embodiments, reverse transcription of the target RNA is determined by detection of cDNA from the target RNA (e.g., when provided with a ssDNA primer, e.g., which anneals to the target with at least 3, 4, 5, 6, 7, 8, 9, or 10 nt at the 3′ end), e.g., as described in Bibillo and Eickbush (2002) J Biol Chem 277(38):34836-34845 (incorporated herein by reference in its entirety).

[0300] In some embodiments, the reverse transcriptase domain performs reverse transcription at least 5 or 10 times more efficiently (e.g., by cDNA production), e.g., when converting its RNA template to cDNA, for example, as compared to an RNA template lacking the protein binding motif (e.g., a 3′ UTR). In embodiments, efficiency of reverse transcription is measured as described in Yasukawa et al. (2017) Biochem Biophys Res Commun 492(2):147-153 (incorporated by reference herein in its entirety).

[0301] In some embodiments, the reverse transcriptase domain specifically binds a specific RNA template with higher frequency (e.g., about 5 or 10-fold higher frequency) than any endogenous cellular RNA, e.g., when expressed in cells (e.g., HEK293T cells). In embodiments, frequency of specific binding between the reverse transcriptase domain and the template RNA are measured by CLIP-seq, e.g., as described in Lin and Miles (2019) Nucleic Acids Res 47(11):5490-5501 (incorporated herein by reference in its entirety).

### Template Nucleic Acid Binding Domain

[0302] The gene modifying polypeptide typically contains regions capable of associating with the template nucleic acid (e.g., template RNA). In some embodiments, the template nucleic acid binding domain is an RNA binding domain. In some embodiments, the RNA binding domain is a modular domain that can associate with RNA molecules containing specific signatures, e.g., structural motifs. In other embodiments, the template nucleic acid binding domain (e.g., RNA binding domain) is contained within the reverse transcription domain, e.g., the reverse transcriptase-derived component has a known signature for RNA preference.

[0303] In other embodiments, the template nucleic acid binding domain (e.g., RNA binding domain) is contained within the target DNA binding domain. For example, in some embodiments, the DNA binding domain is a CRISPR-associated protein that recognizes the structure of a template nucleic acid (e.g., template RNA) comprising a gRNA. In some embodiments, a gene modifying polypeptide comprises a DNA-binding domain comprising a CRISPR-associated protein that associates with a gRNA scaffold that allows the DNA-binding domain to bind a target genomic DNA sequence. In some embodiments, the gRNA scaffold and gRNA spacer is comprised within the template nucleic acid (e.g., template RNA), thus the DNA-binding domain is also the template nucleic acid binding domain. In some embodiments, the polypeptide possesses RNA binding function in multiple domains, e.g., can bind a gRNA structure in a CRISPR-associated DNA binding domain and an additional sequence or structure in a reverse transcriptase domain.

[0304] In some embodiments, the RNA binding domain is capable of binding to a template RNA with greater affinity than a reference RNA binding domain. In some embodiments, the reference RNA binding domain is an RNA binding domain from Cas9 of S. pyogenes. In some embodiments, the RNA binding domain is capable of binding to a template RNA with an affinity between 100 pM-10 nM (e.g., between 100 pM-1 nM or 1 nM-10 nM). In some embodiments, the affinity of a RNA binding domain for its template RNA is measured in vitro, e.g., by thermophoresis, e.g., as described in Asmari et al. Methods 146:107-119 (2018) (incorporated by reference herein in its entirety). In some embodiments, the affinity of a RNA binding domain for its template RNA is measured in cells (e.g., by FRET or CLIP-Seq).

[0305] In some embodiments, the RNA binding domain is associated with the template RNA in vitro at a frequency at least about 5-fold or 10-fold higher than with a scrambled RNA. In some embodiments, the frequency of association between the RNA binding domain and the template RNA or scrambled RNA is measured by CLIP-seq, e.g., as described in Lin and Miles (2019) Nucleic Acids Res 47(11):5490-5501 (incorporated by reference herein in its entirety). In some embodiments, the RNA binding domain is associated with the template RNA in cells (e.g., in HEK293T cells) at a frequency at least about 5-fold or 10-fold higher than with a scrambled RNA. In some embodiments, the frequency of association between the RNA binding domain and the template RNA or scrambled RNA is measured by CLIP-seq, e.g., as described in Lin and Miles (2019), supra.

### RNA Binding Domains (RBDs)

[0306] In some embodiments, a gene modifying polypeptide as described herein comprises an RNA binding domain (RBD). In some embodiments, a gene modifying polypeptide as described herein comprises an RBD comprising the amino acid sequence of an RBD as listed in Table 31, or an amino acid sequence having at least 75%, 80%, 85%, 90%, 95%, 96%, 97%, 98%, or 99% identity thereto. In some embodiments, the RBD of a gene modifying polypeptide as described herein binds to an RNA binding partner, e.g., as listed in Table 31. In embodiments, the RBD comprises the amino acid sequence of an RBD as listed in any one row of Table 31, or an amino acid sequence having at least 75%, 80%, 85%, 90%, 95%, 96%, 97%, 98%, or 99% identity thereto, and binds to the RNA binding partner listed in the same row of Table 31.

TABLE 31
Exemplary RNA binding domain sequences

| | RNA | |
|---|---|---|
| | binding | |
| Name | partner | Amino Acid sequence |
| MCP_ | MS2 | MASNFTQFVLVDNGGTGDVTVAPSNFANGIAEWISSNSRSQAYKVTCSVRQSSAQNRKYT |
| v1 | | IKVEVPKGAWRSYLNMELTIPIFATNSDCELIVKAMQGLLKDGNPIPSAIAANSGIYGSG |
| | | RA (SEQ ID NO: 20312) |
| MCP_ | MS2 | MASNFTQFVLVDNGGTGDVTVAPSNFANGVAEWISSNSRSQAYKVTCSVRQSSAQKRKYT |
| v2 | | IKVEVPKVATQTVGGVELPVAAWRSYLNMELTIPIFATNSDCELIVKAMQGLLKDGNPIP |
| | | SAIAANSGLY (SEQ ID NO: 20313) |
| PCP | PP7 | MGSMSKTIVLSVGEATRTLTEIQSTADRQIFEEKVGPLVGRLRLTASLRQNGAKTAYRVN |
| | | LKLDQADVVDSGLPKVRYTQVWSHDVTIVANSTEASRKSLYDLTKSLVATSQVEDLVVNL |
| | | VPLGRGSGRA (SEQ ID NO: 20314) |
| Com | com | MGSMKSIRCKNCNKLLFKADSFDHIEIRCPRCKRHIIMLNACEHPTEKHCGKREKITHSD |
| | | ETVRYGSGRA (SEQ ID NO: 20315) |
| LS4 | LS4-1, | YVRFEVPEDMQNEALSLLEKVRESGKVKKGTNRTTHAVYRGLAKLVYIAEDVDPPEIVAH |
| | CS1 | LPLLCEEKNVPYIYVKSKNDLGRAVGGWPIGASAAIINEGELRKELGSLVEKIKGLQKRS |
| | | HMHLE (SEQ ID NO: 20316) |
| LS12 | LS12- | YVRFEVPEDMQNEALSLLEKVRESGKVKKGTNSTTLAVSRGLAKLVYIAEDVDPPEIVAH |
| | 1, CS2 | LPLLCEEKNVPYIYVKSKNDLGRAVGRVYPGASAAIINEGELRKELGSLVEKIKGLQKRS |
| | | HMHLE (SEQ ID NO: 20317) |
| lambdaN | BoxB | MDAQTRRRERRAEKQAQWKAAN (SEQ ID NO: 20318) |
| (1-22) | | |
| L7Ae | Kt | MYVRFEVPEDMQNEALSLLEKVRESGKVKKGTNETTKAVERGLAKLVYIAEDVDPPEIVA |
| | | HLPLLCEEKNVPYIYVKSKNDLGRAVGIEVPCASAAIINEGELRKELGSLVEKIKGLQK |
| | | (SEQ ID NO: 20319) |
| L7Ae | Kt | YVRFEVPEDMQNEALSLLEKVRESGKVKKGTNETTKAVERGLAKLVYIAEDVDPPEIVAH |
| | | LPLLCEEKNVPYIYVKSKNDLGRAVGIEVPCASAAIINEGELRKELGSLVEKIKGLQKRS |
| | | HMHLE (SEQ ID NO: 20320) |

### Endonuclease Domains and DNA Binding Domains

[0307] In some embodiments, a gene modifying polypeptide possesses the function of DNA target site cleavage via an endonuclease domain. In some embodiments, a gene modifying polypeptide comprises a DNA binding domain, e.g., for binding to a target nucleic acid. In some embodiments, a domain (e.g., a Cas domain) of the gene modifying polypeptide comprises two or more smaller domains, e.g., a DNA binding domain and an endonuclease domain. It is understood that when a DNA binding domain (e.g., a Cas domain) is said to bind to a target nucleic acid sequence, in some embodiments, the binding is mediated by a gRNA.

[0308] In some embodiments, a domain has two functions. For example, in some embodiments, the endonuclease domain is also a DNA-binding domain. In some embodiments, the endonuclease domain is also a template nucleic acid (e.g., template RNA) binding domain. For example, in some embodiments, a polypeptide comprises a CRISPR-associated endonuclease domain that binds a template RNA comprising a gRNA, binds a target DNA sequence (e.g., with complementarity to a portion of the gRNA), and cuts the target DNA sequence. In some embodiments, an endonuclease domain or endonuclease/DNA-binding domain from a heterologous source can be used or can be modified (e.g., by insertion, deletion, or substitution of one or more residues) in a gene modifying system described herein.

[0309] In some embodiments, a nucleic acid encoding the endonuclease domain or endonuclease/DNA binding domain is altered from its natural sequence to have altered codon usage, e.g. improved for human cells. In some embodiments, the endonuclease element is a heterologous endonuclease element, such as a Cas endonuclease (e.g., Cas9), a type-II restriction endonuclease (e.g., Fok1), a meganuclease (e.g., I-SceI), or other endonuclease domain.

[0310] In certain aspects, the DNA-binding domain of a gene modifying polypeptide described herein is selected, designed, or constructed for binding to a desired host DNA target sequence. In certain embodiments, the DNA-binding domain of the polypeptide is a heterologous DNA-binding element. In some embodiments the heterologous DNA binding element is a zinc-finger element or a TAL effector element, e.g., a zinc-finger or TAL polypeptide or functional fragment thereof. In some embodiments the heterologous DNA binding element is a sequence-guided DNA binding element, such as Cas9, Cpf1, or other CRISPR-related protein that has been altered to have no endonuclease activity. In some embodiments the heterologous DNA binding element retains endonuclease activity. In some embodiments, the heterologous DNA binding element retains partial endonuclease activity to cleave ssDNA, e.g., possesses nickase activity. In specific embodiments, the heterologous DNA-binding domain can be any one or more of Cas9, TAL domain, ZF domain, Myb domain, combinations thereof, or multiples thereof.

[0311] In some embodiments, DNA-binding domains are modified, for example by site-specific mutation, increasing or decreasing DNA-binding elements (for example, number and/or specificity of zinc fingers), etc., to alter DNA-binding specificity and affinity. In some embodiments a nucleic acid sequence encoding the DNA binding domain is altered from its natural sequence to have altered codon usage, e.g. improved for human cells. In embodiments, the DNA binding domain comprises one or more modifications relative to a wild-type DNA binding domain, e.g., a modification via directed evolution, e.g., phage-assisted continuous evolution (PACE).

[0312] In some embodiments, the DNA binding domain comprises a meganuclease domain (e.g., as described herein, e.g., in the endonuclease domain section), or a functional fragment thereof. In some embodiments, the meganuclease domain possesses endonuclease activity, e.g., double-strand cleavage and/or nickase activity. In other embodiments, the meganuclease domain has reduced activity, e.g., lacks endonuclease activity, e.g., the meganuclease is catalytically inactive. In some embodiments, a catalytically inactive meganuclease is used as a DNA binding domain, e.g., as described in Fonfara et al. Nucleic Acids Res 40(2):847-860 (2012), incorporated herein by reference in its entirety.

[0313] In some embodiments, a gene modifying polypeptide comprises a modification to a DNA-binding domain, e.g., relative to the wild-type polypeptide. In some embodiments, the DNA-binding domain comprises an addition, deletion, replacement, or modification to the amino acid sequence of the original DNA-binding domain. In some embodiments, the DNA-binding domain is modified to include a heterologous functional domain that binds specifically to a target nucleic acid (e.g., DNA) sequence of interest. In some embodiments, the functional domain replaces at least a portion (e.g., the entirety of) the prior DNA-binding domain of the polypeptide. In some embodiments, the functional domain comprises a zinc finger (e.g., a zinc finger that specifically binds to the target nucleic acid (e.g., DNA) sequence of interest. In some embodiments, the functional domain comprises a Cas domain (e.g., a Cas domain that specifically binds to the target nucleic acid (e.g., DNA) sequence of interest. In some embodiments, the Cas domain comprises a Cas9 or a mutant or variant thereof (e.g., as described herein). In embodiments, the Cas domain is associated with a guide RNA (gRNA), e.g., as described herein. In embodiments, the Cas domain is directed to a target nucleic acid (e.g., DNA) sequence of interest by the gRNA. In embodiments, the Cas domain is encoded in the same nucleic acid (e.g., RNA) molecule as the gRNA. In embodiments, the Cas domain is encoded in a different nucleic acid (e.g., RNA) molecule from the gRNA.

[0314] In some embodiments, the DNA binding domain is capable of binding to a target sequence (e.g., a dsDNA target sequence) with greater affinity than a reference DNA binding domain. In some embodiments, the reference DNA binding domain is a DNA binding domain from Cas9 of S. pyogenes.

[0315] In some embodiments, the DNA binding domain is capable of binding to a target sequence (e.g., a dsDNA target sequence) with an affinity between 100 pM-10 nM (e.g., between 100 pM-1 nM or 1 nM-10 nM).

[0316] In some embodiments, the affinity of a DNA binding domain for its target sequence (e.g., dsDNA target sequence) is measured in vitro, e.g., by thermophoresis, e.g., as described in Asmari et al. Methods 146:107-119 (2018) (incorporated by reference herein in its entirety).

[0317] In embodiments, the DNA binding domain is capable of binding to its target sequence (e.g., dsDNA target sequence), e.g., with an affinity between 100 pM-10 nM (e.g., between 100 pM-1 nM or 1 nM-10 nM) in the presence of a molar excess of scrambled sequence competitor dsDNA, e.g., of about 100-fold molar excess.

[0318] In some embodiments, the DNA binding domain is found associated with its target sequence (e.g., dsDNA target sequence) more frequently than any other sequence in the genome of a target cell, e.g., human target cell, e.g., as measured by ChIP-seq (e.g., in HEK293T cells), e.g., as described in He and Pu (2010) Curr. Protoc Mol Biol Chapter 21 (incorporated herein by reference in its entirety). In some embodiments, the DNA binding domain is found associated with its target sequence (e.g., dsDNA target sequence) at least about 5-fold or 10-fold, more frequently than any other sequence in the genome of a target cell, e.g., as measured by ChIP-seq (e.g., in HEK293T cells), e.g., as described in He and Pu (2010), supra.

[0319] In some embodiments, the endonuclease domain has nickase activity and cleaves one strand of a target DNA. In some embodiments, nickase activity reduces the formation of double-stranded breaks at the target site. In some embodiments, the endonuclease domain creates a staggered nick structure in the first and second strands of a target DNA. In some embodiments, a staggered nick structure generates free 3′ overhangs at the target site. In some embodiments, free 3′ overhangs at the target site improve editing efficiency, e.g., by enhancing access and annealing of a 3′ homology region of a template nucleic acid. In some embodiments, a staggered nick structure reduces the formation of double-stranded breaks at the target site.

[0320] In some embodiments, the endonuclease domain cleaves both strands of a target DNA, e.g., results in blunt-end cleavage of a target with no ssDNA overhangs on either side of the cut-site. The amino acid sequence of an endonuclease domain of a gene modifying system described herein may be at least about 50%, at least about 60%, at least about 70%, at least about 80%, at least about 85%, at least about 90%, at least about 95%, at least about 96%, at least about 97%, at least about 98%, at least about 99% identical to the amino acid sequence of an endonuclease domain described herein, e.g., an endonuclease domain as described herein.

[0321] In certain embodiments, the heterologous endonuclease is Fok1 or a functional fragment thereof. In certain embodiments, the heterologous endonuclease is a Holliday junction resolvase or homolog thereof, such as the Holliday junction resolving enzyme from Sulfolobus solfataricus—Ssol Hje (Govindaraju et al., Nucleic Acids Research 44:7, 2016). In certain embodiments, the heterologous endonuclease is the endonuclease of the large fragment of a spliceosomal protein, such as Prp8 (Mahbub et al., Mobile DNA 8:16, 2017). In certain embodiments, the heterologous endonuclease is derived from a CRISPR-associated protein, e.g., Cas9. In certain embodiments, the heterologous endonuclease is engineered to have only ssDNA cleavage activity, e.g., only nickase activity, e.g., be a Cas9 nickase, e.g., SpCas9 with D10A, H840A, or N863A mutations. Table 8 provides exemplary Cas proteins and mutations associated with nickase activity. In still other embodiments, homologous endonuclease domains are modified, for example by site-specific mutation, to alter DNA endonuclease activity. In still other embodiments, endonuclease domains are modified to reduce DNA-sequence specificity, e.g., by truncation to remove domains that confer DNA-sequence specificity or mutation to inactivate regions conferring DNA-sequence specificity.

[0322] In some embodiments, the endonuclease domain has nickase activity and does not form double-stranded breaks. In some embodiments, the endonuclease domain forms single-stranded breaks at a higher frequency than double-stranded breaks, e.g., at least 90%, 95%, 96%, 97%, 98%, or 99% of the breaks are single-stranded breaks, or less than 10%, 5%, 4%, 3%, 2%, or 1% of the breaks are double-stranded breaks. In some embodiments, the endonuclease forms substantially no double-stranded breaks.

[0323] In some embodiments, the endonuclease does not form detectable levels of double-stranded breaks. In some embodiments, the endonuclease domain has nickase activity that nicks the target site DNA of the first strand; e.g., in some embodiments, the endonuclease domain cuts the genomic DNA of the target site near to the site of alteration on the strand that will be extended by the writing domain. In some embodiments, the endonuclease domain has nickase activity that nicks the target site DNA of the first strand and does not nick the target site DNA of the second strand. For example, when a polypeptide comprises a CRISPR-associated endonuclease domain having nickase activity, in some embodiments, said CRISPR-associated endonuclease domain nicks the target site DNA strand containing the PAM site (e.g., and does not nick the target site DNA strand that does not contain the PAM site). As a further example, when a polypeptide comprises a CRISPR-associated endonuclease domain having nickase activity, in some embodiments, said CRISPR-associated endonuclease domain nicks the target site DNA strand not containing the PAM site (e.g., and does not nick the target site DNA strand that contains the PAM site).

[0324] In some other embodiments, the endonuclease domain has nickase activity that nicks the target site DNA of the first strand and the second strand. Without wishing to be bound by theory, after a writing domain (e.g., RT domain) of a polypeptide described herein polymerizes (e.g., reverse transcribes) from the heterologous object sequence of a template nucleic acid (e.g., template RNA), the cellular DNA repair machinery must repair the nick on the first DNA strand. The target site DNA now contains two different sequences for the first DNA strand: one corresponding to the original genomic DNA (e.g., having a free 5′ end) and a second corresponding to that polymerized from the heterologous object sequence (e.g., having a free 3′ end). It is thought that the two different sequences equilibrate with one another, first one hybridizing the second strand, then the other, and which sequence the cellular DNA repair apparatus incorporates into its repaired target site may be a stochastic process. Without wishing to be bound by theory, it is thought that introducing an additional nick to the second-strand may bias the cellular DNA repair machinery to adopt the heterologous object sequence-based sequence more frequently than the original genomic sequence (Anzalone et al. Nature 576:149-157 (2019)). In some embodiments, the additional nick is positioned at least 10, 15, 20, 25, 30, 35, 40, 45, 50, 55, 60, 65, 70, 75, 80, 85, 90, 95, 100, 105, 110, 115, 120, 125, 130, 135, 140, 145, or 150 nucleotides 5′ or 3′ of the target site modification (e.g., the insertion, deletion, or substitution) or to the nick on the first strand.

[0325] Alternatively or additionally, without wishing to be bound by theory, it is thought that an additional nick to the second strand may promote second-strand synthesis. In some embodiments, where the gene modifying system has inserted or substituted a portion of the first strand, synthesis of a new sequence corresponding to the insertion/substitution in the second strand is necessary.

[0326] In some embodiments, the polypeptide comprises a single domain having endonuclease activity (e.g., a single endonuclease domain) and said domain nicks both the first strand and the second strand. For example, in such an embodiment the endonuclease domain may be a CRISPR-associated endonuclease domain, and the template nucleic acid (e.g., template RNA) comprises a gRNA spacer that directs nicking of the first strand and an additional gRNA spacer that directs nicking of the second strand. In some embodiments, the polypeptide comprises a plurality of domains having endonuclease activity, and a first endonuclease domain nicks the first strand and a second endonuclease domain nicks the second strand (optionally, the first endonuclease domain does not (e.g., cannot) nick the second strand and the second endonuclease domain does not (e.g., cannot) nick the first strand).

[0327] In some embodiments, the endonuclease domain is capable of nicking a first strand and a second strand. In some embodiments, the first and second strand nicks occur at the same position in the target site but on opposite strands. In some embodiments, the second strand nick occurs in a staggered location, e.g., upstream or downstream, from the first nick. In some embodiments, the endonuclease domain generates a target site deletion if the second strand nick is upstream of the first strand nick. In some embodiments, the endonuclease domain generates a target site duplication if the second strand nick is downstream of the first strand nick. In some embodiments, the endonuclease domain generates no duplication and/or deletion if the first and second strand nicks occur in the same position of the target site. In some embodiments, the endonuclease domain has altered activity depending on protein conformation or RNA-binding status, e.g., which promotes the nicking of the first or second strand (e.g., as described in Christensen et al. PNAS 2006; incorporated by reference herein in its entirety).

[0328] In some embodiments, the endonuclease domain comprises a meganuclease, or a functional fragment thereof. In some embodiments, the endonuclease domain comprises a homing endonuclease, or a functional fragment thereof. In some embodiments, the endonuclease domain comprises a meganuclease from the LAGLIDADG (SEQ ID NO: 21647), GIY-YIG, HNH, His-Cys Box, or PD-(D/E) XK families, or a functional fragment or variant thereof, e.g., which possess conserved amino acid motifs, e.g., as indicated in the family names. In some embodiments, the endonuclease domain comprises a meganuclease, or fragment thereof, chosen from, e.g., I-SmaMI (Uniprot F7WD42), I-SceI (Uniprot P03882), I-AniI (Uniprot P03880), I-DmoI (Uniprot P21505), I-CreI (Uniprot P05725), I-TevI (Uniprot P13299), I-OnuI (Uniprot Q4VWW5), or I-BmoI (Uniprot Q9ANR6). In some embodiments, the meganuclease is naturally monomeric, e.g., I-SceI, I-TevI, or dimeric, e.g., I-CreI, in its functional form. For example, the LAGLIDADG meganucleases (“LAGLIDADG” disclosed as SEQ ID NO: 21647) with a single copy of the LAGLIDADG motif (SEQ ID NO: 21647) generally form homodimers, whereas members with two copies of the LAGLIDADG motif (SEQ ID NO: 21647) are generally found as monomers. In some embodiments, a meganuclease that normally forms as a dimer is expressed as a fusion, e.g., the two subunits are expressed as a single ORF and, optionally, connected by a linker, e.g., an I-CreI dimer fusion (Rodriguez-Fornes et al. Gene Therapy 2020; incorporated by reference herein in its entirety). In some embodiments, a meganuclease, or a functional fragment thereof, is altered to favor nickase activity for one strand of a double-stranded DNA molecule, e.g., I-SceI (K1221 and/or K2231) (Niu et al. J Mol Biol 2008), I-AniI (K227M) (McConnell Smith et al. PNAS 2009), I-DmoI (Q42A and/or K120M) (Molina et al. J Biol Chem 2015). In some embodiments, a meganuclease or functional fragment thereof possessing this preference for single-strand cleavage is used as an endonuclease domain, e.g., with nickase activity. In some embodiments, an endonuclease domain comprises a meganuclease, or a functional fragment thereof, which naturally targets or is engineered to target a safe harbor site, e.g., an I-CreI targeting SH6 site (Rodriguez-Fornes et al., supra). In some embodiments, an endonuclease domain comprises a meganuclease, or a functional fragment thereof, with a sequence tolerant catalytic domain, e.g., I-TevI recognizing the minimal motif CNNNG (Kleinstiver et al. PNAS 2012). In some embodiments, a target sequence tolerant catalytic domain is fused to a DNA binding domain, e.g., to direct activity, e.g., by fusing I-TevI to: (i) zinc fingers to create Tev-ZFEs (Kleinstiver et al. PNAS 2012), (ii) other meganucleases to create MegaTevs (Wolfs et al. Nucleic Acids Res 2014), and/or (iii) Cas9 to create TevCas9 (Wolfs et al. PNAS 2016).

[0329] In some embodiments, the endonuclease domain comprises a restriction enzyme, e.g., a Type IIS or Type IIP restriction enzyme. In some embodiments, the endonuclease domain comprises a Type IIS restriction enzyme, e.g., FokI, or a fragment or variant thereof. In some embodiments, the endonuclease domain comprises a Type IIP restriction enzyme, e.g., PvuII, or a fragment or variant thereof. In some embodiments, a dimeric restriction enzyme is expressed as a fusion such that it functions as a single chain, e.g., a FokI dimer fusion (Minczuk et al. Nucleic Acids Res 36(12):3926-3938 (2008)).

[0330] The use of additional endonuclease domains is described, for example, in Guha and Edgell Int J Mol Sci 18(22):2565 (2017), which is incorporated herein by reference in its entirety.

[0331] In some embodiments, a gene modifying polypeptide comprises a modification to an endonuclease domain, e.g., relative to a wild-type Cas protein. In some embodiments, the endonuclease domain comprises an addition, deletion, replacement, or modification to the amino acid sequence of the wild-type Cas protein. In some embodiments, the endonuclease domain is modified to include a heterologous functional domain that binds specifically to and/or induces endonuclease cleavage of a target nucleic acid (e.g., DNA) sequence of interest. In some embodiments, the endonuclease domain comprises a zinc finger. In embodiments, the endonuclease domain comprising the Cas domain is associated with a guide RNA (gRNA), e.g., as described herein. In some embodiments, the endonuclease domain is modified to include a functional domain that does not target a specific target nucleic acid (e.g., DNA) sequence. In embodiments, the endonuclease domain comprises a Fok1 domain.

[0332] In some embodiments, the endonuclease domain is associated with the target dsDNA in vitro at a frequency at least about 5-fold or 10-fold higher than with a scrambled dsDNA. In some embodiments, the endonuclease domain is associated with the target dsDNA in vitro at a frequency at least about 5-fold or 10-fold higher than with a scrambled dsDNA, e.g., in a cell (e.g., a HEK293T cell). In some embodiments, the frequency of association between the endonuclease domain and the target DNA or scrambled DNA is measured by ChIP-seq, e.g., as described in He and Pu (2010) Curr. Protoc Mol Biol Chapter 21 (incorporated by reference herein in its entirety).

[0333] In some embodiments, the endonuclease domain can catalyze the formation of a nick at a target sequence, e.g., to an increase of at least about 5-fold or 10-fold relative to a non-target sequence (e.g., relative to any other genomic sequence in the genome of the target cell). In some embodiments, the level of nick formation is determined using NickSeq, e.g., as described in Elacqua et al. (2019) bioRxiv doi.org/10.1101/867937 (incorporated herein by reference in its entirety).

[0334] In some embodiments, the endonuclease domain is capable of nicking DNA in vitro. In embodiments, the nick results in an exposed base. In embodiments, the exposed base can be detected using a nuclease sensitivity assay, e.g., as described in Chaudhry and Weinfeld (1995) Nucleic Acids Res 23(19):3805-3809 (incorporated by reference herein in its entirety). In embodiments, the level of exposed bases (e.g., detected by the nuclease sensitivity assay) is increased by at least 10%, 50%, or more relative to a reference endonuclease domain. In some embodiments, the reference endonuclease domain is an endonuclease domain from Cas9 of S. pyogenes.

[0335] In some embodiments, the endonuclease domain is capable of nicking DNA in a cell. In embodiments, the endonuclease domain is capable of nicking DNA in a HEK293T cell. In embodiments, an unrepaired nick that undergoes replication in the absence of Rad51 results in increased NHEJ rates at the site of the nick, which can be detected, e.g., by using a Rad51 inhibition assay, e.g., as described in Bothmer et al. (2017) Nat Commun 8:13905 (incorporated by reference herein in its entirety). In embodiments, NHEJ rates are increased above 0-5%. In embodiments, NHEJ rates are increased to 20-70% (e.g., between 30%-60% or 40-50%), e.g., upon Rad51 inhibition.

[0336] In some embodiments, the endonuclease domain releases the target after cleavage. In some embodiments, release of the target is indicated indirectly by assessing for multiple turnovers by the enzyme, e.g., as described in Yourik at al. RNA 25(1):35-44 (2019) (incorporated herein by reference in its entirety) and shown in FIG. 2. In some embodiments, the kₑₓₚ of an endonuclease domain is 1×10⁻³-1×10⁻5 min−1 as measured by such methods.

[0337] In some embodiments, the endonuclease domain has a catalytic efficiency (k_{cat}/Kₘ) greater than about 1×10⁸ s⁻¹ M⁻¹ in vitro. In embodiments, the endonuclease domain has a catalytic efficiency greater than about 1×10⁵, 1×10⁶, 1×10⁷, or 1×10⁸, s⁻¹ M⁻¹ in vitro. In embodiments, catalytic efficiency is determined as described in Chen et al. (2018) Science 360(6387):436-439 (incorporated herein by reference in its entirety). In some embodiments, the endonuclease domain has a catalytic efficiency (k_{cat}/Kₘ) greater than about 1×10⁸ s⁻¹ M⁻¹ in cells. In embodiments, the endonuclease domain has a catalytic efficiency greater than about 1×10⁵, 1×10⁶, 1×10⁷, or 1×10⁸ s⁻¹ M⁻¹ in cells.

### Gene Modifying Polypeptides Comprising Cas Domains

[0338] In some embodiments, a gene modifying polypeptide described herein comprises a Cas domain. In some embodiments, the Cas domain can direct the gene modifying polypeptide to a target site specified by a gRNA spacer, thereby modifying a target nucleic acid sequence in “cis”. In some embodiments, a gene modifying polypeptide is fused to a Cas domain. In some embodiments, a gene modifying polypeptide comprises a CRISPR/Cas domain (also referred to herein as a CRISPR-associated protein). In some embodiments, a CRISPR/Cas domain comprises a protein involved in the clustered regulatory interspaced short palindromic repeat (CRISPR) system, e.g., a Cas protein, and optionally binds a guide RNA, e.g., single guide RNA (sgRNA).

[0339] CRISPR systems are adaptive defense systems originally discovered in bacteria and archaea. CRISPR systems use RNA-guided nucleases termed CRISPR-associated or “Cas” endonucleases (e. g., Cas9 or Cpf1) to cleave foreign DNA. For example, in a typical CRISPR-Cas system, an endonuclease is directed to a target nucleotide sequence (e. g., a site in the genome that is to be sequence-edited) by sequence-specific, non-coding “guide RNAs” that target single- or double-stranded DNA sequences. Three classes (I-III) of CRISPR systems have been identified. The class II CRISPR systems use a single Cas endonuclease (rather than multiple Cas proteins). One class II CRISPR system includes a type II Cas endonuclease such as Cas9, a CRISPR RNA (“crRNA”), and a trans-activating crRNA (“tracrRNA”). The crRNA contains a “spacer” sequence, a typically about 20-nucleotide RNA sequence that corresponds to a target DNA sequence (“protospacer”). In the wild-type system, and in some engineered systems, crRNA also contains a region that binds to the tracrRNA to form a partially double-stranded structure that is cleaved by RNase III, resulting in a crRNA/tracrRNA hybrid molecule. A crRNA/tracrRNA hybrid then directs the Cas endonuclease to recognize and cleave a target DNA sequence. A target DNA sequence is generally adjacent to a “protospacer adjacent motif” (“PAM”) that is specific for a given Cas endonuclease and required for cleavage activity at a target site matching the spacer of the crRNA. CRISPR endonucleases identified from various prokaryotic species have unique PAM sequence requirements, e.g., as listed for exemplary Cas enzymes in Table 7; examples of PAM sequences include 5′-NGG (Streptococcus pyogenes), 5′-NNAGAA (Streptococcus thermophilus CRISPR1), 5′-NGGNG (Streptococcus thermophilus CRISPR3), and 5′-NNNGATT (Neisseria meningiditis). Some endonucleases, e.g., Cas9 endonucleases, are associated with G-rich PAM sites, e. g., 5′-NGG, and perform blunt-end cleaving of the target DNA at a location 3 nucleotides upstream from (5′ from) the PAM site. Another class II CRISPR system includes the type V endonuclease Cpf1, which is smaller than Cas9; examples include AsCpf1 (from Acidaminococcus sp.) and LbCpf1 (from Lachnospiraceae sp.). Cpf1-associated CRISPR arrays are processed into mature crRNAs without the requirement of a tracrRNA; in other words, a Cpf1 system, in some embodiments, comprises only Cpf1 nuclease and a crRNA to cleave a target DNA sequence. Cpf1 endonucleases, are typically associated with T-rich PAM sites, e. g., 5′-TTN. Cpf1 can also recognize a 5′-CTA PAM motif. Cpf1 typically cleaves a target DNA by introducing an offset or staggered double-strand break with a 4- or 5-nucleotide 5′ overhang, for example, cleaving a target DNA with a 5-nucleotide offset or staggered cut located 18 nucleotides downstream from (3′ from) from a PAM site on the coding strand and 23 nucleotides downstream from the PAM site on the complimentary strand; the 5-nucleotide overhang that results from such offset cleavage allows more precise genome editing by DNA insertion by homologous recombination than by insertion at blunt-end cleaved DNA. See, e.g., Zetsche et al. (2015) Cell, 163:759-771.

[0340] A variety of CRISPR associated (Cas) genes or proteins can be used in the technologies provided by the present disclosure and the choice of Cas protein will depend upon the particular conditions of the method. Specific examples of Cas proteins include class II systems including Cas1, Cas2, Cas3, Cas4, Cas5, Cas6, Cas7, Cas8, Cas9, Cas10, Cpf1, C2C1, or C2C3. In some embodiments, a Cas protein, e.g., a Cas9 protein, may be from any of a variety of prokaryotic species. In some embodiments a particular Cas protein, e.g., a particular Cas9 protein, is selected to recognize a particular protospacer-adjacent motif (PAM) sequence. In some embodiments, a DNA-binding domain or endonuclease domain includes a sequence targeting polypeptide, such as a Cas protein, e.g., Cas9. In certain embodiments a Cas protein, e.g., a Cas9 protein, may be obtained from a bacteria or archaea or synthesized using known methods. In certain embodiments, a Cas protein may be from a gram-positive bacteria or a gram-negative bacteria. In certain embodiments, a Cas protein may be from a Streptococcus (e.g., a S. pyogenes, or a S. thermophilus), a Francisella (e.g., an F. novicida), a Staphylococcus (e.g., an S. aureus), an Acidaminococcus (e.g., an Acidaminococcus sp. BV3L6), a Neisseria (e.g., an N. meningitidis), a Cryptococcus, a Corynebacterium, a Haemophilus, a Eubacterium, a Pasteurella, a Prevotella, a Veillonella, or a Marinobacter.

[0341] In some embodiments, a gene modifying polypeptide may comprise the amino acid sequence of SEQ ID NO: 4000 below, or a sequence having at least 70%, 75%, 80%, 85%, 90%, 95%, 96%, 97%, 98%, 99% identity thereto. In embodiments, the amino acid sequence of SEQ ID NO: 4000 below, or the sequence having at least 70%, 75%, 80%, 85%, 90%, 95%, 96%, 97%, 98%, 99% identity thereto, is positioned at the N-terminal end of the gene modifying polypeptide. In embodiments, the amino acid sequence of SEQ ID NO: 4000 below, or the sequence having at least 70%, 75%, 80%, 85%, 90%, 95%, 96%, 97%, 98%, 99% identity thereto, is positioned within 1, 2, 3, 4, 5, 6, 7, 8, 9, 10, 15, 20, 25, or 30 amino acids of the N-terminal end of the gene modifying polypeptide.

Exemplary N-terminal NLS-Cas9 domain
(SEQ ID NO: 4000)
MPAAKRVKLDGGDKKYSIGLDIGTNSVGWAVITDEYKVPSKKFKVLGNTDRHSIKKNLIGALLF
DSGETAEATRLKRTARRRYTRRKNRICYLQEIFSNEMAKVDDSFFHRLEESFLVEEDKKHERHP
IFGNIVDEVAYHEKYPTIYHLRKKLVDSTDKADLRLIYLALAHMIKFRGHFLIEGDLNPDNSDV
DKLFIQLVQTYNQLFEENPINASGVDAKAILSARLSKSRRLENLIAQLPGEKKNGLFGNLIALS
LGLTPNFKSNFDLAEDAKLQLSKDTYDDDLDNLLAQIGDQYADLFLAAKNLSDAILLSDILRVN
TEITKAPLSASMIKRYDEHHQDLTLLKALVRQQLPEKYKEIFFDQSKNGYAGYIDGGASQEEFY
KFIKPILEKMDGTEELLVKLNREDLLRKQRTFDNGSIPHQIHLGELHAILRRQEDFYPFLKDNR
EKIEKILTFRIPYYVGPLARGNSRFAWMTRKSEETITPWNFEEVVDKGASAQSFIERMINFDKN
LPNEKVLPKHSLLYEYFTVYNELTKVKYVTEGMRKPAFLSGEQKKAIVDLLFKTNRKVTVKQLK
EDYFKKIECFDSVEISGVEDRFNASLGTYHDLLKIIKDKDFLDNEENEDILEDIVLILTLFEDR
EMIEERLKTYAHLFDDKVMKQLKRRRYTGWGRLSRKLINGIRDKQSGKTILDFLKSDGFANRNF
MQLIHDDSLTFKEDIQKAQVSGQGDSLHEHIANLAGSPAIKKGILQTVKVVDELVKVMGRHKPE
NIVIEMARENQTTQKGQKNSRERMKRIEEGIKELGSQILKEHPVENTQLQNEKLYLYYLQNGRD
MYVDQELDINRLSDYDVDHIVPQSFLKDDSIDNKVLTRSDKARGKSDNVPSEEVVKKMKNYWRQ
LLNAKLITQRKFDNLTKAERGGLSELDKAGFIKRQLVETRQITKHVAQILDSRMNTKYDENDKL
IREVKVITLKSKLVSDFRKDFQFYKVREINNYHHAHDAYLNAVVGTALIKKYPKLESEFVYGDY
KVYDVRKMIAKSEQEIGKATAKYFFYSNIMNFFKTEITLANGEIRKRPLIETNGETGEIVWDKG
RDFATVRKVLSMPQVNIVKKTEVQTGGFSKESILPKRNSDKLIARKKDWDPKKYGGFDSPTVAY
SVLVVAKVEKGKSKKLKSVKELLGITIMERSSFEKNPIDFLEAKGYKEVKKDLIIKLPKYSLFE
LENGRKRMLASAGELQKGNELALPSKYVNFLYLASHYEKLKGSPEDNEQKQLFVEQHKHYLDEI
IEQISEFSKRVILADANLDKVLSAYNKHRDKPIREQAENIIHLFTLTNLGAPAAFKYFDTTIDR
KRYTSTKEVLDATLIHQSITGLYETRIDLSQLGGDGG

[0342] In some embodiments, a gene modifying polypeptide may comprise the amino acid sequence of SEQ ID NO: 4001 below, or a sequence having at least 70%, 75%, 80%, 85%, 90%, 95%, 96%, 97%, 98%, 99% identity thereto. In embodiments, the amino acid sequence of SEQ ID NO: 4001 below, or the sequence having at least 70%, 75%, 80%, 85%, 90%, 95%, 96%, 97%, 98%, 99% identity thereto, is positioned at the C-terminal end of the gene modifying polypeptide. In embodiments, the amino acid sequence of SEQ ID NO: 4001 below, or the sequence having at least 70%, 75%, 80%, 85%, 90%, 95%, 96%, 97%, 98%, 99% identity thereto, is positioned within 1, 2, 3, 4, 5, 6, 7, 8, 9, 10, 15, 20, 25, or 30 amino acids of the C-terminal end of the gene modifying polypeptide.

Exemplary C-terminal sequence comprising an NLS
(SEQ ID NO: 4001)
AGKRTADGSEFEKRTADGSEFESPKKKAKVE
Exemplary benchmarking sequence
(SEQ ID NO: 4002)
MPAAKRVKLDGGDKKYSIGLDIGTNSVGWAVITDEYKVPSKKFKVLGNTDRHSIKKNLIGALLF
DSGETAEATRLKRTARRRYTRRKNRICYLQEIFSNEMAKVDDSFFHRLEESFLVEEDKKHERHP
IFGNIVDEVAYHEKYPTIYHLRKKLVDSTDKADLRLIYLALAHMIKFRGHFLIEGDLNPDNSDV
DKLFIQLVQTYNQLFEENPINASGVDAKAILSARLSKSRRLENLIAQLPGEKKNGLFGNLIALS
LGLTPNFKSNFDLAEDAKLQLSKDTYDDDLDNLLAQIGDQYADLFLAAKNLSDAILLSDILRVN
TEITKAPLSASMIKRYDEHHQDLTLLKALVRQQLPEKYKEIFFDQSKNGYAGYIDGGASQEEFY
KFIKPILEKMDGTEELLVKLNREDLLRKQRTFDNGSIPHQIHLGELHAILRRQEDFYPFLKDNR
EKIEKILTFRIPYYVGPLARGNSRFAWMTRKSEETITPWNFEEVVDKGASAQSFIERMINEDKN
LPNEKVLPKHSLLYEYFTVYNELTKVKYVTEGMRKPAFLSGEQKKAIVDLLFKTNRKVTVKQLK
EDYFKKIECFDSVEISGVEDRFNASLGTYHDLLKIIKDKDFLDNEENEDILEDIVLTLTLFEDR
EMIEERLKTYAHLFDDKVMKQLKRRRYTGWGRLSRKLINGIRDKQSGKTILDFLKSDGFANRNF
MQLIHDDSLTFKEDIQKAQVSGQGDSLHEHIANLAGSPAIKKGILQTVKVVDELVKVMGRHKPE
NIVIEMARENQTTQKGQKNSRERMKRIEEGIKELGSQILKEHPVENTQLQNEKLYLYYLQNGRD
MYVDQELDINRLSDYDVDHIVPQSFLKDDSIDNKVLTRSDKARGKSDNVPSEEVVKKMKNYWRQ
LLNAKLITQRKFDNLTKAERGGLSELDKAGFIKRQLVETRQITKHVAQILDSRMNTKYDENDKL
IREVKVITLKSKLVSDFRKDFQFYKVREINNYHHAHDAYLNAVVGTALIKKYPKLESEFVYGDY
KVYDVRKMIAKSEQEIGKATAKYFFYSNIMNFFKTEITLANGEIRKRPLIEINGETGEIVWDKG
RDFATVRKVLSMPQVNIVKKTEVQTGGFSKESILPKRNSDKLIARKKDWDPKKYGGFDSPTVAY
SVLVVAKVEKGKSKKLKSVKELLGITIMERSSFEKNPIDFLEAKGYKEVKKDLIIKLPKYSLFE
LENGRKRMLASAGELQKGNELALPSKYVNFLYLASHYEKLKGSPEDNEQKQLFVEQHKHYLDEI
IEQISEFSKRVILADANLDKVLSAYNKHRDKPIREQAENIIHLFTLTNLGAPAAFKYFDTTIDR
KRYTSTKEVLDATLIHQSITGLYETRIDLSQLGGDGGSGGSSGGSSGSETPGTSESATPESSGG
SSGGSSGGTLNIEDEYRLHETSKEPDVSLGSTWLSDFPQAWAETGGMGLAVRQAPLIIPLKATS
TPVSIKQYPMSQEARLGIKPHIQRLLDQGILVPCQSPWNTPLLPVKKPGTNDYRPVQDLREVNK
RVEDIHPTVPNPYNLLSGLPPSHQWYTVLDLKDAFFCLRLHPTSQPLFAFEWRDPEMGISGQLT
WTRLPQGFKNSPTLFNEALHRDLADFRIQHPDLILLQYVDDLLLAATSELDCQQGTRALLQTLG
NLGYRASAKKAQICQKQVKYLGYLLKEGQRWLTEARKETVMGQPTPKTPRQLREFLGKAGFCRL
FIPGFAEMAAPLYPLTKPGTLFNWGPDQQKAYQEIKQALLTAPALGLPDLTKPFELFVDEKQGY
AKGVLTQKLGPWRRPVAYLSKKLDPVAAGWPPCLRMVAAIAVLTKDAGKLTMGQPLVILAPHAV
EALVKQPPDRWLSNARMTHYQALLLDTDRVQFGPVVALNPATLLPLPEEGLQHNCLDILAEAHG
TRPDLTDQPLPDADHTWYTDGSSLLQEGQRKAGAAVTTETEVIWAKALPAGTSAQRAELIALTQ
ALKMAEGKKLNVYTDSRYAFATAHIHGEIYRRRGWLTSEGKEIKNKDEILALLKALFLPKRLSI
IHCPGHQKGHSAEARGNRMADQAARKAAITETPDTSTLLIENSSPSGGSKRTADGSEFEAGKRT
ADGSEFEKRTADGSEFESPKKKAKVE

[0343] In some embodiments, a gene modifying polypeptide may comprise a Cas domain as listed in Table 7 or 8, or a functional fragment thereof, or a sequence having at least 70%, 75%, 80%, 85%, 90%, 95%, 96%, 97%, 98%, 99% identity thereto.

TABLE 7
CRISPR/Cas Proteins, Species, and Mutations

| | | | | | | Mutations to |
|---|---|---|---|---|---|---|
| | | | # | | Mutations to | make |
| | | | of | | alter PAM | catalytically |
| Name | Enzyme | Species | AAs | PAM | recognition | dead |
| FnCas9 | Cas9 | Francisella | 1629 | 5′-NGG-3′ | Wt | D11A/H969A/ |
| | | novicida | | | | N995A |
| FnCas9 | Cas9 | Francisella | 1629 | 5′-YG-3′ | E1369R/E1449H/ | D11A/H969A/ |
| RHA | | novicida | | | R1556A | N995A |
| SaCas9 | Cas9 | Staphylococcus | 1053 | 5′- | Wt | D10A/H557A |
| | | aureus | | NNGRRT-3′ | | |
| SaCa9 | Cas9 | Staphylococcus | 1053 | 5′- | E782K/N968K/ | D10A/H557A |
| KKH | | aureus | | NNNRRT-3′ | R1015H | |
| SpCas9 | Cas9 | Streptococcus | 1368 | 5′-NGG-3′ | Wt | D10A/D839A/ |
| | | pyogenes | | | | H840A/N863A |
| SpCas9 | Cas9 | Streptococcus | 1368 | 5′-NGA-3′ | D1135V/R1335Q/ | D10A/D839A/ |
| VQR | | pyogenes | | | T1337R | H840A/N863A |
| AsCpf1 | Cpf1 | Acidaminococcus | 1307 | 5′-TYCV-3′ | S542R/K607R | E993A |
| RR | | sp. | | | | |
| | | BV3L6 | | | | |
| AsCpf1 | Cpf1 | Acidaminococcus | 1307 | 5′-TATV-3′ | S542R/K548V/ | E993A |
| RVR | | sp. | | | N552R | |
| | | BV3L6 | | | | |
| FnCpf1 | Cpf1 | Francisella | 1300 | 5′-NTTN-3′ | Wt | D917A/E1006A/ |
| | | novicida | | | | D1255A |
| NmCas9 | Cas9 | Neisseria | 1082 | 5′- | Wt | D16A/D587A/ |
| | | meningitidis | | NNNGATT-3′ | | H588A/N611A |

TABLE 8
Amino Acid Sequences of CRISPR/Cas Proteins, Species, and Mutations

| | Parental | | Nickase | Nickase | Nickase |
|---|---|---|---|---|---|
| Variant | Host(s) | Protein Sequence | (HNH) | (HNH) | (RuvC) |
| Nme2Cas9 | Neisseria | MAAFKPNPINYILGLDIGIASVGWAMVEIDEEENPIRLIDLGVRVFERAEVPK | N611A | H588A | D16A |
| | meningitidis | TGDSLAMARRLARSVRRLTRRRAHRLLRARRLLKREGVLQAADFDENGLIKS | | | |
| | | LPNTPWQLRAAALDRKLTPLEWSAVLLHLIKHRGYLSQRKNEGETADKELG | | | |
| | | ALLKGVANNAHALQTGDFRTPAELALNKFEKESGHIRNQRGDYSHTFSRKD | | | |
| | | LQAELILLFEKQKEFGNPHVSGGLKEGIETLLMTQRPALSGDAVQKMLGHCT | | | |
| | | FEPAEPKAAKNTYTAERFIWLTKLNNLRILEQGSERPLTDTERATLMDEPYRK | | | |
| | | SKLTYAQARKLLGLEDTAFFKGLRYGKDNAEASTLMEMKAYHAISRALEKEG | | | |
| | | LKDKKSPLNLSSELQDEIGTAFSLFKTDEDITGRLKDRVQPEILEALLKHISFDKF | | | |
| | | VQISLKALRRIVPLMEQGKRYDEACAEIYGDHYGKKNTEEKIYLPPIPADEIRN | | | |
| | | PVVLRALSQARKVINGVVRRYGSPARIHIETAREVGKSFKDRKEIEKRQEENR | | | |
| | | KDREKAAAKFREYFPNFVGEPKSKDILKLRLYEQQHGKCLYSGKEINLVRLNE | | | |
| | | KGYVEIDHALPFSRTWDDSFNNKVLVLGSENQNKGNQTPYEYFNGKDNSR | | | |
| | | EWQEFKARVETSRFPRSKKQRILLQKFDEDGFKECNLNDTRYVNRFLCQFVA | | | |
| | | DHILLTGKGKRRVFASNGQITNLLRGFWGLRKVRAENDRHHALDAVVVACS | | | |
| | | TVAMQQKITRFVRYKEMNAFDGKTIDKETGKVLHQKTHFPQPWEFFAQEV | | | |
| | | MIRVFGKPDGKPEFEEADTPEKLRTLLAEKLSSRPEAVHEYVTPLFVSRAPNR | | | |
| | | KMSGAHKDTLRSAKRFVKHNEKISVKRVWLTEIKLADLENMVNYKNGREIEL | | | |
| | | YEALKARLEAYGGNAKQAFDPKDNPFYKKGGQLVKAVRVEKTQESGVLLNK | | | |
| | | KNAYTIADNGDMVRVDVFCKVDKKGKNQYFIVPIYAWQVAENILPDIDCKG | | | |
| | | YRIDDSYTFCFSLHKYDLIAFQKDEKSKVEFAYYINCDSSNGRFYLAWHDKGS | | | |
| | | KEQQFRISTQNLVLIQKYQVNELGKEIRPCRLKKRPPVR (SEQ ID NO: | | | |
| | | 20321) | | | |
| PpnCas9 | Pasteurella | MQNNPLNYILGLDLGIASIGWAVVEIDEESSPIRLIDVGVRTFERAEVAKTGE | N605A | H582A | D13A |
| | pneumotropica | SLALSRRLARSSRRLIKRRAERLKKAKRLLKAEKILHSIDEKLPINVWQLRVKGL | | | |
| | | KEKLERQEWAAVLLHLSKHRGYLSQRKNEGKSDNKELGALLSGIASNHQML | | | |
| | | QSSEYRTPAEIAVKKFQVEEGHIRNQRGSYTHTFSRLDLLAEMELLFQRQAEL | | | |
| | | GNSYTSTTLLENLTALLMWQKPALAGDAILKMLGKCTFEPSEYKAAKNSYSA | | | |
| | | ERFVWLTKLNNLRILENGTERALNDNERFALLEQPYEKSKLTYAQVRAMLAL | | | |
| | | SDNAIFKGVRYLGEDKKTVESKTTLIEMKFYHQIRKTLGSAELKKEWNELKGN | | | |
| | | SDLLDEIGTAFSLYKTDDDICRYLEGKLPERVLNALLENLNFDKFIQLSLKALHQ | | | |
| | | ILPLMLQGQRYDEAVSAIYGDHYGKKSTETTRLLPTIPADEIRNPVVLRTLTQA | | | |
| | | RKVINAVVRLYGSPARIHIETAREVGKSYQDRKKLEKQQEDNRKQRESAVKK | | | |
| | | FKEMFPHFVGEPKGKDILKMRLYELQQAKCLYSGKSLELHRLLEKGYVEVDH | | | |
| | | ALPFSRTWDDSFNNKVLVLANENQNKGNLTPYEWLDGKNNSERWQHFVV | | | |
| | | RVQTSGFSYAKKQRILNHKLDEKGFIERNLNDTRYVARFLCNFIADNMLLVG | | | |
| | | KGKRNVFASNGQITALLRHRWGLQKVREQNDRHHALDAVVVACSTVAMQ | | | |
| | | QKITRFVRYNEGNVFSGERIDRETGEIIPLHFPSPWAFFKENVEIRIFSENPKLE | | | |
| | | LENRLPDYPQYNHEWVQPLFVSRMPTRKMTGQGHMETVKSAKRLNEGLS | | | |
| | | VLKVPLTQLKLSDLERMVNRDREIALYESLKARLEQFGNDPAKAFAEPFYKKG | | | |
| | | GALVKAVRLEQTQKSGVLVRDGNGVADNASMVRVDVFTKGGKYFLVPIYT | | | |
| | | WQVAKGILPNRAATQGKDENDWDIMDEMATFQFSLCQNDLIKLVTKKKTI | | | |
| | | FGYFNGLNRATSNINIKEHDLDKSKGKLGIYLEVGVKLAISLEKYQVDELGKNI | | | |
| | | RPCRPTKRQHVR (SEQ ID NO: 20322) | | | |
| SauCas9 | Staphylococcus | MKRNYILGLDIGITSVGYGIIDYETRDVIDAGVRLFKEANVENNEGRRSKRGA | N580A | H557A | D10A |
| | aureus | RRLKRRRRHRIQRVKKLLFDYNLLTDHSELSGINPYEARVKGLSQKLSEEEFSA | | | |
| | | ALLHLAKRRGVHNVNEVEEDTGNELSTKEQISRNSKALEEKYVAELQLERLKK | | | |
| | | DGEVRGSINRFKTSDYVKEAKQLLKVQKAYHQLDQSFIDTYIDLLETRRTYYE | | | |
| | | GPGEGSPFGWKDIKEWYEMLMGHCTYFPEELRSVKYAYNADLYNALNDLN | | | |
| | | NLVITRDENEKLEYYEKFQIIENVFKQKKKPTLKQIAKEILVNEEDIKGYRVTST | | | |
| | | GKPEFTNLKVYHDIKDITARKEIIENAELLDQIAKILTIYQSSEDIQEELTNLNSE | | | |
| | | LTQEEIEQISNLKGYTGTHNLSLKAINLILDELWHTNDNQIAIFNRLKLVPKKV | | | |
| | | DLSQQKEIPTTLVDDFILSPVVKRSFIQSIKVINAIIKKYGLPNDIIIELAREKNSK | | | |
| | | DAQKMINEMQKRNRQTNERIEEIIRTTGKENAKYLIEKIKLHDMQEGKCLYS | | | |
| | | LEAIPLEDLLNNPFNYEVDHIIPRSVSFDNSFNNKVLVKQEENSKKGNRTPFQ | | | |
| | | YLSSSDSKISYETFKKHILNLAKGKGRISKTKKEYLLEERDINRFSVQKDFINRNL | | | |
| | | VDTRYATRGLMNLLRSYFRVNNLDVKVKSINGGFTSFLRRKWKFKKERNKG | | | |
| | | YKHHAEDALIIANADFIFKEWKKLDKAKKVMENQMFEEKQAESMPEIETEQ | | | |
| | | EYKEIFITPHQIKHIKDFKDYKYSHRVDKKPNRELINDTLYSTRKDDKGNTLIVN | | | |
| | | NLNGLYDKDNDKLKKLINKSPEKLLMYHHDPQTYQKLKLIMEQYGDEKNPL | | | |
| | | YKYYEETGNYLTKYSKKDNGPVIKKIKYYGNKLNAHLDITDDYPNSRNKVVKL | | | |
| | | SLKPYRFDVYLDNGVYKFVTVKNLDVIKKENYYEVNSKCYEEAKKLKKISNQA | | | |
| | | EFIASFYNNDLIKINGELYRVIGVNNDLLNRIEVNMIDITYREYLENMNDKRPP | | | |
| | | RIIKTIASKTQSIKKYSTDILGNLYEVKSKKHPQIIKKG (SEQ ID NO: 20323) | | | |
| SauCas9- | Staphylococcus | MKRNYILGLDIGITSVGYGIIDYETRDVIDAGVRLFKEANVENNEGRRSKRGA | N580A | H557A | D10A |
| KKH | aureus | RRLKRRRRHRIQRVKKLLFDYNLLTDHSELSGINPYEARVKGLSQKLSEEEFSA | | | |
| | | ALLHLAKRRGVHNVNEVEEDTGNELSTKEQISRNSKALEEKYVAELQLERLKK | | | |
| | | DGEVRGSINRFKTSDYVKEAKQLLKVQKAYHQLDQSFIDTYIDLLETRRTYYE | | | |
| | | GPGEGSPFGWKDIKEWYEMLMGHCTYFPEELRSVKYAYNADLYNALNDLN | | | |
| | | NLVITRDENEKLEYYEKFQIIENVFKQKKKPTLKQIAKEILVNEEDIKGYRVTST | | | |
| | | GKPEFTNLKVYHDIKDITARKEIIENAELLDQIAKILTIYQSSEDIQEELTNLNSE | | | |
| | | LTQEEIEQISNLKGYTGTHNLSLKAINLILDELWHTNDNQIAIFNRLKLVPKKV | | | |
| | | DLSQQKEIPTTLVDDFILSPVVKRSFIQSIKVINAIIKKYGLPNDIIIELAREKNSK | | | |
| | | DAQKMINEMQKRNRQTNERIEEIIRTTGKENAKYLIEKIKLHDMQEGKCLYS | | | |
| | | LEAIPLEDLLNNPFNYEVDHIIPRSVSFDNSFNNKVLVKQEENSKKGNRTPFQ | | | |
| | | YLSSSDSKISYETFKKHILNLAKGKGRISKTKKEYLLEERDINRFSVQKDFINRNL | | | |
| | | VDTRYATRGLMNLLRSYFRVNNLDVKVKSINGGFTSFLRRKWKFKKERNKG | | | |
| | | YKHHAEDALIIANADFIFKEWKKLDKAKKVMENQMFEEKQAESMPEIETEQ | | | |
| | | EYKEIFITPHQIKHIKDFKDYKYSHRVDKKPNRKLINDTLYSTRKDDKGNTLIV | | | |
| | | NNLNGLYDKDNDKLKKLINKSPEKLLMYHHDPQTYQKLKLIMEQYGDEKNP | | | |
| | | LYKYYEETGNYLTKYSKKDNGPVIKKIKYYGNKLNAHLDITDDYPNSRNKVVK | | | |
| | | LSLKPYRFDVYLDNGVYKFVTVKNLDVIKKENYYEVNSKCYEEAKKLKKISNQ | | | |
| | | AEFIASFYKNDLIKINGELYRVIGVNNDLLNRIEVNMIDITYREYLENMNDKRP | | | |
| | | PHIIKTIASKTQSIKKYSTDILGNLYEVKSKKHPQIIKKG (SEQ ID NO: 20324) | | | |
| SauriCas9 | Staphylococcus | MQENQQKQNYILGLDIGITSVGYGLIDSKTREVIDAGVRLFPEADSENNSNR | N588A | H565A | D15A |
| | auricularis | RSKRGARRLKRRRIHRLNRVKDLLADYQMIDLNNVPKSTDPYTIRVKGLREPL | | | |
| | | TKEEFAIALLHIAKRRGLHNISVSMGDEEQDNELSTKQQLQKNAQQLQDKY | | | |
| | | VCELQLERLTNINKVRGEKNRFKTEDFVKEVKQLCETQRQYHNIDDQFIQQY | | | |
| | | IDLVSTRREYFEGPGNGSPYGWDGDLLKWYEKLMGRCTYFPEELRSVKYAYS | | | |
| | | ADLFNALNDLNNLVVTRDDNPKLEYYEKYHIIENVFKQKKNPTLKQIAKEIGV | | | |
| | | QDYDIRGYRITKSGKPQFTSFKLYHDLKNIFEQAKYLEDVEMLDEIAKILTIYQ | | | |
| | | DEISIKKALDQLPELLTESEKSQIAQLTGYTGTHRLSLKCIHIVIDELWESPENQ | | | |
| | | MEIFTRLNLKPKKVEMSEIDSIPTTLVDEFILSPVVKRAFIQSIKVINAVINRFGL | | | |
| | | PEDIIIELAREKNSKDRRKFINKLQKQNEATRKKIEQLLAKYGNTNAKYMIEKI | | | |
| | | KLHDMQEGKCLYSLEAIPLEDLLSNPTHYEVDHIIPRSVSFDNSLNNKVLVKQ | | | |
| | | SENSKKGNRTPYQYLSSNESKISYNQFKQHILNLSKAKDRISKKKRDMLLEER | | | |
| | | DINKFEVQKEFINRNLVDTRYATRELSNLLKTYFSTHDYAVKVKTINGGFTNH | | | |
| | | LRKVWDFKKHRNHGYKHHAEDALVIANADFLFKTHKALRRTDKILEQPGLE | | | |
| | | VNDTTVKVDTEEKYQELFETPKQVKNIKQFRDFKYSHRVDKKPNRQLINDTL | | | |
| | | YSTREIDGETYVVQTLKDLYAKDNEKVKKLFTERPQKILMYQHDPKTFEKLM | | | |
| | | TILNQYAEAKNPLAAYYEDKGEYVTKYAKKGNGPAIHKIKYIDKKLGSYLDVS | | | |
| | | NKYPETQNKLVKLSLKSFRFDIYKCEQGYKMVSIGYLDVLKKDNYYYIPKDKYE | | | |
| | | AEKQKKKIKESDLFVGSFYYNDLIMYEDELFRVIGVNSDINNLVELNMVDITY | | | |
| | | KDFCEVNNVTGEKRIKKTIGKRVVLIEKYTTDILGNLYKTPLPKKPQLIFKRGEL | | | |
| | | (SEQ ID NO: 20325) | | | |
| SauriCas9- | Staphylococcus | MQENQQKQNYILGLDIGITSVGYGLIDSKTREVIDAGVRLFPEADSENNSNR | N588A | H565A | D15A |
| KKH | auricularis | RSKRGARRLKRRRIHRLNRVKDLLADYQMIDLNNVPKSTDPYTIRVKGLREPL | | | |
| | | TKEEFAIALLHIAKRRGLHNISVSMGDEEQDNELSTKQQLQKNAQQLQDKY | | | |
| | | VCELQLERLTNINKVRGEKNRFKTEDFVKEVKQLCETQRQYHNIDDQFIQQY | | | |
| | | IDLVSTRREYFEGPGNGSPYGWDGDLLKWYEKLMGRCTYFPEELRSVKYAYS | | | |
| | | ADLFNALNDLNNLVVTRDDNPKLEYYEKYHIIENVFKQKKNPTLKQIAKEIGV | | | |
| | | QDYDIRGYRITKSGKPQFTSFKLYHDLKNIFEQAKYLEDVEMLDEIAKILTIYQ | | | |
| | | DEISIKKALDQLPELLTESEKSQIAQLTGYTGTHRLSLKCIHIVIDELWESPENQ | | | |
| | | MEIFTRLNLKPKKVEMSEIDSIPTTLVDEFILSPVVKRAFIQSIKVINAVINRFGL | | | |
| | | PEDIIIELAREKNSKDRRKFINKLQKQNEATRKKIEQLLAKYGNTNAKYMIEKI | | | |
| | | KLHDMQEGKCLYSLEAIPLEDLLSNPTHYEVDHIIPRSVSFDNSLNNKVLVKQ | | | |
| | | SENSKKGNRTPYQYLSSNESKISYNQFKQHILNLSKAKDRISKKKRDMLLEER | | | |
| | | DINKFEVQKEFINRNLVDTRYATRELSNLLKTYFSTHDYAVKVKTINGGFTNH | | | |
| | | LRKVWDFKKHRNHGYKHHAEDALVIANADFLFKTHKALRRTDKILEQPGLE | | | |
| | | VNDTTVKVDTEEKYQELFETPKQVKNIKQFRDFKYSHRVDKKPNRKLINDTL | | | |
| | | YSTREIDGETYVVQTLKDLYAKDNEKVKKLFTERPQKILMYQHDPKTFEKLM | | | |
| | | TILNQYAEAKNPLAAYYEDKGEYVTKYAKKGNGPAIHKIKYIDKKLGSYLDVS | | | |
| | | NKYPETQNKLVKLSLKSFRFDIYKCEQGYKMVSIGYLDVLKKDNYYYIPKDKYE | | | |
| | | AEKQKKKIKESDLFVGSFYKNDLIMYEDELFRVIGVNSDINNLVELNMVDITY | | | |
| | | KDFCEVNNVTGEKHIKKTIGKRVVLIEKYTTDILGNLYKTPLPKKPQLIFKRGEL | | | |
| | | (SEQ ID NO: 20326) | | | |
| ScaCas9- | Streptococcus | MEKKYSIGLDIGTNSVGWAVITDDYKVPSKKFKVLGNTNRKSIKKNLMGALL | N872A | H849A | D10A |
| Sc++ | canis | FDSGETAEATRLKRTARRRYTRRKNRIRYLQEIFANEMAKLDDSFFQRLEESF | | | |
| | | LVEEDKKNERHPIFGNLADEVAYHRNYPTIYHLRKKLADSPEKADLRLIYLALA | | | |
| | | HIIKFRGHFLIEGKLNAENSDVAKLFYQLIQTYNQLFEESPLDEIEVDAKGILSA | | | |
| | | RLSKSKRLEKLIAVFPNEKKNGLFGNIIALALGLTPNFKSNFDLTEDAKLQLSKD | | | |
| | | TYDDDLDELLGQIGDQYADLFSAAKNLSDAILLSDILRSNSEVTKAPLSASMV | | | |
| | | KRYDEHHQDLALLKTLVRQQFPEKYAEIFKDDTKNGYAGYVGADKKLRKRS | | | |
| | | GKLATEEEFYKFIKPILEKMDGAEELLAKLNRDDLLRKQRTFDNGSIPHQIHLK | | | |
| | | ELHAILRRQEEFYPFLKENREKIEKILTFRIPYYVGPLARGNSRFAWLTRKSEEA | | | |
| | | ITPWNFEEVVDKGASAQSFIERMTNFDEQLPNKKVLPKHSLLYEYFTVYNEL | | | |
| | | TKVKYVTERMRKPEFLSGEQKKAIVDLLFKTNRKVTVKQLKEDYFKKIECFDS | | | |
| | | VEIIGVEDRFNASLGTYHDLLKIIKDKDFLDNEENEDILEDIVLTLTLFEDREMIE | | | |
| | | ERLKTYAHLFDDKVMKQLKRRHYTGWGRLSRKMINGIRDKQSGKTILDFLKS | | | |
| | | DGFSNRNFMQLIHDDSLTFKEEIEKAQVSGQGDSLHEQIADLAGSPAIKKGIL | | | |
| | | QTVKIVDELVKVMGHKPENIVIEMARENQTTTKGLQQSRERKKRIEEGIKELE | | | |
| | | SQILKENPVENTQLQNEKLYLYYLQNGRDMYVDQELDINRLSDYDVDHIVP | | | |
| | | QSFIKDDSIDNKVLTRSVENRGKSDNVPSEEVVKKMKNYWRQLLNAKLITQ | | | |
| | | RKFDNLTKAERGGLSEADKAGFIKRQLVETRQITKHVARILDSRMNTKRDKN | | | |
| | | DKPIREVKVITLKSKLVSDFRKDFQLYKVRDINNYHHAHDAYLNAVVGTALIK | | | |
| | | KYPKLESEFVYGDYKVYDVRKMIAKSEQEIGKATAKRFFYSNIMNFFKTEVKL | | | |
| | | ANGEIRKRPLIETNGETGEVVWNKEKDFATVRKVLAMPQVNIVKKTEVQTG | | | |
| | | GFSKESILSKRESAKLIPRKKGWDTRKYGGFGSPTVAYSILVVAKVEKGKAKKL | | | |
| | | KSVKVLVGITIMEKGSYEKDPIGFLEAKGYKDIKKELIFKLPKYSLFELENGRRR | | | |
| | | MLASAKELQKANELVLPQHLVRLLYYTQNISATTGSNNLGYIEQHREEFKEIF | | | |
| | | EKIIDFSEKYILKNKVNSNLKSSFDEQFAVSDSILLSNSFVSLLKYTSFGASGGFT | | | |
| | | FLDLDVKQGRLRYQTVTEVLDATLIYQSITGLYETRTDLSQLGGD (SEQ ID | | | |
| | | NO: 20327) | | | |
| SpyCas9 | Streptococcus | MDKKYSIGLDIGTNSVGWAVITDEYKVPSKKFKVLGNTDRHSIKKNLIGALLF | N863A | H840A | D10A |
| | pyogenes | DSGETAEATRLKRTARRRYTRRKNRICYLQEIFSNEMAKVDDSFFHRLEESFL | | | |
| | | VEEDKKHERHPIFGNIVDEVAYHEKYPTIYHLRKKLVDSTDKADLRLIYLALAH | | | |
| | | MIKFRGHFLIEGDLNPDNSDVDKLFIQLVQTYNQLFEENPINASGVDAKAILS | | | |
| | | ARLSKSRRLENLIAQLPGEKKNGLFGNLIALSLGLTPNFKSNFDLAEDAKLQLS | | | |
| | | KDTYDDDLDNLLAQIGDQYADLFLAAKNLSDAILLSDILRVNTEITKAPLSAS | | | |
| | | MIKRYDEHHQDLTLLKALVRQQLPEKYKEIFFDQSKNGYAGYIDGGASQEEF | | | |
| | | YKFIKPILEKMDGTEELLVKLNREDLLRKQRTFDNGSIPHQIHLGELHAILRRQ | | | |
| | | EDFYPFLKDNREKIEKILTFRIPYYVGPLARGNSRFAWMTRKSEETITPWNFE | | | |
| | | EVVDKGASAQSFIERMTNFDKNLPNEKVLPKHSLLYEYFTVYNELTKVKYVTE | | | |
| | | GMRKPAFLSGEQKKAIVDLLFKTNRKVTVKQLKEDYFKKIECFDSVEISGVED | | | |
| | | RFNASLGTYHDLLKIIKDKDFLDNEENEDILEDIVLTLTLFEDREMIEERLKTYA | | | |
| | | HLFDDKVMKQLKRRRYTGWGRLSRKLINGIRDKQSGKTILDFLKSDGFANR | | | |
| | | NFMQLIHDDSLTFKEDIQKAQVSGQGDSLHEHIANLAGSPAIKKGILQTVKV | | | |
| | | VDELVKVMGRHKPENIVIEMARENQTTQKGQKNSRERMKRIEEGIKELGSQ | | | |
| | | ILKEHPVENTQLQNEKLYLYYLQNGRDMYVDQELDINRLSDYDVDHIVPQSF | | | |
| | | LKDDSIDNKVLTRSDKNRGKSDNVPSEEVVKKMKNYWRQLLNAKLITQRKF | | | |
| | | DNLTKAERGGLSELDKAGFIKRQLVETRQITKHVAQILDSRMNTKYDENDKLI | | | |
| | | REVKVITLKSKLVSDFRKDFQFYKVREINNYHHAHDAYLNAVVGTALIKKYPK | | | |
| | | LESEFVYGDYKVYDVRKMIAKSEQEIGKATAKYFFYSNIMNFFKTEITLANGEI | | | |
| | | RKRPLIETNGETGEIVWDKGRDFATVRKVLSMPQVNIVKKTEVQTGGFSKES | | | |
| | | ILPKRNSDKLIARKKDWDPKKYGGFDSPTVAYSVLVVAKVEKGKSKKLKSVKE | | | |
| | | LLGITIMERSSFEKNPIDFLEAKGYKEVKKDLIIKLPKYSLFELENGRKRMLASA | | | |
| | | GELQKGNELALPSKYVNFLYLASHYEKLKGSPEDNEQKQLFVEQHKHYLDEII | | | |
| | | EQISEFSKRVILADANLDKVLSAYNKHRDKPIREQAENIIHLFTLTNLGAPAAF | | | |
| | | KYFDTTIDRKRYTSTKEVLDATLIHQSITGLYETRIDLSQLGGD (SEQ ID NO: | | | |
| | | 20328) | | | |
| SpyCas9- | Streptococcus | MDKKYSIGLDIGTNSVGWAVITDEYKVPSKKFKVLGNTDRHSIKKNLIGALLF | N863A | H840A | D10A |
| NG | pyogenes | DSGETAEATRLKRTARRRYTRRKNRICYLQEIFSNEMAKVDDSFFHRLEESFL | | | |
| | | VEEDKKHERHPIFGNIVDEVAYHEKYPTIYHLRKKLVDSTDKADLRLIYLALAH | | | |
| | | MIKFRGHFLIEGDLNPDNSDVDKLFIQLVQTYNQLFEENPINASGVDAKAILS | | | |
| | | ARLSKSRRLENLIAQLPGEKKNGLFGNLIALSLGLTPNFKSNFDLAEDAKLQLS | | | |
| | | KDTYDDDLDNLLAQIGDQYADLFLAAKNLSDAILLSDILRVNTEITKAPLSAS | | | |
| | | MIKRYDEHHQDLTLLKALVRQQLPEKYKEIFFDQSKNGYAGYIDGGASQEEF | | | |
| | | YKFIKPILEKMDGTEELLVKLNREDLLRKQRTFDNGSIPHQIHLGELHAILRRQ | | | |
| | | EDFYPFLKDNREKIEKILTFRIPYYVGPLARGNSRFAWMTRKSEETITPWNFE | | | |
| | | EVVDKGASAQSFIERMTNFDKNLPNEKVLPKHSLLYEYFTVYNELTKVKYVTE | | | |
| | | GMRKPAFLSGEQKKAIVDLLFKTNRKVTVKQLKEDYFKKIECFDSVEISGVED | | | |
| | | RFNASLGTYHDLLKIIKDKDFLDNEENEDILEDIVLTLTLFEDREMIEERLKTYA | | | |
| | | HLFDDKVMKQLKRRRYTGWGRLSRKLINGIRDKQSGKTILDFLKSDGFANR | | | |
| | | NFMQLIHDDSLTFKEDIQKAQVSGQGDSLHEHIANLAGSPAIKKGILQTVKV | | | |
| | | VDELVKVMGRHKPENIVIEMARENQTTQKGQKNSRERMKRIEEGIKELGSQ | | | |
| | | ILKEHPVENTQLQNEKLYLYYLQNGRDMYVDQELDINRLSDYDVDHIVPQSF | | | |
| | | LKDDSIDNKVLTRSDKNRGKSDNVPSEEVVKKMKNYWRQLLNAKLITQRKF | | | |
| | | DNLTKAERGGLSELDKAGFIKRQLVETRQITKHVAQILDSRMNTKYDENDKLI | | | |
| | | REVKVITLKSKLVSDFRKDFQFYKVREINNYHHAHDAYLNAVVGTALIKKYPK | | | |
| | | LESEFVYGDYKVYDVRKMIAKSEQEIGKATAKYFFYSNIMNFFKTEITLANGEI | | | |
| | | RKRPLIETNGETGEIVWDKGRDFATVRKVLSMPQVNIVKKTEVQTGGFSKES | | | |
| | | IRPKRNSDKLIARKKDWDPKKYGGFVSPTVAYSVLVVAKVEKGKSKKLKSVKE | | | |
| | | LLGITIMERSSFEKNPIDFLEAKGYKEVKKDLIIKLPKYSLFELENGRKRMLASA | | | |
| | | RFLQKGNELALPSKYVNFLYLASHYEKLKGSPEDNEQKQLFVEQHKHYLDEII | | | |
| | | EQISEFSKRVILADANLDKVLSAYNKHRDKPIREQAENIIHLFTLTNLGAPRAF | | | |
| | | KYFDTTIDRKVYRSTKEVLDATLIHQSITGLYETRIDLSQLGGD (SEQ ID NO: | | | |
| | | 20329) | | | |
| SpyCas9- | Streptococcus | MDKKYSIGLDIGTNSVGWAVITDEYKVPSKKFKVLGNTDRHSIKKNLIGALLF | N863A | H840A | D10A |
| SpRY | pyogenes | DSGETAERTRLKRTARRRYTRRKNRICYLQEIFSNEMAKVDDSFFHRLEESFL | | | |
| | | VEEDKKHERHPIFGNIVDEVAYHEKYPTIYHLRKKLVDSTDKADLRLIYLALAH | | | |
| | | MIKFRGHFLIEGDLNPDNSDVDKLFIQLVQTYNQLFEENPINASGVDAKAILS | | | |
| | | ARLSKSRRLENLIAQLPGEKKNGLFGNLIALSLGLTPNFKSNFDLAEDAKLQLS | | | |
| | | KDTYDDDLDNLLAQIGDQYADLFLAAKNLSDAILLSDILRVNTEITKAPLSAS | | | |
| | | MIKRYDEHHQDLTLLKALVRQQLPEKYKEIFFDQSKNGYAGYIDGGASQEEF | | | |
| | | YKFIKPILEKMDGTEELLVKLNREDLLRKQRTFDNGSIPHQIHLGELHAILRRQ | | | |
| | | EDFYPFLKDNREKIEKILTFRIPYYVGPLARGNSRFAWMTRKSEETITPWNFE | | | |
| | | EVVDKGASAQSFIERMTNFDKNLPNEKVLPKHSLLYEYFTVYNELTKVKYVTE | | | |
| | | GMRKPAFLSGEQKKAIVDLLFKTNRKVTVKQLKEDYFKKIECFDSVEISGVED | | | |
| | | RFNASLGTYHDLLKIIKDKDFLDNEENEDILEDIVLTLTLFEDREMIEERLKTYA | | | |
| | | HLFDDKVMKQLKRRRYTGWGRLSRKLINGIRDKQSGKTILDFLKSDGFANR | | | |
| | | NFMQLIHDDSLTFKEDIQKAQVSGQGDSLHEHIANLAGSPAIKKGILQTVKV | | | |
| | | VDELVKVMGRHKPENIVIEMARENQTTQKGQKNSRERMKRIEEGIKELGSQ | | | |
| | | ILKEHPVENTQLQNEKLYLYYLQNGRDMYVDQELDINRLSDYDVDHIVPQSF | | | |
| | | LKDDSIDNKVLTRSDKNRGKSDNVPSEEVVKKMKNYWRQLLNAKLITQRKF | | | |
| | | DNLTKAERGGLSELDKAGFIKRQLVETRQITKHVAQILDSRMNTKYDENDKLI | | | |
| | | REVKVITLKSKLVSDFRKDFQFYKVREINNYHHAHDAYLNAVVGTALIKKYPK | | | |
| | | LESEFVYGDYKVYDVRKMIAKSEQEIGKATAKYFFYSNIMNFFKTEITLANGEI | | | |
| | | RKRPLIETNGETGEIVWDKGRDFATVRKVLSMPQVNIVKKTEVQTGGFSKES | | | |
| | | IRPKRNSDKLIARKKDWDPKKYGGFLWPTVAYSVLVVAKVEKGKSKKLKSVK | | | |
| | | ELLGITIMERSSFEKNPIDFLEAKGYKEVKKDLIIKLPKYSLFELENGRKRMLAS | | | |
| | | AKQLQKGNELALPSKYVNFLYLASHYEKLKGSPEDNEQKQLFVEQHKHYLDE | | | |
| | | IIEQISEFSKRVILADANLDKVLSAYNKHRDKPIREQAENIIHLFTLTRLGAPRAF | | | |
| | | KYFDTTIDPKQYRSTKEVLDATLIHQSITGLYETRIDLSQLGGD (SEQ ID NO: | | | |
| | | 20330) | | | |
| St1Cas9 | Streptococcus | MSDLVLGLDIGIGSVGVGILNKVTGEIIHKNSRIFPAAQAENNLVRRTNRQG | N622A | H599A | D9A |
| | thermophilus | RRLARRKKHRRVRLNRLFEESGLITDFTKISINLNPYQLRVKGLTDELSNEELFI | | | |
| | | ALKNMVKHRGISYLDDASDDGNSSVGDYAQIVKENSKQLETKTPGQIQLER | | | |
| | | YQTYGQLRGDFTVEKDGKKHRLINVFPTSAYRSEALRILQTQQEFNPQITDEF | | | |
| | | INRYLEILTGKRKYYHGPGNEKSRTDYGRYRTSGETLDNIFGILIGKCTFYPDEF | | | |
| | | RAAKASYTAQEFNLLNDLNNLTVPTETKKLSKEQKNQIINYVKNEKAMGPAK | | | |
| | | LFKYIAKLLSCDVADIKGYRIDKSGKAEIHTFEAYRKMKTLETLDIEQMDRETL | | | |
| | | DKLAYVLTLNTEREGIQEALEHEFADGSFSQKQVDELVQFRKANSSIFGKGW | | | |
| | | HNFSVKLMMELIPELYETSEEQMTILTRLGKQKTTSSSNKTKYIDEKLLTEEIY | | | |
| | | NPVVAKSVRQAIKIVNAAIKEYGDFDNIVIEMARETNEDDEKKAIQKIQKAN | | | |
| | | KDEKDAAMLKAANQYNGKAELPHSVFHGHKQLATKIRLWHQQGERCLYT | | | |
| | | GKTISIHDLINNSNQFEVDHILPLSITFDDSLANKVLVYATANQEKGQRTPYQ | | | |
| | | ALDSMDDAWSFRELKAFVRESKTLSNKKKEYLLTEEDISKFDVRKKFIERNLV | | | |
| | | DTRYASRVVLNALQEHFRAHKIDTKVSVVRGQFTSQLRRHWGIEKTRDTYH | | | |
| | | HHAVDALIIAASSQLNLWKKQKNTLVSYSEDQLLDIETGELISDDEYKESVFK | | | |
| | | APYQHFVDTLKSKEFEDSILFSYQVDSKFNRKISDATIYATRQAKVGKDKADE | | | |
| | | TYVLGKIKDIYTQDGYDAFMKIYKKDKSKFLMYRHDPQTFEKVIEPILENYPN | | | |
| | | KQINEKGKEVPCNPFLKYKEEHGYIRKYSKKGNGPEIKSLKYYDSKLGNHIDIT | | | |
| | | PKDSNNKVVLQSVSPWRADVYFNKTTGKYEILGLKYADLQFEKGTGTYKISQ | | | |
| | | EKYNDIKKKEGVDSDSEFKFTLYKNDLLLVKDTETKEQQLFRFLSRTMPKQKH | | | |
| | | YVELKPYDKQKFEGGEALIKVLGNVANSGQCKKGLGKSNISIYKVRTDVLGN | | | |
| | | QHIIKNEGDKPKLDF (SEQ ID NO: 20331) | | | |
| BlatCas9 | Brevibacillus | MAYTMGIDVGIASCGWAIVDLERQRIIDIGVRTFEKAENPKNGEALAVPRRE | N607A | H584A | D8A |
| | laterosporus | ARSSRRRLRRKKHRIERLKHMFVRNGLAVDIQHLEQTLRSQNEIDVWQLRV | | | |
| | | DGLDRMLTQKEWLRVLIHLAQRRGFQSNRKTDGSSEDGQVLVNVTENDRL | | | |
| | | MEEKDYRTVAEMMVKDEKFSDHKRNKNGNYHGVVSRSSLLVEIHTLFETQ | | | |
| | | RQHHNSLASKDFELEYVNIWSAQRPVATKDQIEKMIGTCTFLPKEKRAPKAS | | | |
| | | WHFQYFMLLQTINHIRITNVQGTRSLNKEEIEQVVNMALTKSKVSYHDTRKI | | | |
| | | LDLSEEYQFVGLDYGKEDEKKKVESKETIIKLDDYHKLNKIFNEVELAKGETWE | | | |
| | | ADDYDTVAYALTFFKDDEDIRDYLQNKYKDSKNRLVKNLANKEYTNELIGKV | | | |
| | | STLSFRKVGHLSLKALRKIIPFLEQGMTYDKACQAAGFDFQGISKKKRSVVLP | | | |
| | | VIDQISNPVVNRALTQTRKVINALIKKYGSPETIHIETARELSKTFDERKNITKD | | | |
| | | YKENRDKNEHAKKHLSELGIINPTGLDIVKYKLWCEQQGRCMYSNQPISFER | | | |
| | | LKESGYTEVDHIIPYSRSMNDSYNNRVLVMTRENREKGNQTPFEYMGNDT | | | |
| | | QRWYEFEQRVTTNPQIKKEKRQNLLLKGFTNRRELEMLERNLNDTRYITKYL | | | |
| | | SHFISTNLEFSPSDKKKKVVNTSGRITSHLRSRWGLEKNRGQNDLHHAMDAI | | | |
| | | VIAVTSDSFIQQVTNYYKRKERRELNGDDKFPLPWKFFREEVIARLSPNPKEQ | | | |
| | | IEALPNHFYSEDELADLQPIFVSRMPKRSITGEAHQAQFRRVVGKTKEGKNIT | | | |
| | | AKKTALVDISYDKNGDFNMYGRETDPATYEAIKERYLEFGGNVKKAFSTDLH | | | |
| | | KPKKDGTKGPLIKSVRIMENKTLVHPVNKGKGVVYNSSIVRTDVFQRKEKYY | | | |
| | | LLPVYVTDVTKGKLPNKVIVAKKGYHDWIEVDDSFTFLFSLYPNDLIFIRQNPK | | | |
| | | KKISLKKRIESHSISDSKEVQEIHAYYKGVDSSTAAIEFIIHDGSYYAKGVGVQN | | | |
| | | LDCFEKYQVDILGNYFKVKGEKRLELETSDSNHKGKDVNSIKSTSR (SEQ ID | | | |
| | | NO: 20332) | | | |
| cCas9-v16 | Staphylococcus | MKRNYILGLDIGITSVGYGIIDYETRDVIDAGVRLFKEANVENNEGRRSKRGA | N580A | H557A | D10A |
| | aureus | RRLKRRRRHRIQRVKKLLFDYNLLTDHSELSGINPYEARVKGLSQKLSEEEFSA | | | |
| | | ALLHLAKRRGVHNVNEVEEDTGNELSTKEQISRNSKALEEKYVAELQLERLKK | | | |
| | | DGEVRGSINRFKTSDYVKEAKQLLKVQKAYHQLDQSFIDTYIDLLETRRTYYE | | | |
| | | GPGEGSPFGWKDIKEWYEMLMGHCTYFPEELRSVKYAYNADLYNALNDLN | | | |
| | | NLVITRDENEKLEYYEKFQIIENVFKQKKKPTLKQIAKEILVNEEDIKGYRVTST | | | |
| | | GKPEFTNLKVYHDIKDITARKEIIENAELLDQIAKILTIYQSSEDIQEELTNLNSE | | | |
| | | LTQEEIEQISNLKGYTGTHNLSLKAINLILDELWHTNDNQIAIFNRLKLVPKKV | | | |
| | | DLSQQKEIPTTLVDDFILSPVVKRSFIQSIKVINAIIKKYGLPNDIIIELAREKNSK | | | |
| | | DAQKMINEMQKRNRQTNERIEEIIRTTGKENAKYLIEKIKLHDMQEGKCLYS | | | |
| | | LEAIPLEDLLNNPFNYEVDHIIPRSVSFDNSFNNKVLVKQEENSKKGNRTPFQ | | | |
| | | YLSSSDSKISYETFKKHILNLAKGKGRISKTKKEYLLEERDINRFSVQKDFINRNL | | | |
| | | VDTRYATRGLMNLLRSYFRVNNLDVKVKSINGGFTSFLRRKWKFKKERNKG | | | |
| | | YKHHAEDALIIANADFIFKEWKKLDKAKKVMENQMFEEKQAESMPEIETEQ | | | |
| | | EYKEIFITPHQIKHIKDFKDYKYSHRVDKKPNRKLINDTLYSTRKDDKGNTLIV | | | |
| | | NNLNGLYDKDNDKLKKLINKSPEKLLMYHHDPQTYQKLKLIMEQYGDEKNP | | | |
| | | LYKYYEETGNYLTKYSKKDNGPVIKKIKYYGNKLNAHLDITDDYPNSRNKVVK | | | |
| | | LSLKPYRFDVYLDNGVYKFVTVKNLDVIKKENYYEVNSKCYEEAKKLKKISNQ | | | |
| | | AEFIASFYKNDLIKINGELYRVIGVNSDKNNLIEVNMIDITYREYLENMNDKRP | | | |
| | | PHIIKTIASKTQSIKKYSTDILGNLYEVKSKKHPQIIKKG (SEQ ID NO: 20333) | | | |
| cCas9-v17 | Staphylococcus | MKRNYILGLDIGITSVGYGIIDYETRDVIDAGVRLFKEANVENNEGRRSKRGA | N580A | H557A | D10A |
| | aureus | RRLKRRRRHRIQRVKKLLFDYNLLTDHSELSGINPYEARVKGLSQKLSEEEFSA | | | |
| | | ALLHLAKRRGVHNVNEVEEDTGNELSTKEQISRNSKALEEKYVAELQLERLKK | | | |
| | | DGEVRGSINRFKTSDYVKEAKQLLKVQKAYHQLDQSFIDTYIDLLETRRTYYE | | | |
| | | GPGEGSPFGWKDIKEWYEMLMGHCTYFPEELRSVKYAYNADLYNALNDLN | | | |
| | | NLVITRDENEKLEYYEKFQIIENVFKQKKKPTLKQIAKEILVNEEDIKGYRVTST | | | |
| | | GKPEFTNLKVYHDIKDITARKEIIENAELLDQIAKILTIYQSSEDIQEELTNLNSE | | | |
| | | LTQEEIEQISNLKGYTGTHNLSLKAINLILDELWHTNDNQIAIFNRLKLVPKKV | | | |
| | | DLSQQKEIPTTLVDDFILSPVVKRSFIQSIKVINAIIKKYGLPNDIIIELAREKNSK | | | |
| | | DAQKMINEMQKRNRQTNERIEEIIRTTGKENAKYLIEKIKLHDMQEGKCLYS | | | |
| | | LEAIPLEDLLNNPFNYEVDHIIPRSVSFDNSFNNKVLVKQEENSKKGNRTPFQ | | | |
| | | YLSSSDSKISYETFKKHILNLAKGKGRISKTKKEYLLEERDINRFSVQKDFINRNL | | | |
| | | VDTRYATRGLMNLLRSYFRVNNLDVKVKSINGGFTSFLRRKWKFKKERNKG | | | |
| | | YKHHAEDALIIANADFIFKEWKKLDKAKKVMENQMFEEKQAESMPEIETEQ | | | |
| | | EYKEIFITPHQIKHIKDFKDYKYSHRVDKKPNRKLINDTLYSTRKDDKGNTLIV | | | |
| | | NNLNGLYDKDNDKLKKLINKSPEKLLMYHHDPQTYQKLKLIMEQYGDEKNP | | | |
| | | LYKYYEETGNYLTKYSKKDNGPVIKKIKYYGNKLNAHLDITDDYPNSRNKVVK | | | |
| | | LSLKPYRFDVYLDNGVYKFVTVKNLDVIKKENYYEVNSKCYEEAKKLKKISNQ | | | |
| | | AEFIASFYKNDLIKINGELYRVIGVNNSTRNIVELNMIDITYREYLENMNDKRP | | | |
| | | PHIIKTIASKTQSIKKYSTDILGNLYEVKSKKHPQIIKKG (SEQ ID NO: 20334) | | | |
| cCas9-v21 | Staphylococcus | MKRNYILGLDIGITSVGYGIIDYETRDVIDAGVRLFKEANVENNEGRRSKRGA | N580A | H557A | D10A |
| | aureus | RRLKRRRRHRIQRVKKLLFDYNLLTDHSELSGINPYEARVKGLSQKLSEEEFSA | | | |
| | | ALLHLAKRRGVHNVNEVEEDTGNELSTKEQISRNSKALEEKYVAELQLERLKK | | | |
| | | DGEVRGSINRFKTSDYVKEAKQLLKVQKAYHQLDQSFIDTYIDLLETRRTYYE | | | |
| | | GPGEGSPFGWKDIKEWYEMLMGHCTYFPEELRSVKYAYNADLYNALNDLN | | | |
| | | NLVITRDENEKLEYYEKFQIIENVFKQKKKPTLKQIAKEILVNEEDIKGYRVTST | | | |
| | | GKPEFTNLKVYHDIKDITARKEIIENAELLDQIAKILTIYQSSEDIQEELTNLNSE | | | |
| | | LTQEEIEQISNLKGYTGTHNLSLKAINLILDELWHTNDNQIAIFNRLKLVPKKV | | | |
| | | DLSQQKEIPTTLVDDFILSPVVKRSFIQSIKVINAIIKKYGLPNDIIIELAREKNSK | | | |
| | | DAQKMINEMQKRNRQTNERIEEIIRTTGKENAKYLIEKIKLHDMQEGKCLYS | | | |
| | | LEAIPLEDLLNNPFNYEVDHIIPRSVSFDNSFNNKVLVKQEENSKKGNRTPFQ | | | |
| | | YLSSSDSKISYETFKKHILNLAKGKGRISKTKKEYLLEERDINRFSVQKDFINRNL | | | |
| | | VDTRYATRGLMNLLRSYFRVNNLDVKVKSINGGFTSFLRRKWKFKKERNKG | | | |
| | | YKHHAEDALIIANADFIFKEWKKLDKAKKVMENQMFEEKQAESMPEIETEQ | | | |
| | | EYKEIFITPHQIKHIKDFKDYKYSHRVDKKPNRKLINDTLYSTRKDDKGNTLIV | | | |
| | | NNLNGLYDKDNDKLKKLINKSPEKLLMYHHDPQTYQKLKLIMEQYGDEKNP | | | |
| | | LYKYYEETGNYLTKYSKKDNGPVIKKIKYYGNKLNAHLDITDDYPNSRNKVVK | | | |
| | | LSLKPYRFDVYLDNGVYKFVTVKNLDVIKKENYYEVNSKCYEEAKKLKKISNQ | | | |
| | | AEFIASFYKNDLIKINGELYRVIGVNSDDRNIIELNMIDITYREYLENMNDKRP | | | |
| | | PHIIKTIASKTQSIKKYSTDILGNLYEVKSKKHPQIIKKG (SEQ ID NO: 20335) | | | |
| cCas9-v42 | Staphylococcus | MKRNYILGLDIGITSVGYGIIDYETRDVIDAGVRLFKEANVENNEGRRSKRGA | N580A | H557A | D10A |
| | aureus | RRLKRRRRHRIQRVKKLLFDYNLLTDHSELSGINPYEARVKGLSQKLSEEEFSA | | | |
| | | ALLHLAKRRGVHNVNEVEEDTGNELSTKEQISRNSKALEEKYVAELQLERLKK | | | |
| | | DGEVRGSINRFKTSDYVKEAKQLLKVQKAYHQLDQSFIDTYIDLLETRRTYYE | | | |
| | | GPGEGSPFGWKDIKEWYEMLMGHCTYFPEELRSVKYAYNADLYNALNDLN | | | |
| | | NLVITRDENEKLEYYEKFQIIENVFKQKKKPTLKQIAKEILVNEEDIKGYRVTST | | | |
| | | GKPEFTNLKVYHDIKDITARKEIIENAELLDQIAKILTIYQSSEDIQEELTNLNSE | | | |
| | | LTQEEIEQISNLKGYTGTHNLSLKAINLILDELWHTNDNQIAIFNRLKLVPKKV | | | |
| | | DLSQQKEIPTTLVDDFILSPVVKRSFIQSIKVINAIIKKYGLPNDIIIELAREKNSK | | | |
| | | DAQKMINEMQKRNRQTNERIEEIIRTTGKENAKYLIEKIKLHDMQEGKCLYS | | | |
| | | LEAIPLEDLLNNPFNYEVDHIIPRSVSFDNSFNNKVLVKQEENSKKGNRTPFQ | | | |
| | | YLSSSDSKISYETFKKHILNLAKGKGRISKTKKEYLLEERDINRFSVQKDFINRNL | | | |
| | | VDTRYATRGLMNLLRSYFRVNNLDVKVKSINGGFTSFLRRKWKFKKERNKG | | | |
| | | YKHHAEDALIIANADFIFKEWKKLDKAKKVMENQMFEEKQAESMPEIETEQ | | | |
| | | EYKEIFITPHQIKHIKDFKDYKYSHRVDKKPNRKLINDTLYSTRKDDKGNTLIV | | | |
| | | NNLNGLYDKDNDKLKKLINKSPEKLLMYHHDPQTYQKLKLIMEQYGDEKNP | | | |
| | | LYKYYEETGNYLTKYSKKDNGPVIKKIKYYGNKLNAHLDITDDYPNSRNKVVK | | | |
| | | LSLKPYRFDVYLDNGVYKFVTVKNLDVIKKENYYEVNSKCYEEAKKLKKISNQ | | | |
| | | AEFIASFYKNDLIKINGELYRVIGVNNNRLNKIELNMIDITYREYLENMNDKRP | | | |
| | | PHIIKTIASKTQSIKKYSTDILGNLYEVKSKKHPQIIKKG (SEQ ID NO: 20336) | | | |
| CdiCas9 | Corynebacterium | MKYHVGIDVGTFSVGLAAIEVDDAGMPIKTLSLVSHIHDSGLDPDEIKSAVT | N597A | H573A | D8A |
| | diphtheriae | RLASSGIARRTRRLYRRKRRRLQQLDKFIQRQGWPVIELEDYSDPLYPWKVR | | | |
| | | AELAASYIADEKERGEKLSVALRHIARHRGWRNPYAKVSSLYLPDGPSDAFK | | | |
| | | AIREEIKRASGQPVPETATVGQMVTLCELGTLKLRGEGGVLSARLQQSDYAR | | | |
| | | EIQEICRMQEIGQELYRKIIDVVFAAESPKGSASSRVGKDPLQPGKNRALKAS | | | |
| | | DAFQRYRIAALIGNLRVRVDGEKRILSVEEKNLVFDHLVNLTPKKEPEWVTIA | | | |
| | | EILGIDRGQLIGTATMTDDGERAGARPPTHDTNRSIVNSRIAPLVDWWKTA | | | |
| | | SALEQHAMVKALSNAEVDDFDSPEGAKVQAFFADLDDDVHAKLDSLHLPV | | | |
| | | GRAAYSEDTLVRLTRRMLSDGVDLYTARLQEFGIEPSWTPPTPRIGEPVGNP | | | |
| | | AVDRVLKTVSRWLESATKTWGAPERVIIEHVREGFVTEKRAREMDGDMRR | | | |
| | | RAARNAKLFQEMQEKLNVQGKPSRADLWRYQSVQRQNCQCAYCGSPITF | | | |
| | | SNSEMDHIVPRAGQGSTNTRENLVAVCHRCNQSKGNTPFAIWAKNTSIEG | | | |
| | | VSVKEAVERTRHWVTDTGMRSTDFKKFTKAVVERFQRATMDEEIDARSME | | | |
| | | SVAWMANELRSRVAQHFASHGTTVRVYRGSLTAEARRASGISGKLKFFDGV | | | |
| | | GKSRLDRRHHAIDAAVIAFTSDYVAETLAVRSNLKQSQAHRQEAPQWREFT | | | |
| | | GKDAEHRAAWRVWCQKMEKLSALLTEDLRDDRVVVMSNVRLRLGNGSA | | | |
| | | HKETIGKLSKVKLSSQLSVSDIDKASSEALWCALTREPGFDPKEGLPANPERHI | | | |
| | | RVNGTHVYAGDNIGLFPVSAGSIALRGGYAELGSSFHHARVYKITSGKKPAF | | | |
| | | AMLRVYTIDLLPYRNQDLFSVELKPQTMSMRQAEKKLRDALATGNAEYLG | | | |
| | | WLVVDDELVVDTSKIATDQVKAVEAELGTIRRWRVDGFFSPSKLRLRPLQM | | | |
| | | SKEGIKKESAPELSKIIDRPGWLPAVNKLFSDGNVTVVRRDSLGRVRLESTAH | | | |
| | | LPVTWKVQ (SEQ ID NO: 20337) | | | |
| CjeCas9 | Campylobacter | MARILAFDIGISSIGWAFSENDELKDCGVRIFTKVENPKTGESLALPRRLARSA | N582A | H559A | D8A |
| | jejuni | RKRLARRKARLNHLKHLIANEFKLNYEDYQSFDESLAKAYKGSLISPYELRFRA | | | |
| | | LNELLSKQDFARVILHIAKRRGYDDIKNSDDKEKGAILKAIKQNEEKLANYQS | | | |
| | | VGEYLYKEYFQKFKENSKEFTNVRNKKESYERCIAQSFLKDELKLIFKKQREFG | | | |
| | | FSFSKKFEEEVLSVAFYKRALKDFSHLVGNCSFFTDEKRAPKNSPLAFMFVAL | | | |
| | | TRIINLLNNLKNTEGILYTKDDLNALLNEVLKNGTLTYKQTKKLLGLSDDYEFK | | | |
| | | GEKGTYFIEFKKYKEFIKALGEHNLSQDDLNEIAKDITLIKDEIKLKKALAKYDLN | | | |
| | | QNQIDSLSKLEFKDHLNISFKALKLVTPLMLEGKKYDEACNELNLKVAINEDK | | | |
| | | KDFLPAFNETYYKDEVTNPVVLRAIKEYRKVLNALLKKYGKVHKINIELAREVG | | | |
| | | KNHSQRAKIEKEQNENYKAKKDAELECEKLGLKINSKNILKLRLFKEQKEFCAY | | | |
| | | SGEKIKISDLQDEKMLEIDHIYPYSRSFDDSYMNKVLVFTKQNQEKLNQTPFE | | | |
| | | AFGNDSAKWQKIEVLAKNLPTKKQKRILDKNYKDKEQKNFKDRNLNDTRYI | | | |
| | | ARLVLNYTKDYLDFLPLSDDENTKLNDTQKGSKVHVEAKSGMLTSALRHTW | | | |
| | | GFSAKDRNNHLHHAIDAVIIAYANNSIVKAFSDFKKEQESNSAELYAKKISELD | | | |
| | | YKNKRKFFEPFSGFRQKVLDKIDEIFVSKPERKKPSGALHEETFRKEEEFYQSY | | | |
| | | GGKEGVLKALELGKIRKVNGKIVKNGDMFRVDIFKHKKTNKFYAVPIYTMDF | | | |
| | | ALKVLPNKAVARSKKGEIKDWILMDENYEFCFSLYKDSLILIQTKDMQEPEFV | | | |
| | | YYNAFTSSTVSLIVSKHDNKFETLSKNQKILFKNANEKEVIAKSIGIQNLKVFEK | | | |
| | | YIVSALGEVTKAEFRQREDFKK (SEQ ID NO: 20338) | | | |
| GeoCas9 | Geobacillus | MRYKIGLDIGITSVGWAVMNLDIPRIEDLGVRIFDRAENPQTGESLALPRRLA | N605A | H582A | D8A |
| | stearothermophilus | RSARRRLRRRKHRLERIRRLVIREGILTKEELDKLFEEKHEIDVWQLRVEALDR | | | |
| | | KLNNDELARVLLHLAKRRGFKSNRKSERSNKENSTMLKHIEENRAILSSYRTV | | | |
| | | GEMIVKDPKFALHKRNKGENYTNTIARDDLEREIRLIFSKQREFGNMSCTEEF | | | |
| | | ENEYITIWASQRPVASKDDIEKKVGFCTFEPKEKRAPKATYTFQSFIAWEHIN | | | |
| | | KLRLISPSGARGLTDEERRLLYEQAFQKNKITYHDIRTLLHLPDDTYFKGIVYDR | | | |
| | | GESRKQNENIRFLELDAYHQIRKAVDKVYGKGKSSSFLPIDFDTFGYALTLFKD | | | |
| | | DADIHSYLRNEYEQNGKRMPNLANKVYDNELIEELLNLSFTKFGHLSLKALRS | | | |
| | | ILPYMEQGEVYSSACERAGYTFTGPKKKQKTMLLPNIPPIANPVVMRALTQA | | | |
| | | RKVVNAIIKKYGSPVSIHIELARDLSQTFDERRKTKKEQDENRKKNETAIRQL | | | |
| | | MEYGLTLNPTGHDIVKFKLWSEQNGRCAYSLQPIEIERLLEPGYVEVDHVIPY | | | |
| | | SRSLDDSYTNKVLVLTRENREKGNRIPAEYLGVGTERWQQFETFVLTNKQFS | | | |
| | | KKKRDRLLRLHYDENEETEFKNRNLNDTRYISRFFANFIREHLKFAESDDKQK | | | |
| | | VYTVNGRVTAHLRSRWEFNKNREESDLHHAVDAVIVACTTPSDIAKVTAFY | | | |
| | | QRREQNKELAKKTEPHFPQPWPHFADELRARLSKHPKESIKALNLGNYDDQ | | | |
| | | KLESLQPVFVSRMPKRSVTGAAHQETLRRYVGIDERSGKIQTVVKTKLSEIKL | | | |
| | | DASGHFPMYGKESDPRTYEAIRQRLLEHNNDPKKAFQEPLYKPKKNGEPGP | | | |
| | | VIRTVKIIDTKNQVIPLNDGKTVAYNSNIVRVDVFEKDGKYYCVPVYTMDIM | | | |
| | | KGILPNKAIEPNKPYSEWKEMTEDYTFRFSLYPNDLIRIELPREKTVKTAAGEE | | | |
| | | INVKDVFVYYKTIDSANGGLELISHDHRFSLRGVGSRTLKRFEKYQVDVLGNI | | | |
| | | YKVRGEKRVGLASSAHSKPGKTIRPLQSTRD (SEQ ID NO: 20339) | | | |
| iSpyMacCas9 | Streptococcus | MDKKYSIGLDIGTNSVGWAVITDEYKVPSKKFKVLGNTDRHSIKKNLIGALLF | N863A | H840A | D10A |
| | spp. | DSGETAEATRLKRTARRRYTRRKNRICYLQEIFSNEMAKVDDSFFHRLEESFL | | | |
| | | VEEDKKHERHPIFGNIVDEVAYHEKYPTIYHLRKKLVDSTDKADLRLIYLALAH | | | |
| | | MIKFRGHFLIEGDLNPDNSDVDKLFIQLVQTYNQLFEENPINASGVDAKAILS | | | |
| | | ARLSKSRKLENLIAQLPGEKKNGLFGNLIALSLGLTPNFKSNFDLAEDAKLQLS | | | |
| | | KDTYDDDLDNLLAQIGDQYADLFLAAKNLSDAILLSDILRVNTEITKAPLSAS | | | |
| | | MIKRYDEHHQDLTLLKALVRQQLPEKYKEIFFDQSKNGYAGYIDGGASQEEF | | | |
| | | YKFIKPILEKMDGTEELLVKLKREDLLRKQRTFDNGSIPHQIHLGELHAILRRQ | | | |
| | | EDFYPFLKDNREKIEKILTFRIPYYVGPLARGNSRFAWMTRKSEETITPWNFE | | | |
| | | EVVDKGASAQSFIERMTNFDKNLPNEKVLPKHSLLYEYFTVYNELTKVKYVTE | | | |
| | | GMRKPAFLSGEQKKAIVDLLFKTNRKVTVKQLKEDYFKKIECFDSVEISGVED | | | |
| | | RFNASLGTYHDLLKIIKDKDFLDNEENEDILEDIVLTLTLFEDREMIEERLKTYA | | | |
| | | HLFDDKVMKQLKRRRYTGWGRLSRKLINGIRDKQSGKTILDFLKSDGFANR | | | |
| | | NFMQLIHDDSLTFKEDIQKAQVSGQGDSLHEHIANLAGSPAIKKGILQTVKV | | | |
| | | VDELVKVMGRHKPENIVIEMARENQTTQKGQKNSRERMKRIEEGIKELGSQ | | | |
| | | ILKEHPVENTQLQNEKLYLYYLQNGRDMYVDQELDINRLSDYDVDHIVPQSF | | | |
| | | LKDDSIDNKVLTRSDKNRGKSDNVPSEEVVKKMKNYWRQLLNAKLITQRKF | | | |
| | | DNLTKAERGGLSELDKAGFIKRQLVETRQITKHVAQILDSRMNTKYDENDKLI | | | |
| | | REVKVITLKSKLVSDFRKDFQFYKVREINNYHHAHDAYLNAVVGTALIKKYPK | | | |
| | | LESEFVYGDYKVYDVRKMIAKSEQEIGKATAKYFFYSNIMNFFKTEITLANGEI | | | |
| | | RKRPLIETNGETGEIVWDKGRDFATVRKVLSMPQVNIVKKTEIQTVGQNGG | | | |
| | | LFDDNPKSPLEVTPSKLVPLKKELNPKKYGGYQKPTTAYPVLLITDTKQLIPISV | | | |
| | | MNKKQFEQNPVKFLRDRGYQQVGKNDFIKLPKYTLVDIGDGIKRLWASSKEI | | | |
| | | HKGNQLVVSKKSQILLYHAHHLDSDLSNDYLQNHNQQFDVLFNEIISFSKKC | | | |
| | | KLGKEHIQKIENVYSNKKNSASIEELAESFIKLLGFTQLGATSPFNFLGVKLNQ | | | |
| | | KQYKGKKDYILPCTEGTLIRQSITGLYETRVDLSKIGEDSGGSGGSKRTADGSE | | | |
| | | FES (SEQ ID NO: 20340) | | | |
| NmeCas9 | Neisseria | MAAFKPNSINYILGLDIGIASVGWAMVEIDEEENPIRLIDLGVRVFERAEVPK | N611A | H588A | D16A |
| | meningitidis | TGDSLAMARRLARSVRRLTRRRAHRLLRTRRLLKREGVLQAANFDENGLIKS | | | |
| | | LPNTPWQLRAAALDRKLTPLEWSAVLLHLIKHRGYLSQRKNEGETADKELG | | | |
| | | ALLKGVAGNAHALQTGDFRTPAELALNKFEKESGHIRNQRSDYSHTFSRKDL | | | |
| | | QAELILLFEKQKEFGNPHVSGGLKEGIETLLMTQRPALSGDAVQKMLGHCTF | | | |
| | | EPAEPKAAKNTYTAERFIWLTKLNNLRILEQGSERPLTDTERATLMDEPYRKS | | | |
| | | KLTYAQARKLLGLEDTAFFKGLRYGKDNAEASTLMEMKAYHAISRALEKEGL | | | |
| | | KDKKSPLNLSPELQDEIGTAFSLFKTDEDITGRLKDRIQPEILEALLKHISFDKFV | | | |
| | | QISLKALRRIVPLMEQGKRYDEACAEIYGDHYGKKNTEEKIYLPPIPADEIRNP | | | |
| | | VVLRALSQARKVINGVVRRYGSPARIHIETAREVGKSFKDRKEIEKRQEENRK | | | |
| | | DREKAAAKFREYFPNFVGEPKSKDILKLRLYEQQHGKCLYSGKEINLGRLNEK | | | |
| | | GYVEIDHALPFSRTWDDSFNNKVLVLGSENQNKGNQTPYEYFNGKDNSRE | | | |
| | | WQEFKARVETSRFPRSKKQRILLQKFDEDGFKERNLNDTRYVNRFLCQFVA | | | |
| | | DRMRLTGKGKKRVFASNGQITNLLRGFWGLRKVRAENDRHHALDAVVVA | | | |
| | | CSTVAMQQKITRFVRYKEMNAFDGKTIDKETGEVLHQKTHFPQPWEFFAQ | | | |
| | | EVMIRVFGKPDGKPEFEEADTLEKLRTLLAEKLSSRPEAVHEYVTPLFVSRAP | | | |
| | | NRKMSGQGHMETVKSAKRLDEGVSVLRVPLTQLKLKDLEKMVNREREPKL | | | |
| | | YEALKARLEAHKDDPAKAFAEPFYKYDKAGNRTQQVKAVRVEQVQKTGVW | | | |
| | | VRNHNGIADNATMVRVDVFEKGDKYYLVPIYSWQVAKGILPDRAVVQGKD | | | |
| | | EEDWQLIDDSFNFKFSLHPNDLVEVITKKARMFGYFASCHRGTGNINIRIHD | | | |
| | | LDHKIGKNGILEGIGVKTALSFQKYQIDELGKEIRPCRLKKRPPVR (SEQ ID | | | |
| | | NO: 20341) | | | |
| ScaCas9 | Streptococcus | MEKKYSIGLDIGTNSVGWAVITDDYKVPSKKFKVLGNTNRKSIKKNLMGALL | N872A | H849A | D10A |
| | canis | FDSGETAEATRLKRTARRRYTRRKNRIRYLQEIFANEMAKLDDSFFQRLEESF | | | |
| | | LVEEDKKNERHPIFGNLADEVAYHRNYPTIYHLRKKLADSPEKADLRLIYLALA | | | |
| | | HIIKFRGHFLIEGKLNAENSDVAKLFYQLIQTYNQLFEESPLDEIEVDAKGILSA | | | |
| | | RLSKSKRLEKLIAVFPNEKKNGLFGNIIALALGLTPNFKSNFDLTEDAKLQLSKD | | | |
| | | TYDDDLDELLGQIGDQYADLFSAAKNLSDAILLSDILRSNSEVTKAPLSASMV | | | |
| | | KRYDEHHQDLALLKTLVRQQFPEKYAEIFKDDTKNGYAGYVGIGIKHRKRTT | | | |
| | | KLATQEEFYKFIKPILEKMDGAEELLAKLNRDDLLRKQRTFDNGSIPHQIHLKE | | | |
| | | LHAILRRQEEFYPFLKENREKIEKILTFRIPYYVGPLARGNSRFAWLTRKSEEAI | | | |
| | | TPWNFEEVVDKGASAQSFIERMTNFDEQLPNKKVLPKHSLLYEYFTVYNELT | | | |
| | | KVKYVTERMRKPEFLSGEQKKAIVDLLFKTNRKVTVKQLKEDYFKKIECFDSV | | | |
| | | EIIGVEDRFNASLGTYHDLLKIIKDKDFLDNEENEDILEDIVLTLTLFEDREMIEE | | | |
| | | RLKTYAHLFDDKVMKQLKRRHYTGWGRLSRKMINGIRDKQSGKTILDFLKS | | | |
| | | DGFSNRNFMQLIHDDSLTFKEEIEKAQVSGQGDSLHEQIADLAGSPAIKKGIL | | | |
| | | QTVKIVDELVKVMGHKPENIVIEMARENQTTTKGLQQSRERKKRIEEGIKELE | | | |
| | | SQILKENPVENTQLQNEKLYLYYLQNGRDMYVDQELDINRLSDYDVDHIVP | | | |
| | | QSFIKDDSIDNKVLTRSVENRGKSDNVPSEEVVKKMKNYWRQLLNAKLITQ | | | |
| | | RKFDNLTKAERGGLSEADKAGFIKRQLVETRQITKHVARILDSRMNTKRDKN | | | |
| | | DKPIREVKVITLKSKLVSDFRKDFQLYKVRDINNYHHAHDAYLNAVVGTALIK | | | |
| | | KYPKLESEFVYGDYKVYDVRKMIAKSEQEIGKATAKRFFYSNIMNFFKTEVKL | | | |
| | | ANGEIRKRPLIETNGETGEVVWNKEKDFATVRKVLAMPQVNIVKKTEVQTG | | | |
| | | GFSKESILSKRESAKLIPRKKGWDTRKYGGFGSPTVAYSILVVAKVEKGKAKKL | | | |
| | | KSVKVLVGITIMEKGSYEKDPIGFLEAKGYKDIKKELIFKLPKYSLFELENGRRR | | | |
| | | MLASATELQKANELVLPQHLVRLLYYTQNISATTGSNNLGYIEQHREEFKEIF | | | |
| | | EKIIDFSEKYILKNKVNSNLKSSFDEQFAVSDSILLSNSFVSLLKYTSFGASGGFT | | | |
| | | FLDLDVKQGRLRYQTVTEVLDATLIYQSITGLYETRTDLSQLGGD (SEQ ID | | | |
| | | NO: 20342) | | | |
| ScaCas9- | Streptococcus | MEKKYSIGLDIGTNSVGWAVITDDYKVPSKKFKVLGNTNRKSIKKNLMGALL | N872A | H840A | D10A |
| HiFi-Sc++ | canis | FDSGETAEATRLKRTARRRYTRRKNRIRYLQEIFANEMAKLDDSFFQRLEESF | | | |
| | | LVEEDKKNERHPIFGNLADEVAYHRNYPTIYHLRKKLADSPEKADLRLIYLALA | | | |
| | | HIIKFRGHFLIEGKLNAENSDVAKLFYQLIQTYNQLFEESPLDEIEVDAKGILSA | | | |
| | | RLSKSKRLEKLIAVFPNEKKNGLFGNIIALALGLTPNFKSNFDLTEDAKLQLSKD | | | |
| | | TYDDDLDELLGQIGDQYADLFSAAKNLSDAILLSDILRSNSEVTKAPLSASMV | | | |
| | | KRYDEHHQDLALLKTLVRQQFPEKYAEIFKDDTKNGYAGYVGADKKLRKRS | | | |
| | | GKLATEEEFYKFIKPILEKMDGAEELLAKLNRDDLLRKQRTFDNGSIPHQIHLK | | | |
| | | ELHAILRRQEEFYPFLKENREKIEKILTFRIPYYVGPLARGNSRFAWLTRKSEEA | | | |
| | | ITPWNFEEVVDKGASAQSFIERMTNFDEQLPNKKVLPKHSLLYEYFTVYNEL | | | |
| | | TKVKYVTERMRKPEFLSGEQKKAIVDLLFKTNRKVTVKQLKEDYFKKIECFDS | | | |
| | | VEIIGVEDRFNASLGTYHDLLKIIKDKDFLDNEENEDILEDIVLTLTLFEDREMIE | | | |
| | | ERLKTYAHLFDDKVMKQLKRRHYTGWGRLSRKMINGIRDKQSGKTILDFLKS | | | |
| | | DGFSNANFMQLIHDDSLTFKEEIEKAQVSGQGDSLHEQIADLAGSPAIKKGIL | | | |
| | | QTVKIVDELVKVMGHKPENIVIEMARENQTTTKGLQQSRERKKRIEEGIKELE | | | |
| | | SQILKENPVENTQLQNEKLYLYYLQNGRDMYVDQELDINRLSDYDVDHIVP | | | |
| | | QSFIKDDSIDNKVLTRSVENRGKSDNVPSEEVVKKMKNYWRQLLNAKLITQ | | | |
| | | RKFDNLTKAERGGLSEADKAGFIKRQLVETRQITKHVARILDSRMNTKRDKN | | | |
| | | DKPIREVKVITLKSKLVSDFRKDFQLYKVRDINNYHHAHDAYLNAVVGTALIK | | | |
| | | KYPKLESEFVYGDYKVYDVRKMIAKSEQEIGKATAKRFFYSNIMNFFKTEVKL | | | |
| | | ANGEIRKRPLIETNGETGEVVWNKEKDFATVRKVLAMPQVNIVKKTEVQTG | | | |
| | | GFSKESILSKRESAKLIPRKKGWDTRKYGGFGSPTVAYSILVVAKVEKGKAKKL | | | |
| | | KSVKVLVGITIMEKGSYEKDPIGFLEAKGYKDIKKELIFKLPKYSLFELENGRRR | | | |
| | | MLASAKELQKANELVLPQHLVRLLYYTQNISATTGSNNLGYIEQHREEFKEIF | | | |
| | | EKIIDFSEKYILKNKVNSNLKSSFDEQFAVSDSILLSNSFVSLLKYTSFGASGGFT | | | |
| | | FLDLDVKQGRLRYQTVTEVLDATLIYQSITGLYETRTDLSQLGGD (SEQ ID | | | |
| | | NO: 20343) | | | |
| SpyCas9- | Streptococcus | MDKKYSIGLDIGTNSVGWAVITDEYKVPSKKFKVLGNTDRHSIKKNLIGALLF | N863A | H840A | D10A |
| 3var-NRRH | pyogenes | DSGETAEATRLKRTARRRYTRRKNRICYLQEIFSNEMAKVDDSFFHRLEESFL | | | |
| | | VEEDKKHERHPIFGNIVDEVAYHEKYPTIYHLRKKLVDSTDKADLRLIYLALAH | | | |
| | | MIKFRGHFLIEGDLNPDNSDVDKLFIQLVQTYNQLFEENPINASGVDAKAILS | | | |
| | | ARLSKSRRLENLIAQLPGEKKNGLFGNLIALSLGLTPNFKSNFDLAEDAKLQLS | | | |
| | | KDTYDDDLDNLLAQIGDQYADLFLAAKNLSDAILLSDILRVNTEITKAPLSAS | | | |
| | | MVKRYDEHHQDLTLLKALVRQQLPEKYKEIFFDQSKNGYAGYIDGGASQEE | | | |
| | | FYKFIKPILEKMDGTEELLVKLNREDLLRKQRTFDNGIIPHQIHLGELHAILRRQ | | | |
| | | GDFYPFLKDNREKIEKILTFRIPYYVGPLARGNSRFAWMTRKSEETITPWNFE | | | |
| | | EVVDKGASAQSFIERMTNFDKNLPNEKVLPKHSLLYEYFTVYNELTKVKYVTE | | | |
| | | GMRKPAFLSGEQKKAIVDLLFKTNRKVTVKQLKEDYFKKIECFDSVEISGVED | | | |
| | | RFNASLGTYHDLLKIIKDKDFLDNEENEDILEDIVLTLTLFEDREMIEERLKTYA | | | |
| | | HLFDDKVMKQLKRLRYTGWGRLSRKLINGIRDKQSGKTILDFLKSDGFANRN | | | |
| | | FMQLIHDDSLTFKEDIQKAQVSGQGDSLHEHIANLAGSPAIKKGILQTVKVV | | | |
| | | DELVKVMGGHKPENIVIEMARENQTTQKGQKNSRERMKRIEEGIKELGSQI | | | |
| | | LKEHPVENTQLQNEKLYLYYLQNGRDMYVDQELDINRLSDYDVDHIVPQSF | | | |
| | | LKDDSIDNKVLTRSDKNRGKSDNVPSEEVVKKMKNYWRQLLNAKLITQRKF | | | |
| | | DNLTKAERGGLSELDKAGFIKRQLVETRQITKHVAQILDSRMNTKYDENDKLI | | | |
| | | REVKVITLKSKLVSDFRKDFQFYKVREINNYHHAHDAYLNAVVGTALIKKYPK | | | |
| | | LESEFVYGDYKVYDVRKMIAKSEQEIGKATAKYFFYSNIMNFFKTEITLANGEI | | | |
| | | RKRPLIETNGETGEIVWDKGRDFATVRKVLSMPQVNIVKKTEVQTGGFSKES | | | |
| | | ILPKGNSDKLIARKKDWDPKKYGGFNSPTAAYSVLVVAKVEKGKSKKLKSVK | | | |
| | | ELLGITIMERSSFEKNPIGFLEAKGYKEVKKDLIIKLPKYSLFELENGRKRMLAS | | | |
| | | AGVLHKGNELALPSKYVNFLYLASHYEKLKGSPEDNEQKQLFVEQHKHYLDE | | | |
| | | IIEQISEFSKRVILADANLDKVLSAYNKHRDKPIREQAENIIHLFTLTNLGVPAA | | | |
| | | FKYFDTTIDKKRYTSTKEVLDATLIHQSITGLYETRIDLSQLGGD (SEQ ID NO: | | | |
| | | 20344) | | | |
| SpyCas9- | Streptococcus | MDKKYSIGLDIGTNSVGWAVITDEYKVPSKKFKVLGNTDRHSIKKNLIGALLF | N863A | H840A | D10A |
| 3var-NRTH | pyogenes | DSGETAEATRLKRTARRRYTRRKNRICYLQEIFSNEMAKVDDSFFHRLEESFL | | | |
| | | VEEDKKHERHPIFGNIVDEVAYHEKYPTIYHLRKKLVDSTDKADLRLIYLALAH | | | |
| | | MIKFRGHFLIEGDLNPDNSDVDKLFIQLVQTYNQLFEENPINASGVDAKAILS | | | |
| | | ARLSKSRRLENLIAQLPGEKKNGLFGNLIALSLGLTPNFKSNFDLAEDAKLQLS | | | |
| | | KDTYDDDLDNLLAQIGDQYADLFLAAKNLSDAILLSDILRVNTEITKAPLSAS | | | |
| | | MVKRYDEHHQDLTLLKALVRQQLPEKYKEIFFDQSKNGYAGYIDGGASQEE | | | |
| | | FYKFIKPILEKMDGTEELLVKLNREDLLRKQRTFDNGIIPHQIHLGELHAILRRQ | | | |
| | | GDFYPFLKDNREKIEKILTFRIPYYVGPLARGNSRFAWMTRKSEETITPWNFE | | | |
| | | EVVDKGASAQSFIERMTNFDKNLPNEKVLPKHSLLYEYFTVYNELTKVKYVTE | | | |
| | | GMRKPAFLSGEQKKAIVDLLFKTNRKVTVKQLKEDYFKKIECFDSVEISGVED | | | |
| | | RFNASLGTYHDLLKIIKDKDFLDNEENEDILEDIVLTLTLFEDREMIEERLKTYA | | | |
| | | HLFDDKVMKQLKRLRYTGWGRLSRKLINGIRDKQSGKTILDFLKSDGFANRN | | | |
| | | FMQLIHDDSLTFKEDIQKAQVSGQGDSLHEHIANLAGSPAIKKGILQTVKVV | | | |
| | | DELVKVMGGHKPENIVIEMARENQTTQKGQKNSRERMKRIEEGIKELGSQI | | | |
| | | LKEHPVENTQLQNEKLYLYYLQNGRDMYVDQELDINRLSDYDVDHIVPQSF | | | |
| | | LKDDSIDNKVLTRSDKNRGKSDNVPSEEVVKKMKNYWRQLLNAKLITQRKF | | | |
| | | DNLTKAERGGLSELDKAGFIKRQLVETRQITKHVAQILDSRMNTKYDENDKLI | | | |
| | | REVKVITLKSKLVSDFRKDFQFYKVREINNYHHAHDAYLNAVVGTALIKKYPK | | | |
| | | LESEFVYGDYKVYDVRKMIAKSEQEIGKATAKYFFYSNIMNFFKTEITLANGEI | | | |
| | | RKRPLIETNGETGEIVWDKGRDFATVRKVLSMPQVNIVKKTEVQTGGFSKES | | | |
| | | ILPKGNSDKLIARKKDWDPKKYGGFNSPTVAYSVLVVAKVEKGKSKKLKSVK | | | |
| | | ELLGITIMERSSFEKNPIGFLEAKGYKEVKKDLIIKLPKYSLFELENGRKRMLAS | | | |
| | | ASVLHKGNELALPSKYVNFLYLASHYEKLKGSSEDNKQKQLFVEQHKHYLDEI | | | |
| | | IEQISEFSKRVILADANLDKVLSAYNKHRDKPIREQAENIIHLFTLTNLGASAAF | | | |
| | | KYFDTTIGRKLYTSTKEVLDATLIHQSITGLYETRIDLSQLGGD (SEQ ID NO: | | | |
| | | 20345) | | | |
| SpyCas9- | Streptococcus | MDKKYSIGLDIGTNSVGWAVITDEYKVPSKKFKVLGNTDRHSIKKNLIGALLF | N863A | H840A | D10A |
| 3var-NRCH | pyogenes | DSGETAEATRLKRTARRRYTRRKNRICYLQEIFSNEMAKVDDSFFHRLEESFL | | | |
| | | VEEDKKHERHPIFGNIVDEVAYHEKYPTIYHLRKKLVDSTDKADLRLIYLALAH | | | |
| | | MIKFRGHFLIEGDLNPDNSDVDKLFIQLVQTYNQLFEENPINASGVDAKAILS | | | |
| | | ARLSKSRRLENLIAQLPGEKKNGLFGNLIALSLGLTPNFKSNFDLAEDAKLQLS | | | |
| | | KDTYDDDLDNLLAQIGDQYADLFLAAKNLSDAILLSDILRVNTEITKAPLSAS | | | |
| | | MVKRYDEHHQDLTLLKALVRQQLPEKYKEIFFDQSKNGYAGYIDGGASQEE | | | |
| | | FYKFIKPILEKMDGTEELLVKLNREDLLRKQRTFDNGIIPHQIHLGELHAILRRQ | | | |
| | | GDFYPFLKDNREKIEKILTFRIPYYVGPLARGNSRFAWMTRKSEETITPWNFE | | | |
| | | EVVDKGASAQSFIERMTNFDKNLPNEKVLPKHSLLYEYFTVYNELTKVKYVTE | | | |
| | | GMRKPAFLSGEQKKAIVDLLFKTNRKVTVKQLKEDYFKKIECFDSVEISGVED | | | |
| | | RFNASLGTYHDLLKIIKDKDFLDNEENEDILEDIVLTLTLFEDREMIEERLKTYA | | | |
| | | HLFDDKVMKQLKRLRYTGWGRLSRKLINGIRDKQSGKTILDFLKSDGFANRN | | | |
| | | FMQLIHDDSLTFKEDIQKAQVSGQGDSLHEHIANLAGSPAIKKGILQTVKVV | | | |
| | | DELVKVMGGHKPENIVIEMARENQTTQKGQKNSRERMKRIEEGIKELGSQI | | | |
| | | LKEHPVENTQLQNEKLYLYYLQNGRDMYVDQELDINRLSDYDVDHIVPQSF | | | |
| | | LKDDSIDNKVLTRSDKNRGKSDNVPSEEVVKKMKNYWRQLLNAKLITQRKF | | | |
| | | DNLTKAERGGLSELDKAGFIKRQLVETRQITKHVAQILDSRMNTKYDENDKLI | | | |
| | | REVKVITLKSKLVSDFRKDFQFYKVREINNYHHAHDAYLNAVVGTALIKKYPK | | | |
| | | LESEFVYGDYKVYDVRKMIAKSEQEIGKATAKYFFYSNIMNFFKTEITLANGEI | | | |
| | | RKRPLIETNGETGEIVWDKGRDFATVRKVLSMPQVNIVKKTEVQTGGFSKES | | | |
| | | ILPKGNSDKLIARKKDWDPKKYGGFNSPTVAYSVLVVAKVEKGKSKKLKSVK | | | |
| | | ELLGITIMERSSFEKNPIDFLEAKGYKEVKKDLIIKLPKYSLFELENGRKRMLAS | | | |
| | | AGVLQKGNELALPSKYVNFLYLASHYEKLKGSPEDNEQKQLFVEQHKHYLDE | | | |
| | | IIEQISEFSKRVILADANLDKVLSAYNKHRDKPIREQAENIIHLFTLTNLGAPAA | | | |
| | | FKYFDTTINRKQYNTTKEVLDATLIRQSITGLYETRIDLSQLGGD (SEQ ID NO: | | | |
| | | 20346) | | | |
| SpyCas9- | Streptococcus | MDKKYSIGLDIGTNSVGWAVITDEYKVPSKKFKVLGNTDRHSIKKNLIGALLF | N863A | H840A | D10A |
| HF1 | pyogenes | DSGETAEATRLKRTARRRYTRRKNRICYLQEIFSNEMAKVDDSFFHRLEESFL | | | |
| | | VEEDKKHERHPIFGNIVDEVAYHEKYPTIYHLRKKLVDSTDKADLRLIYLALAH | | | |
| | | MIKFRGHFLIEGDLNPDNSDVDKLFIQLVQTYNQLFEENPINASGVDAKAILS | | | |
| | | ARLSKSRRLENLIAQLPGEKKNGLFGNLIALSLGLTPNFKSNFDLAEDAKLQLS | | | |
| | | KDTYDDDLDNLLAQIGDQYADLFLAAKNLSDAILLSDILRVNTEITKAPLSAS | | | |
| | | MIKRYDEHHQDLTLLKALVRQQLPEKYKEIFFDQSKNGYAGYIDGGASQEEF | | | |
| | | YKFIKPILEKMDGTEELLVKLNREDLLRKQRTFDNGSIPHQIHLGELHAILRRQ | | | |
| | | EDFYPFLKDNREKIEKILTFRIPYYVGPLARGNSRFAWMTRKSEETITPWNFE | | | |
| | | EVVDKGASAQSFIERMTNFDKNLPNEKVLPKHSLLYEYFTVYNELTKVKYVTE | | | |
| | | GMRKPAFLSGEQKKAIVDLLFKTNRKVTVKQLKEDYFKKIECFDSVEISGVED | | | |
| | | RFNASLGTYHDLLKIIKDKDFLDNEENEDILEDIVLTLTLFEDREMIEERLKTYA | | | |
| | | HLFDDKVMKQLKRRRYTGWGRLSRKLINGIRDKQSGKTILDFLKSDGFANR | | | |
| | | NFMQLIHDDSLTFKEDIQKAQVSGQGDSLHEHIANLAGSPAIKKGILQTVKV | | | |
| | | VDELVKVMGRHKPENIVIEMARENQTTQKGQKNSRERMKRIEEGIKELGSQ | | | |
| | | ILKEHPVENTQLQNEKLYLYYLQNGRDMYVDQELDINRLSDYDVDHIVPQSF | | | |
| | | LKDDSIDNKVLTRSDKNRGKSDNVPSEEVVKKMKNYWRQLLNAKLITQRKF | | | |
| | | DNLTKAERGGLSELDKAGFIKRQLVETRQITKHVAQILDSRMNTKYDENDKLI | | | |
| | | REVKVITLKSKLVSDFRKDFQFYKVREINNYHHAHDAYLNAVVGTALIKKYPK | | | |
| | | LESEFVYGDYKVYDVRKMIAKSEQEIGKATAKYFFYSNIMNFFKTEITLANGEI | | | |
| | | RKRPLIETNGETGEIVWDKGRDFATVRKVLSMPQVNIVKKTEVQTGGFSKES | | | |
| | | ILPKRNSDKLIARKKDWDPKKYGGFDSPTVAYSVLVVAKVEKGKSKKLKSVKE | | | |
| | | LLGITIMERSSFEKNPIDFLEAKGYKEVKKDLIIKLPKYSLFELENGRKRMLASA | | | |
| | | GELQKGNELALPSKYVNFLYLASHYEKLKGSPEDNEQKQLFVEQHKHYLDEII | | | |
| | | EQISEFSKRVILADANLDKVLSAYNKHRDKPIREQAENIIHLFTLTNLGAPAAF | | | |
| | | KYFDTTIDRKRYTSTKEVLDATLIHQSITGLYETRIDLSQLGGD (SEQ ID NO: | | | |
| | | 20328) | | | |
| SpyCas9- | Streptococcus | MDKKYSIGLDIGTNSVGWAVITDEYKVPSKKFKVLGNTDRHSIKKNLIGALLF | N863A | H840A | D10A |
| QQR1 | pyogenes | DSGETAEATRLKRTARRRYTRRKNRICYLQEIFSNEMAKVDDSFFHRLEESFL | | | |
| | | VEEDKKHERHPIFGNIVDEVAYHEKYPTIYHLRKKLVDSTDKADLRLIYLALAH | | | |
| | | MIKFRGHFLIEGDLNPDNSDVDKLFIQLVQTYNQLFEENPINASGVDAKAILS | | | |
| | | ARLSKSRRLENLIAQLPGEKKNGLFGNLIALSLGLTPNFKSNFDLAEDAKLQLS | | | |
| | | KDTYDDDLDNLLAQIGDQYADLFLAAKNLSDAILLSDILRVNTEITKAPLSAS | | | |
| | | MIKRYDEHHQDLTLLKALVRQQLPEKYKEIFFDQSKNGYAGYIDGGASQEEF | | | |
| | | YKFIKPILEKMDGTEELLVKLNREDLLRKQRTFDNGSIPHQIHLGELHAILRRQ | | | |
| | | EDFYPFLKDNREKIEKILTFRIPYYVGPLARGNSRFAWMTRKSEETITPWNFE | | | |
| | | EVVDKGASAQSFIERMTNFDKNLPNEKVLPKHSLLYEYFTVYNELTKVKYVTE | | | |
| | | GMRKPAFLSGEQKKAIVDLLFKTNRKVTVKQLKEDYFKKIECFDSVEISGVED | | | |
| | | RFNASLGTYHDLLKIIKDKDFLDNEENEDILEDIVLTLTLFEDREMIEERLKTYA | | | |
| | | HLFDDKVMKQLKRRRYTGWGRLSRKLINGIRDKQSGKTILDFLKSDGFANR | | | |
| | | NFMQLIHDDSLTFKEDIQKAQVSGQGDSLHEHIANLAGSPAIKKGILQTVKV | | | |
| | | VDELVKVMGRHKPENIVIEMARENQTTQKGQKNSRERMKRIEEGIKELGSQ | | | |
| | | ILKEHPVENTQLQNEKLYLYYLQNGRDMYVDQELDINRLSDYDVDHIVPQSF | | | |
| | | LKDDSIDNKVLTRSDKNRGKSDNVPSEEVVKKMKNYWRQLLNAKLITQRKF | | | |
| | | DNLTKAERGGLSELDKAGFIKRQLVETRQITKHVAQILDSRMNTKYDENDKLI | | | |
| | | REVKVITLKSKLVSDFRKDFQFYKVREINNYHHAHDAYLNAVVGTALIKKYPK | | | |
| | | LESEFVYGDYKVYDVRKMIAKSEQEIGKATAKYFFYSNIMNFFKTEITLANGEI | | | |
| | | RKRPLIETNGETGEIVWDKGRDFATVRKVLSMPQVNIVKKTEVQTGGFSKES | | | |
| | | ILPKRNSDKLIARKKDWDPKKYGGFDSPTVAYSVLVVAKVEKGKSKKLKSVKE | | | |
| | | LLGITIMERSSFEKNPIDFLEAKGYKEVKKDLIIKLPKYSLFELENGRKRMLASA | | | |
| | | RELQKGNELALPSKYVNFLYLASHYEKLKGSPEDNEQKQLFVEQHKHYLDEII | | | |
| | | EQISEFSKRVILADAQLDKVLSAYNKHRDKPIREQAENIIHLFTLTNLGAPAAF | | | |
| | | KYFDTTFKQKQYRSTKEVLDATLIHQSITGLYETRIDLSQLGGD (SEQ ID NO: | | | |
| | | 20347) | | | |
| SpyCas9- | Streptococcus | MDKKYSIGLDIGTNSVGWAVITDEYKVPSKKFKVLGNTDRHSIKKNLIGALLF | N863A | H840A | D10A |
| SpG | pyogenes | DSGETAEATRLKRTARRRYTRRKNRICYLQEIFSNEMAKVDDSFFHRLEESFL | | | |
| | | VEEDKKHERHPIFGNIVDEVAYHEKYPTIYHLRKKLVDSTDKADLRLIYLALAH | | | |
| | | MIKFRGHFLIEGDLNPDNSDVDKLFIQLVQTYNQLFEENPINASGVDAKAILS | | | |
| | | ARLSKSRRLENLIAQLPGEKKNGLFGNLIALSLGLTPNFKSNFDLAEDAKLQLS | | | |
| | | KDTYDDDLDNLLAQIGDQYADLFLAAKNLSDAILLSDILRVNTEITKAPLSAS | | | |
| | | MIKRYDEHHQDLTLLKALVRQQLPEKYKEIFFDQSKNGYAGYIDGGASQEEF | | | |
| | | YKFIKPILEKMDGTEELLVKLNREDLLRKQRTFDNGSIPHQIHLGELHAILRRQ | | | |
| | | EDFYPFLKDNREKIEKILTFRIPYYVGPLARGNSRFAWMTRKSEETITPWNFE | | | |
| | | EVVDKGASAQSFIERMTNFDKNLPNEKVLPKHSLLYEYFTVYNELTKVKYVTE | | | |
| | | GMRKPAFLSGEQKKAIVDLLFKTNRKVTVKQLKEDYFKKIECFDSVEISGVED | | | |
| | | RFNASLGTYHDLLKIIKDKDFLDNEENEDILEDIVLTLTLFEDREMIEERLKTYA | | | |
| | | HLFDDKVMKQLKRRRYTGWGRLSRKLINGIRDKQSGKTILDFLKSDGFANR | | | |
| | | NFMQLIHDDSLTFKEDIQKAQVSGQGDSLHEHIANLAGSPAIKKGILQTVKV | | | |
| | | VDELVKVMGRHKPENIVIEMARENQTTQKGQKNSRERMKRIEEGIKELGSQ | | | |
| | | ILKEHPVENTQLQNEKLYLYYLQNGRDMYVDQELDINRLSDYDVDHIVPQSF | | | |
| | | LKDDSIDNKVLTRSDKNRGKSDNVPSEEVVKKMKNYWRQLLNAKLITQRKF | | | |
| | | DNLTKAERGGLSELDKAGFIKRQLVETRQITKHVAQILDSRMNTKYDENDKLI | | | |
| | | REVKVITLKSKLVSDFRKDFQFYKVREINNYHHAHDAYLNAVVGTALIKKYPK | | | |
| | | LESEFVYGDYKVYDVRKMIAKSEQEIGKATAKYFFYSNIMNFFKTEITLANGEI | | | |
| | | RKRPLIETNGETGEIVWDKGRDFATVRKVLSMPQVNIVKKTEVQTGGFSKES | | | |
| | | ILPKRNSDKLIARKKDWDPKKYGGFLWPTVAYSVLVVAKVEKGKSKKLKSVK | | | |
| | | ELLGITIMERSSFEKNPIDFLEAKGYKEVKKDLIIKLPKYSLFELENGRKRMLAS | | | |
| | | AKQLQKGNELALPSKYVNFLYLASHYEKLKGSPEDNEQKQLFVEQHKHYLDE | | | |
| | | IIEQISEFSKRVILADANLDKVLSAYNKHRDKPIREQAENIIHLFTLTNLGAPAA | | | |
| | | FKYFDTTIDRKQYRSTKEVLDATLIHQSITGLYETRIDLSQLGGD (SEQ ID NO: | | | |
| | | 20348) | | | |
| SpyCas9- | Streptococcus | MDKKYSIGLDIGTNSVGWAVITDEYKVPSKKFKVLGNTDRHSIKKNLIGALLF | N863A | H840A | D10A |
| VQR | pyogenes | DSGETAEATRLKRTARRRYTRRKNRICYLQEIFSNEMAKVDDSFFHRLEESFL | | | |
| | | VEEDKKHERHPIFGNIVDEVAYHEKYPTIYHLRKKLVDSTDKADLRLIYLALAH | | | |
| | | MIKFRGHFLIEGDLNPDNSDVDKLFIQLVQTYNQLFEENPINASGVDAKAILS | | | |
| | | ARLSKSRRLENLIAQLPGEKKNGLFGNLIALSLGLTPNFKSNFDLAEDAKLQLS | | | |
| | | KDTYDDDLDNLLAQIGDQYADLFLAAKNLSDAILLSDILRVNTEITKAPLSAS | | | |
| | | MIKRYDEHHQDLTLLKALVRQQLPEKYKEIFFDQSKNGYAGYIDGGASQEEF | | | |
| | | YKFIKPILEKMDGTEELLVKLNREDLLRKQRTFDNGSIPHQIHLGELHAILRRQ | | | |
| | | EDFYPFLKDNREKIEKILTFRIPYYVGPLARGNSRFAWMTRKSEETITPWNFE | | | |
| | | EVVDKGASAQSFIERMTNFDKNLPNEKVLPKHSLLYEYFTVYNELTKVKYVTE | | | |
| | | GMRKPAFLSGEQKKAIVDLLFKTNRKVTVKQLKEDYFKKIECFDSVEISGVED | | | |
| | | RFNASLGTYHDLLKIIKDKDFLDNEENEDILEDIVLTLTLFEDREMIEERLKTYA | | | |
| | | HLFDDKVMKQLKRRRYTGWGRLSRKLINGIRDKQSGKTILDFLKSDGFANR | | | |
| | | NFMQLIHDDSLTFKEDIQKAQVSGQGDSLHEHIANLAGSPAIKKGILQTVKV | | | |
| | | VDELVKVMGRHKPENIVIEMARENQTTQKGQKNSRERMKRIEEGIKELGSQ | | | |
| | | ILKEHPVENTQLQNEKLYLYYLQNGRDMYVDQELDINRLSDYDVDHIVPQSF | | | |
| | | LKDDSIDNKVLTRSDKNRGKSDNVPSEEVVKKMKNYWRQLLNAKLITQRKF | | | |
| | | DNLTKAERGGLSELDKAGFIKRQLVETRQITKHVAQILDSRMNTKYDENDKLI | | | |
| | | REVKVITLKSKLVSDFRKDFQFYKVREINNYHHAHDAYLNAVVGTALIKKYPK | | | |
| | | LESEFVYGDYKVYDVRKMIAKSEQEIGKATAKYFFYSNIMNFFKTEITLANGEI | | | |
| | | RKRPLIETNGETGEIVWDKGRDFATVRKVLSMPQVNIVKKTEVQTGGFSKES | | | |
| | | ILPKRNSDKLIARKKDWDPKKYGGFVSPTVAYSVLVVAKVEKGKSKKLKSVKE | | | |
| | | LLGITIMERSSFEKNPIDFLEAKGYKEVKKDLIIKLPKYSLFELENGRKRMLASA | | | |
| | | GELQKGNELALPSKYVNFLYLASHYEKLKGSPEDNEQKQLFVEQHKHYLDEII | | | |
| | | EQISEFSKRVILADANLDKVLSAYNKHRDKPIREQAENIIHLFTLTNLGAPAAF | | | |
| | | KYFDTTIDRKQYRSTKEVLDATLIHQSITGLYETRIDLSQLGGD (SEQ ID NO: | | | |
| | | 20349) | | | |
| SpyCas9- | Streptococcus | MDKKYSIGLDIGTNSVGWAVITDEYKVPSKKFKVLGNTDRHSIKKNLIGALLF | N863A | H840A | D10A |
| VRER | pyogenes | DSGETAEATRLKRTARRRYTRRKNRICYLQEIFSNEMAKVDDSFFHRLEESFL | | | |
| | | VEEDKKHERHPIFGNIVDEVAYHEKYPTIYHLRKKLVDSTDKADLRLIYLALAH | | | |
| | | MIKFRGHFLIEGDLNPDNSDVDKLFIQLVQTYNQLFEENPINASGVDAKAILS | | | |
| | | ARLSKSRRLENLIAQLPGEKKNGLFGNLIALSLGLTPNFKSNFDLAEDAKLQLS | | | |
| | | KDTYDDDLDNLLAQIGDQYADLFLAAKNLSDAILLSDILRVNTEITKAPLSAS | | | |
| | | MIKRYDEHHQDLTLLKALVRQQLPEKYKEIFFDQSKNGYAGYIDGGASQEEF | | | |
| | | YKFIKPILEKMDGTEELLVKLNREDLLRKQRTFDNGSIPHQIHLGELHAILRRQ | | | |
| | | EDFYPFLKDNREKIEKILTFRIPYYVGPLARGNSRFAWMTRKSEETITPWNFE | | | |
| | | EVVDKGASAQSFIERMTNFDKNLPNEKVLPKHSLLYEYFTVYNELTKVKYVTE | | | |
| | | GMRKPAFLSGEQKKAIVDLLFKTNRKVTVKQLKEDYFKKIECFDSVEISGVED | | | |
| | | RFNASLGTYHDLLKIIKDKDFLDNEENEDILEDIVLTLTLFEDREMIEERLKTYA | | | |
| | | HLFDDKVMKQLKRRRYTGWGRLSRKLINGIRDKQSGKTILDFLKSDGFANR | | | |
| | | NFMQLIHDDSLTFKEDIQKAQVSGQGDSLHEHIANLAGSPAIKKGILQTVKV | | | |
| | | VDELVKVMGRHKPENIVIEMARENQTTQKGQKNSRERMKRIEEGIKELGSQ | | | |
| | | ILKEHPVENTQLQNEKLYLYYLQNGRDMYVDQELDINRLSDYDVDHIVPQSF | | | |
| | | LKDDSIDNKVLTRSDKNRGKSDNVPSEEVVKKMKNYWRQLLNAKLITQRKF | | | |
| | | DNLTKAERGGLSELDKAGFIKRQLVETRQITKHVAQILDSRMNTKYDENDKLI | | | |
| | | REVKVITLKSKLVSDFRKDFQFYKVREINNYHHAHDAYLNAVVGTALIKKYPK | | | |
| | | LESEFVYGDYKVYDVRKMIAKSEQEIGKATAKYFFYSNIMNFFKTEITLANGEI | | | |
| | | RKRPLIETNGETGEIVWDKGRDFATVRKVLSMPQVNIVKKTEVQTGGFSKES | | | |
| | | ILPKRNSDKLIARKKDWDPKKYGGFVSPTVAYSVLVVAKVEKGKSKKLKSVKE | | | |
| | | LLGITIMERSSFEKNPIDFLEAKGYKEVKKDLIIKLPKYSLFELENGRKRMLASA | | | |
| | | RELQKGNELALPSKYVNFLYLASHYEKLKGSPEDNEQKQLFVEQHKHYLDEII | | | |
| | | EQISEFSKRVILADANLDKVLSAYNKHRDKPIREQAENIIHLFTLTNLGAPAAF | | | |
| | | KYFDTTIDRKEYRSTKEVLDATLIHQSITGLYETRIDLSQLGGD (SEQ ID NO: | | | |
| | | 20350) | | | |
| SpyCas9- | Streptococcus | MDKKYSIGLDIGTNSVGWAVITDEYKVPSKKFKVLGNTDRHSIKKNLIGALLF | N863A | H840A | D10A |
| xCas | pyogenes | DSGETAEATRLKRTARRRYTRRKNRICYLQEIFSNEMAKVDDSFFHRLEESFL | | | |
| | | VEEDKKHERHPIFGNIVDEVAYHEKYPTIYHLRKKLVDSTDKADLRLIYLALAH | | | |
| | | MIKFRGHFLIEGDLNPDNSDVDKLFIQLVQTYNQLFEENPINASGVDAKAILS | | | |
| | | ARLSKSRRLENLIAQLPGEKKNGLFGNLIALSLGLTPNFKSNFDLAEDTKLQLS | | | |
| | | KDTYDDDLDNLLAQIGDQYADLFLAAKNLSDAILLSDILRVNTEITKAPLSAS | | | |
| | | MIKLYDEHHQDLTLLKALVRQQLPEKYKEIFFDQSKNGYAGYIDGGASQEEF | | | |
| | | YKFIKPILEKMDGTEELLVKLNREDLLRKQRTFDNGIIPHQIHLGELHAILRRQE | | | |
| | | DFYPFLKDNREKIEKILTFRIPYYVGPLARGNSRFAWMTRKSEETITPWNFEK | | | |
| | | VVDKGASAQSFIERMTNFDKNLPNEKVLPKHSLLYEYFTVYNELTKVKYVTE | | | |
| | | GMRKPAFLSGDQKKAIVDLLFKTNRKVTVKQLKEDYFKKIECFDSVEISGVED | | | |
| | | RFNASLGTYHDLLKIIKDKDFLDNEENEDILEDIVLTLTLFEDREMIEERLKTYA | | | |
| | | HLFDDKVMKQLKRRRYTGWGRLSRKLINGIRDKQSGKTILDFLKSDGFANR | | | |
| | | NFIQLIHDDSLTFKEDIQKAQVSGQGDSLHEHIANLAGSPAIKKGILQTVKVV | | | |
| | | DELVKVMGRHKPENIVIEMARENQTTQKGQKNSRERMKRIEEGIKELGSQI | | | |
| | | LKEHPVENTQLQNEKLYLYYLQNGRDMYVDQELDINRLSDYDVDHIVPQSF | | | |
| | | LKDDSIDNKVLTRSDKNRGKSDNVPSEEVVKKMKNYWRQLLNAKLITQRKF | | | |
| | | DNLTKAERGGLSELDKAGFIKRQLVETRQITKHVAQILDSRMNTKYDENDKLI | | | |
| | | REVKVITLKSKLVSDFRKDFQFYKVREINNYHHAHDAYLNAVVGTALIKKYPK | | | |
| | | LESEFVYGDYKVYDVRKMIAKSEQEIGKATAKYFFYSNIMNFFKTEITLANGEI | | | |
| | | RKRPLIETNGETGEIVWDKGRDFATVRKVLSMPQVNIVKKTEVQTGGFSKES | | | |
| | | ILPKRNSDKLIARKKDWDPKKYGGFDSPTVAYSVLVVAKVEKGKSKKLKSVKE | | | |
| | | LLGITIMERSSFEKNPIDFLEAKGYKEVKKDLIIKLPKYSLFELENGRKRMLASA | | | |
| | | GVLQKGNELALPSKYVNFLYLASHYEKLKGSPEDNEQKQLFVEQHKHYLDEII | | | |
| | | EQISEFSKRVILADANLDKVLSAYNKHRDKPIREQAENIIHLFTLTNLGAPAAF | | | |
| | | KYFDTTIDRKRYTSTKEVLDATLIHQSITGLYETRIDLSQLGGD (SEQ ID NO: | | | |
| | | 20351) | | | |
| SpyCas9- | Streptococcus | MDKKYSIGLDIGTNSVGWAVITDEYKVPSKKFKVLGNTDRHSIKKNLIGALLF | N863A | H840A | D10A |
| xCas-NG | pyogenes | DSGETAEATRLKRTARRRYTRRKNRICYLQEIFSNEMAKVDDSFFHRLEESFL | | | |
| | | VEEDKKHERHPIFGNIVDEVAYHEKYPTIYHLRKKLVDSTDKADLRLIYLALAH | | | |
| | | MIKFRGHFLIEGDLNPDNSDVDKLFIQLVQTYNQLFEENPINASGVDAKAILS | | | |
| | | ARLSKSRRLENLIAQLPGEKKNGLFGNLIALSLGLTPNFKSNFDLAEDTKLQLS | | | |
| | | KDTYDDDLDNLLAQIGDQYADLFLAAKNLSDAILLSDILRVNTEITKAPLSAS | | | |
| | | MIKLYDEHHQDLTLLKALVRQQLPEKYKEIFFDQSKNGYAGYIDGGASQEEF | | | |
| | | YKFIKPILEKMDGTEELLVKLNREDLLRKQRTFDNGIIPHQIHLGELHAILRRQE | | | |
| | | DFYPFLKDNREKIEKILTFRIPYYVGPLARGNSRFAWMTRKSEETITPWNFEK | | | |
| | | VVDKGASAQSFIERMTNFDKNLPNEKVLPKHSLLYEYFTVYNELTKVKYVTE | | | |
| | | GMRKPAFLSGDQKKAIVDLLFKTNRKVTVKQLKEDYFKKIECFDSVEISGVED | | | |
| | | RFNASLGTYHDLLKIIKDKDFLDNEENEDILEDIVLTLTLFEDREMIEERLKTYA | | | |
| | | HLFDDKVMKQLKRRRYTGWGRLSRKLINGIRDKQSGKTILDFLKSDGFANR | | | |
| | | NFIQLIHDDSLTFKEDIQKAQVSGQGDSLHEHIANLAGSPAIKKGILQTVKVV | | | |
| | | DELVKVMGRHKPENIVIEMARENQTTQKGQKNSRERMKRIEEGIKELGSQI | | | |
| | | LKEHPVENTQLQNEKLYLYYLQNGRDMYVDQELDINRLSDYDVDHIVPQSF | | | |
| | | LKDDSIDNKVLTRSDKNRGKSDNVPSEEVVKKMKNYWRQLLNAKLITQRKF | | | |
| | | DNLTKAERGGLSELDKAGFIKRQLVETRQITKHVAQILDSRMNTKYDENDKLI | | | |
| | | REVKVITLKSKLVSDFRKDFQFYKVREINNYHHAHDAYLNAVVGTALIKKYPK | | | |
| | | LESEFVYGDYKVYDVRKMIAKSEQEIGKATAKYFFYSNIMNFFKTEITLANGEI | | | |
| | | RKRPLIETNGETGEIVWDKGRDFATVRKVLSMPQVNIVKKTEVQTGGFSKES | | | |
| | | IRPKRNSDKLIARKKDWDPKKYGGFVSPTVAYSVLVVAKVEKGKSKKLKSVKE | | | |
| | | LLGITIMERSSFEKNPIDFLEAKGYKEVKKDLIIKLPKYSLFELENGRKRMLASA | | | |
| | | RFLQKGNELALPSKYVNFLYLASHYEKLKGSPEDNEQKQLFVEQHKHYLDEII | | | |
| | | EQISEFSKRVILADANLDKVLSAYNKHRDKPIREQAENIIHLFTLTNLGAPRAF | | | |
| | | KYFDTTIDRKVYRSTKEVLDATLIHQSITGLYETRIDLSQLGGD (SEQ ID NO: | | | |
| | | 20352) | | | |
| St1Cas9- | Streptococcus | MSDLVLGLDIGIGSVGVGILNKVTGEIIHKNSRIFPAAQAENNLVRRTNRQG | N622A | H599A | D9A |
| CNRZ1066 | thermophilus | RRLARRKKHRRVRLNRLFEESGLITDFTKISINLNPYQLRVKGLTDELSNEELFI | | | |
| | | ALKNMVKHRGISYLDDASDDGNSSVGDYAQIVKENSKQLETKTPGQIQLER | | | |
| | | YQTYGQLRGDFTVEKDGKKHRLINVFPTSAYRSEALRILQTQQEFNPQITDEF | | | |
| | | INRYLEILTGKRKYYHGPGNEKSRTDYGRYRTSGETLDNIFGILIGKCTFYPDEF | | | |
| | | RAAKASYTAQEFNLLNDLNNLTVPTETKKLSKEQKNQIINYVKNEKAMGPAK | | | |
| | | LFKYIAKLLSCDVADIKGYRIDKSGKAEIHTFEAYRKMKTLETLDIEQMDRETL | | | |
| | | DKLAYVLTLNTEREGIQEALEHEFADGSFSQKQVDELVQFRKANSSIFGKGW | | | |
| | | HNFSVKLMMELIPELYETSEEQMTILTRLGKQKTTSSSNKTKYIDEKLLTEEIY | | | |
| | | NPVVAKSVRQAIKIVNAAIKEYGDFDNIVIEMARETNEDDEKKAIQKIQKAN | | | |
| | | KDEKDAAMLKAANQYNGKAELPHSVFHGHKQLATKIRLWHQQGERCLYT | | | |
| | | GKTISIHDLINNSNQFEVDHILPLSITFDDSLANKVLVYATANQEKGQRTPYQ | | | |
| | | ALDSMDDAWSFRELKAFVRESKTLSNKKKEYLLTEEDISKFDVRKKFIERNLV | | | |
| | | DTRYASRVVLNALQEHFRAHKIDTKVSVVRGQFTSQLRRHWGIEKTRDTYH | | | |
| | | HHAVDALIIAASSQLNLWKKQKNTLVSYSEEQLLDIETGELISDDEYKESVFKA | | | |
| | | PYQHFVDTLKSKEFEDSILFSYQVDSKFNRKISDATIYATRQAKVGKDKKDET | | | |
| | | YVLGKIKDIYTQDGYDAFMKIYKKDKSKFLMYRHDPQTFEKVIEPILENYPNK | | | |
| | | QMNEKGKEVPCNPFLKYKEEHGYIRKYSKKGNGPEIKSLKYYDSKLLGNPIDI | | | |
| | | TPENSKNKVVLQSLKPWRTDVYFNKATGKYEILGLKYADLQFEKGTGTYKIS | | | |
| | | QEKYNDIKKKEGVDSDSEFKFTLYKNDLLLVKDTETKEQQLFRFLSRTLPKQK | | | |
| | | HYVELKPYDKQKFEGGEALIKVLGNVANGGQCIKGLAKSNISIYKVRTDVLG | | | |
| | | NQHIIKNEGDKPKLDF (SEQ ID NO: 20353) | | | |
| St1Cas9- | Streptococcus | MSDLVLGLDIGIGSVGVGILNKVTGEIIHKNSRIFPAAQAENNLVRRTNRQG | N622A | H599A | D9A |
| LMG1831 | thermophilus | RRLARRKKHRRVRLNRLFEESGLITDFTKISINLNPYQLRVKGLTDELSNEELFI | | | |
| | | ALKNMVKHRGISYLDDASDDGNSSVGDYAQIVKENSKQLETKTPGQIQLER | | | |
| | | YQTYGQLRGDFTVEKDGKKHRLINVFPTSAYRSEALRILQTQQEFNPQITDEF | | | |
| | | INRYLEILTGKRKYYHGPGNEKSRTDYGRYRTSGETLDNIFGILIGKCTFYPDEF | | | |
| | | RAAKASYTAQEFNLLNDLNNLTVPTETKKLSKEQKNQIINYVKNEKAMGPAK | | | |
| | | LFKYIAKLLSCDVADIKGYRIDKSGKAEIHTFEAYRKMKTLETLDIEQMDRETL | | | |
| | | DKLAYVLTLNTEREGIQEALEHEFADGSFSQKQVDELVQFRKANSSIFGKGW | | | |
| | | HNFSVKLMMELIPELYETSEEQMTILTRLGKQKTTSSSNKTKYIDEKLLTEEIY | | | |
| | | NPVVAKSVRQAIKIVNAAIKEYGDFDNIVIEMARETNEDDEKKAIQKIQKAN | | | |
| | | KDEKDAAMLKAANQYNGKAELPHSVFHGHKQLATKIRLWHQQGERCLYT | | | |
| | | GKTISIHDLINNSNQFEVDHILPLSITFDDSLANKVLVYATANQEKGQRTPYQ | | | |
| | | ALDSMDDAWSFRELKAFVRESKTLSNKKKEYLLTEEDISKFDVRKKFIERNLV | | | |
| | | DTRYASRVVLNALQEHFRAHKIDTKVSVVRGQFTSQLRRHWGIEKTRDTYH | | | |
| | | HHAVDALIIAASSQLNLWKKQKNTLVSYSEEQLLDIETGELISDDEYKESVFKA | | | |
| | | PYQHFVDTLKSKEFEDSILFSYQVDSKFNRKISDATIYATRQAKVGKDKKDET | | | |
| | | YVLGKIKDIYTQDGYDAFMKIYKKDKSKFLMYRHDPQTFEKVIEPILENYPNK | | | |
| | | QMNEKGKEVPCNPFLKYKEEHGYIRKYSKKGNGPEIKSLKYYDSKLLGNPIDI | | | |
| | | TPENSKNKVVLQSLKPWRTDVYFNKNTGKYEILGLKYADLQFEKKTGTYKISQ | | | |
| | | EKYNGIMKEEGVDSDSEFKFTLYKNDLLLVKDTETKEQQLFRFLSRTMPNVK | | | |
| | | YYVELKPYSKDKFEKNESLIEILGSADKSGRCIKGLGKSNISIYKVRTDVLGNQH | | | |
| | | IIKNEGDKPKLDF (SEQ ID NO: 20354) | | | |
| St1Cas9- | Streptococcus | MSDLVLGLDIGIGSVGVGILNKVTGEIIHKNSRIFPAAQAENNLVRRTNRQG | N622A | H599A | D9A |
| MTH17CL396 | thermophilus | RRLARRKKHRRVRLNRLFEESGLITDFTKISINLNPYQLRVKGLTDELSNEELFI | | | |
| | | ALKNMVKHRGISYLDDASDDGNSSVGDYAQIVKENSKQLETKTPGQIQLER | | | |
| | | YQTYGQLRGDFTVEKDGKKHRLINVFPTSAYRSEALRILQTQQEFNPQITDEF | | | |
| | | INRYLEILTGKRKYYHGPGNEKSRTDYGRYRTSGETLDNIFGILIGKCTFYPDEF | | | |
| | | RAAKASYTAQEFNLLNDLNNLTVPTETKKLSKEQKNQIINYVKNEKAMGPAK | | | |
| | | LFKYIAKLLSCDVADIKGYRIDKSGKAEIHTFEAYRKMKTLETLDIEQMDRETL | | | |
| | | DKLAYVLTLNTEREGIQEALEHEFADGSFSQKQVDELVQFRKANSSIFGKGW | | | |
| | | HNFSVKLMMELIPELYETSEEQMTILTRLGKQKTTSSSNKTKYIDEKLLTEEIY | | | |
| | | NPVVAKSVRQAIKIVNAAIKEYGDFDNIVIEMARETNEDDEKKAIQKIQKAN | | | |
| | | KDEKDAAMLKAANQYNGKAELPHSVFHGHKQLATKIRLWHQQGERCLYT | | | |
| | | GKTISIHDLINNSNQFEVDHILPLSITFDDSLANKVLVYATANQEKGQRTPYQ | | | |
| | | ALDSMDDAWSFRELKAFVRESKTLSNKKKEYLLTEEDISKFDVRKKFIERNLV | | | |
| | | DTRYASRVVLNALQEHFRAHKIDTKVSVVRGQFTSQLRRHWGIEKTRDTYH | | | |
| | | HHAVDALIIAASSQLNLWKKQKNTLVSYSEDQLLDIETGELISDDEYKESVFK | | | |
| | | APYQHFVDTLKSKEFEDSILFSYQVDSKFNRKISDATIYATRQAKVGKDKADE | | | |
| | | TYVLGKIKDIYTQDGYDAFMKIYKKDKSKFLMYRHDPQTFEKVIEPILENYPN | | | |
| | | KQINEKGKEVPCNPFLKYKEEHGYIRKYSKKGNGPEIKSLKYYDSKLGNHIDIT | | | |
| | | PKDSNNKVVLQSLKPWRTDVYFNKNTGKYEILGLKYSDMQFEKGTGKYSISK | | | |
| | | EQYENIKVREGVDENSEFKFTLYKNDLLLLKDSENGEQILLRFTSRNDTSKHYV | | | |
| | | ELKPYNRQKFEGSEYLIKSLGTVAKGGQCIKGLGKSNISIYKVRTDVLGNQHII | | | |
| | | KNEGDKPKLDF (SEQ ID NO: 20355) | | | |
| St1Cas9- | Streptococcus | MSDLVLGLDIGIGSVGVGILNKVTGEIIHKNSRIFPAAQAENNLVRRTNRQG | N622A | H599A | D9A |
| TH1477 | thermophilus | RRLARRKKHRRVRLNRLFEESGLITDFTKISINLNPYQLRVKGLTDELSNEELFI | | | |
| | | ALKNMVKHRGISYLDDASDDGNSSVGDYAQIVKENSKQLETKTPGQIQLER | | | |
| | | YQTYGQLRGDFTVEKDGKKHRLINVFPTSAYRSEALRILQTQQEFNPQITDEF | | | |
| | | INRYLEILTGKRKYYHGPGNEKSRTDYGRYRTSGETLDNIFGILIGKCTFYPDEF | | | |
| | | RAAKASYTAQEFNLLNDLNNLTVPTETKKLSKEQKNQIINYVKNEKAMGPAK | | | |
| | | LFKYIAKLLSCDVADIKGYRIDKSGKAEIHTFEAYRKMKTLETLDIEQMDRETL | | | |
| | | DKLAYVLTLNTEREGIQEALEHEFADGSFSQKQVDELVQFRKANSSIFGKGW | | | |
| | | HNFSVKLMMELIPELYETSEEQMTILTRLGKQKTTSSSNKTKYIDEKLLTEEIY | | | |
| | | NPVVAKSVRQAIKIVNAAIKEYGDFDNIVIEMARETNEDDEKKAIQKIQKAN | | | |
| | | KDEKDAAMLKAANQYNGKAELPHSVFHGHKQLATKIRLWHQQGERCLYT | | | |
| | | GKTISIHDLINNSNQFEVDHILPLSITFDDSLANKVLVYATANQEKGQRTPYQ | | | |
| | | ALDSMDDAWSFRELKAFVRESKTLSNKKKEYLLTEEDISKFDVRKKFIERNLV | | | |
| | | DTRYASRVVLNALQEHFRAHKIDTKVSVVRGQFTSQLRRHWGIEKTRDTYH | | | |
| | | HHAVDALIIAASSQLNLWKKQKNTLVSYSEDQLLDIETGELISDDEYKESVFK | | | |
| | | APYQHFVDTLKSKEFEDSILFSYQVDSKFNRKISDATIYATRQAKVGKDKADE | | | |
| | | TYVLGKIKDIYTQDGYDAFMKIYKKDKSKFLMYRHDPQTFEKVIEPILENYPN | | | |
| | | KQINEKGKEVPCNPFLKYKEEHGYIRKYSKKGNGPEIKSLKYYDSKLGNHIDIT | | | |
| | | PKDSNNKVVLQSLKPWRTDVYFNKNTGKYEILGLKYSDMQFEKGTGKYSISK | | | |
| | | EQYENIKVREGVDENSEFKFTLYKNDLLLLKDSENGEQILLRFTSRNDTSKHYV | | | |
| | | ELKPYNRQKFEGSEYLIKSLGTVVKGGRCIKGLGKSNISIYKVRTDVLGNQHIIK | | | |
| | | NEGDKPKLDF (SEQ ID NO: 20356) | | | |
| sRGN3.1 | Staphylococcus | MNQKFILGLDIGITSVGYGLIDYETKNIIDAGVRLFPEANVENNEGRRSKRGS | N585A | H562A | D10A |
| | spp. | RRLKRRRIHRLERVKLLLTEYDLINKEQIPTSNNPYQIRVKGLSEILSKDELAIAL | | | |
| | | LHLAKRRGIHNVDVAADKEETASDSLSTKDQINKNAKFLESRYVCELQKERLE | | | |
| | | NEGHVRGVENRFLTKDIVREAKKIIDTQMQYYPEIDETFKEKYISLVETRREYF | | | |
| | | EGPGQGSPFGWNGDLKKWYEMLMGHCTYFPQELRSVKYAYSADLFNALN | | | |
| | | DLNNLIIQRDNSEKLEYHEKYHIIENVFKQKKKPTLKQIAKEIGVNPEDIKGYRI | | | |
| | | TKSGTPEFTSFKLFHDLKKVVKDHAILDDIDLLNQIAEILTIYQDKDSIVAELGQ | | | |
| | | LEYLMSEADKQSISELTGYTGTHSLSLKCMNMIIDELWHSSMNQMEVFTYL | | | |
| | | NMRPKKYELKGYQRIPTDMIDDAILSPVVKRTFIQSINVINKVIEKYGIPEDIIIE | | | |
| | | LARENNSDDRKKFINNLQKKNEATRKRINEIIGQTGNQNAKRIVEKIRLHDQ | | | |
| | | QEGKCLYSLESIPLEDLLNNPNHYEVDHIIPRSVSFDNSYHNKVLVKQSENSK | | | |
| | | KSNLTPYQYFNSGKSKLSYNQFKQHILNLSKSQDRISKKKKEYLLEERDINKFE | | | |
| | | VQKEFINRNLVDTRYATRELTNYLKAYFSANNMNVKVKTINGSFTDYLRKV | | | |
| | | WKFKKERNHGYKHHAEDALIIANADFLFKENKKLKAVNSVLEKPEIETKQLDI | | | |
| | | QVDSEDNYSEMFIIPKQVQDIKDFRNFKYSHRVDKKPNRQLINDTLYSTRKK | | | |
| | | DNSTYIVQTIKDIYAKDNTTLKKQFDKSPEKFLMYQHDPRTFEKLEVIMKQYA | | | |
| | | NEKNPLAKYHEETGEYLTKYSKKNNGPIVKSLKYIGNKLGSHLDVTHQFKSST | | | |
| | | KKLVKLSIKNYRFDVYLTEKGYKFVTIAYLNVFKKDNYYYIPKDKYQELKEKKKI | | | |
| | | KDTDQFIASFYKNDLIKLNGDLYKIIGVNSDDRNIIELDYYDIKYKDYCEINNIK | | | |
| | | GEPRIKKTIGKKTESIEKFTTDVLGNLYLHSTEKAPQLIFKRGL (SEQ ID NO: | | | |
| | | 20357) | | | |
| sRGN3.3 | Staphylococcus | MNQKFILGLDIGITSVGYGLIDYETKNIIDAGVRLFPEANVENNEGRRSKRGS | N585A | H562A | D10A |
| | spp. | RRLKRRRIHRLERVKLLLTEYDLINKEQIPTSNNPYQIRVKGLSEILSKDELAIAL | | | |
| | | LHLAKRRGIHNVDVAADKEETASDSLSTKDQINKNAKFLESRYVCELQKERLE | | | |
| | | NEGHVRGVENRFLTKDIVREAKKIIDTQMQYYPEIDETFKEKYISLVETRREYF | | | |
| | | EGPGQGSPFGWNGDLKKWYEMLMGHCTYFPQELRSVKYAYSADLFNALN | | | |
| | | DLNNLIIQRDNSEKLEYHEKYHIIENVFKQKKKPTLKQIAKEIGVNPEDIKGYRI | | | |
| | | TKSGTPEFTSFKLFHDLKKVVKDHAILDDIDLLNQIAEILTIYQDKDSIVAELGQ | | | |
| | | LEYLMSEADKQSISELTGYTGTHSLSLKCMNMIIDELWHSSMNQMEVFTYL | | | |
| | | NMRPKKYELKGYQRIPTDMIDDAILSPVVKRTFIQSINVINKVIEKYGIPEDIIIE | | | |
| | | LARENNSDDRKKFINNLQKKNEATRKRINEIIGQTGNQNAKRIVEKIRLHDQ | | | |
| | | QEGKCLYSLESIPLEDLLNNPNHYEVDHIIPRSVSFDNSYHNKVLVKQSENSK | | | |
| | | KSNLTPYQYFNSGKSKLSYNQFKQHILNLSKSQDRISKKKKEYLLEERDINKFE | | | |
| | | VQKEFINRNLVDTRYATRELTSYLKAYFSANNMDVKVKTINGSFTNHLRKV | | | |
| | | WRFDKYRNHGYKHHAEDALIIANADFLFKENKKLQNTNKILEKPTIENNTKK | | | |
| | | VTVEKEEDYNNVFETPKLVEDIKQYRDYKFSHRVDKKPNRQLINDTLYSTRM | | | |
| | | KDEHDYIVQTITDIYGKDNTNLKKQFNKNPEKFLMYQNDPKTFEKLSIIMKQ | | | |
| | | YSDEKNPLAKYYEETGEYLTKYSKKNNGPIVKKIKLLGNKVGNHLDVTNKYEN | | | |
| | | STKKLVKLSIKNYRFDVYLTEKGYKFVTIAYLNVFKKDNYYYIPKDKYQELKEKK | | | |
| | | KIKDTDQFIASFYKNDLIKLNGDLYKIIGVNSDDRNIIELDYYDIKYKDYCEINNI | | | |
| | | KGEPRIKKTIGKKTESIEKFTTDVLGNLYLHSTEKAPQLIFKRGL (SEQ ID NO: | | | |
| | | 20358) | | | |

[0344] In some embodiments, a Cas protein requires a protospacer adjacent motif (PAM) to be present in or adjacent to a target DNA sequence for the Cas protein to bind and/or function. In some embodiments, the PAM is or comprises, from 5′ to 3′, NGG, YG, NNGRRT, NNNRRT, NGA, TYCV, TATV, NTTN, or NNNGATT, where N stands for any nucleotide, Y stands for C or T, R stands for A or G, and V stands for A or C or G. In some embodiments, a Cas protein is a protein listed in Table 7 or 8. In some embodiments, a Cas protein comprises one or more mutations altering its PAM. In some embodiments, a Cas protein comprises E1369R, E1449H, and R1556A mutations or analogous substitutions to the amino acids corresponding to said positions. In some embodiments, a Cas protein comprises E782K, N968K, and R1015H mutations or analogous substitutions to the amino acids corresponding to said positions. In some embodiments, a Cas protein comprises D1135V, R1335Q, and T1337R mutations or analogous substitutions to the amino acids corresponding to said positions. In some embodiments, a Cas protein comprises S542R and K607R mutations or analogous substitutions to the amino acids corresponding to said positions. In some embodiments, a Cas protein comprises S542R, K548V, and N552R mutations or analogous substitutions to the amino acids corresponding to said positions. Exemplary advances in the engineering of Cas enzymes to recognize altered PAM sequences are reviewed in Collias et al Nature Communications 12:555 (2021), incorporated herein by reference in its entirety.

[0345] In some embodiments, the Cas protein is catalytically active and cuts one or both strands of the target DNA site. In some embodiments, cutting the target DNA site is followed by formation of an alteration, e.g., an insertion or deletion, e.g., by the cellular repair machinery.

[0346] In some embodiments, the Cas protein is modified to deactivate or partially deactivate the nuclease, e.g., nuclease-deficient Cas9. Whereas wild-type Cas9 generates double-strand breaks (DSBs) at specific DNA sequences targeted by a gRNA, a number of CRISPR endonucleases having modified functionalities are available, for example: a “nickase” version of Cas9 that has been partially deactivated generates only a single-strand break; a catalytically inactive Cas9 (“dCas9”) does not cut target DNA. In some embodiments, dCas9 binding to a DNA sequence may interfere with transcription at that site by steric hindrance. In some embodiments, dCas9 binding to an anchor sequence may interfere with (e.g., decrease or prevent) genomic complex (e.g., ASMC) formation and/or maintenance. In some embodiments, a DNA-binding domain comprises a catalytically inactive Cas9, e.g., dCas9. Many catalytically inactive Cas9 proteins are known in the art. In some embodiments, dCas9 comprises mutations in each endonuclease domain of the Cas protein, e.g., D10A and H840A or N863A mutations. In some embodiments, a catalytically inactive or partially inactive CRISPR/Cas domain comprises a Cas protein comprising one or more mutations, e.g., one or more of the mutations listed in Table 7. In some embodiments, a Cas protein described on a given row of Table 7 comprises one, two, three, or all of the mutations listed in the same row of Table 7. In some embodiments, a Cas protein, e.g., not described in Table 7, comprises one, two, three, or all of the mutations listed in a row of Table 7 or a corresponding mutation at a corresponding site in that Cas protein.

[0347] In some embodiments, a Cas9 derivative with enhanced activity may be used in the gene modification polypeptide. In some embodiments, a Cas9 derivative may comprise mutations that improve activity of the HNH endonuclease domain, e.g., SpyCas9 R221K, N394K, or mutations that improve R-loop formation, e.g., SpyCas9 L1245V, or comprise a combination of such mutations, e.g., SpyCas9 R221K/N394K, SpyCas9 N394K/L1245V, SpyCas9 R221K/L1245V, or SpyCas9 R221K/N394K/L1245V (see, e.g., Spencer and Zhang Sci Rep 7:16836 (2017), the Cas9 derivatives and comprising mutations of which are incorporated herein by reference). In some embodiments, a Cas9 derivative may comprise one or more types of mutations described herein, e.g., PAM-modifying mutations, protein stabilizing mutations, activity enhancing mutations, and/or mutations partially or fully inactivating one or two endonuclease domains relative to the parental enzyme (e.g., one or more mutations to abolish endonuclease activity towards one or both strands of a target DNA, e.g., a nickase or catalytically dead enzyme). In some embodiments, a Cas9 enzyme used in a system described herein may comprise mutations that confer nickase activity toward the enzyme (e.g., SpyCas9 N863A or H840A) in addition to mutations improving catalytic efficiency (e.g., SpyCas9 R221K, N394K, and/or L1245V). In some embodiments, a Cas9 enzyme used in a system described herein is a SpyCas9 enzyme or derivative that further comprises an N863A mutation to confer nickase activity in addition to R221K and N394K mutations to improve catalytic efficiency.

[0348] In some embodiments, a catalytically inactive, e.g., dCas9, or partially deactivated Cas9 protein comprises a D11 mutation (e.g., D11A mutation) or an analogous substitution to the amino acid corresponding to said position. In some embodiments, a catalytically inactive Cas9 protein, e.g., dCas9, or partially deactivated Cas9 protein comprises a H969 mutation (e.g., H969A mutation) or an analogous substitution to the amino acid corresponding to said position. In some embodiments, a catalytically inactive Cas9 protein, e.g., dCas9, or partially deactivated Cas9 protein comprises a N995 mutation (e.g., N995A mutation) or an analogous substitution to the amino acid corresponding to said position. In some embodiments, a catalytically inactive Cas9 protein, e.g., dCas9, comprises mutations at one, two, or three of positions D11, H969, and N995 (e.g., D10A, H969A, and N995A mutations) or analogous substitutions to the amino acids corresponding to said positions.

[0349] In some embodiments, a catalytically inactive Cas9 protein, e.g., dCas9, or partially deactivated Cas9 protein comprises a D10 mutation (e.g., a D10A mutation) or an analogous substitution to the amino acid corresponding to said position. In some embodiments, a catalytically inactive Cas9 protein, e.g., dCas9, or partially deactivated Cas9 protein comprises a H557 mutation (e.g., a H557A mutation) or an analogous substitution to the amino acid corresponding to said position. In some embodiments, a catalytically inactive Cas9 protein, e.g., dCas9, comprises a D10 mutation (e.g., a D10A mutation) and a H557 mutation (e.g., a H557A mutation) or analogous substitutions to the amino acids corresponding to said positions.

[0350] In some embodiments, a catalytically inactive Cas9 protein, e.g., dCas9, or partially deactivated Cas9 protein comprises a D839 mutation (e.g., a D839A mutation) or an analogous substitution to the amino acid corresponding to said position. In some embodiments, a catalytically inactive Cas9 protein, e.g., dCas9, or partially deactivated Cas9 protein comprises a H840 mutation (e.g., a H840A mutation) or an analogous substitution to the amino acid corresponding to said position. In some embodiments, a catalytically inactive Cas9 protein, e.g., dCas9, or partially deactivated Cas9 protein comprises a N863 mutation (e.g., a N863A mutation) or an analogous substitution to the amino acid corresponding to said position. In some embodiments, a catalytically inactive Cas9 protein, e.g., dCas9, comprises a D10 mutation (e.g., D10A), a D839 mutation (e.g., D839A), a H840 mutation (e.g., H840A), and a N863 mutation (e.g., N863A) or analogous substitutions to the amino acids corresponding to said positions.

[0351] In some embodiments, a catalytically inactive Cas9 protein, e.g., dCas9, or partially deactivated Cas9 protein comprises a E993 mutation (e.g., a E993A mutation) or an analogous substitution to the amino acid corresponding to said position.

[0352] In some embodiments, a catalytically inactive Cas9 protein, e.g., dCas9, or partially deactivated Cas9 protein comprises a D917 mutation (e.g., a D917A mutation) or an analogous substitution to the amino acid corresponding to said position. In some embodiments, a catalytically inactive Cas9 protein, e.g., dCas9, or partially deactivated Cas9 protein comprises a a E1006 mutation (e.g., a E1006A mutation) or an analogous substitution to the amino acid corresponding to said position. In some embodiments, a catalytically inactive Cas9 protein, e.g., dCas9, or partially deactivated Cas9 protein comprises a D1255 mutation (e.g., a D1255A mutation) or an analogous substitution to the amino acid corresponding to said position. In some embodiments, a catalytically inactive Cas9 protein, e.g., dCas9, comprises a D917 mutation (e.g., D917A), a E1006 mutation (e.g., E1006A), and a D1255 mutation (e.g., D1255A) or analogous substitutions to the amino acids corresponding to said positions.

[0353] In some embodiments, a catalytically inactive Cas9 protein, e.g., dCas9, or partially deactivated Cas9 protein comprises a D16 mutation (e.g., a D16A mutation) or an analogous substitution to the amino acid corresponding to said position. In some embodiments, a catalytically inactive Cas9 protein, e.g., dCas9, or partially deactivated Cas9 protein comprises a D587 mutation (e.g., a D587A mutation) or an analogous substitution to the amino acid corresponding to said position. In some embodiments, a partially deactivated Cas domain has nickase activity. In some embodiments, a partially deactivated Cas9 domain is a Cas9 nickase domain. In some embodiments, the catalytically inactive Cas domain or dead Cas domain produces no detectable double strand break formation. In some embodiments, a catalytically inactive Cas9 protein, e.g., dCas9, or partially deactivated Cas9 protein comprises a H588 mutation (e.g., a H588A mutation) or an analogous substitution to the amino acid corresponding to said position. In some embodiments, a catalytically inactive Cas9 protein, e.g., dCas9, or partially deactivated Cas9 protein comprises a N611 mutation (e.g., a N611A mutation) or an analogous substitution to the amino acid corresponding to said position. In some embodiments, a catalytically inactive Cas9 protein, e.g., dCas9, comprises a D16 mutation (e.g., D16A), a D587 mutation (e.g., D587A), a H588 mutation (e.g., H588A), and a N611 mutation (e.g., N611A) or analogous substitutions to the amino acids corresponding to said positions.

[0354] In some embodiments, a DNA-binding domain or endonuclease domain may comprise a Cas molecule comprising or linked (e.g., covalently) to a gRNA (e.g., a template nucleic acid, e.g., template RNA, comprising a gRNA).

[0355] In some embodiments, an endonuclease domain or DNA binding domain comprises a Streptococcus pyogenes Cas9 (SpCas9) or a functional fragment or variant thereof. In some embodiments, the endonuclease domain or DNA binding domain comprises a modified SpCas9. In embodiments, the modified SpCas9 comprises a modification that alters protospacer-adjacent motif (PAM) specificity. In embodiments, the PAM has specificity for the nucleic acid sequence 5′-NGT-3′. In embodiments, the modified SpCas9 comprises one or more amino acid substitutions, e.g., at one or more of positions L1111, D1135, G1218, E1219, A1322, of R1335, e.g., selected from L1111R, D1135V, G1218R, E1219F, A1322R, R1335V. In embodiments, the modified SpCas9 comprises the amino acid substitution T1337R and one or more additional amino acid substitutions, e.g., selected from L1111, D1135L, S1136R, G1218S, E1219V, D1332A, D1332S, D1332T, D1332V, D1332L, D1332K, D1332R, R1335Q, T1337, T1337L, T1337Q, T1337I, T1337V, T1337F, T1337S, T1337N, T1337K, T1337H, T1337Q, and T1337M, or corresponding amino acid substitutions thereto. In embodiments, the modified SpCas9 comprises: (i) one or more amino acid substitutions selected from D1135L, S1136R, G1218S, E1219V, A1322R, R1335Q, and T1337; and (ii) one or more amino acid substitutions selected from L1111R, G1218R, E1219F, D1332A, D1332S, D1332T, D1332V, D1332L, D1332K, D1332R, T1337L, T1337I, T1337V, T1337F, T1337S, T1337N, T1337K, T1337R, T1337H, T1337Q, and T1337M, or corresponding amino acid substitutions thereto.

[0356] In some embodiments, the endonuclease domain or DNA binding domain comprises a Cas domain, e.g., a Cas9 domain. In embodiments, the endonuclease domain or DNA binding domain comprises a nuclease-active Cas domain, a Cas nickase (nCas) domain, or a nuclease-inactive Cas (dCas) domain. In embodiments, the endonuclease domain or DNA binding domain comprises a nuclease-active Cas9 domain, a Cas9 nickase (nCas9) domain, or a nuclease-inactive Cas9 (dCas9) domain. In some embodiments, the endonuclease domain or DNA binding domain comprises a Cas9 domain of Cas9 (e.g., dCas9 and nCas9), Cas12a/Cpf1, Cas12b/C2cl, Cas12c/C2c3, Cas12d/CasY, Cas12e/CasX, Cas12g, Cas12h, or Cas12i. In some embodiments, the endonuclease domain or DNA binding domain comprises a Cas9 (e.g., dCas9 and nCas9), Cas12a/Cpf1, Cas12b/C2cl, Cas12c/C2c3, Cas12d/CasY, Cas12e/CasX, Cas12g, Cas12h, or Cas12i. In some embodiments, the endonuclease domain or DNA binding domain comprises an S. pyogenes or an S. thermophilus Cas9, or a functional fragment thereof. In some embodiments, the endonuclease domain or DNA binding domain comprises a Cas9 sequence, e.g., as described in Chylinski, Rhun, and Charpentier (2013) RNA Biology 10:5, 726-737; incorporated herein by reference. In some embodiments, the endonuclease domain or DNA binding domain comprises the HNH nuclease subdomain and/or the RuvC1 subdomain of a Cas, e.g., Cas9, e.g., as described herein, or a variant thereof. In some embodiments, the endonuclease domain or DNA binding domain comprises Cas12a/Cpf1, Cas12b/C2cl, Cas12c/C2c3, Cas12d/CasY, Cas12e/CasX, Cas12g, Cas12h, or Cas12i. In some embodiments, the endonuclease domain or DNA binding domain comprises a Cas polypeptide (e.g., enzyme), or a functional fragment thereof. In embodiments, the Cas polypeptide (e.g., enzyme) is selected from Cas1, Cas1B, Cas2, Cas3, Cas4, Cas5, Cas5d, Cas5t, Cas5h, Cas5a, Cas6, Cas7, Cas8, Cas8a, Cas8b, Cas8c, Cas9 (e.g., Csn1 or Csx12), Cas10, Cas10d, Cas12a/Cpf1, Cas12b/C2cl, Cas12c/C2c3, Cas12d/CasY, Cas12e/CasX, Cas12g, Cas12h, Cas12i, Csy1, Csy2, Csy3, Csy4, Cse1, Cse2, Cse3, Cse4, Cse5e, Csc1, Csc2, Csa5, Csn1, Csn2, Csm1, Csm2, Csm3, Csm4, Csm5, Csm6, Cmr1, Cmr3, Cmr4, Cmr5, Cmr6, Csb1, Csb2, Csb3, Csx17, Csx14, Csx10, Csx16, CsaX, Csx3, Csx1, Csx1S, Csx11, Csf1, Csf2, CsO, Csf4, Csd1, Csd2, Cst1, Cst2, Csh1, Csh2, Csa1, Csa2, Csa3, Csa4, Csa5, Type II Cas effector proteins, Type V Cas effector proteins, Type VI Cas effector proteins, CARF, DinG, Cpf1, Cas12b/C2c1, Cas12c/C2c3, Cas12b/C2c1, Cas12c/C2c3, SpCas9(K855A), eSpCas9(1.1), SpCas9-HF1, hyper accurate Cas9 variant (HypaCas9), homologues thereof, modified or engineered versions thereof, and/or functional fragments thereof. In embodiments, the Cas9 comprises one or more substitutions, e.g., selected from H840A, D10A, P475A, W476A, N477A, D1125A, W1126A, and D1127A. In embodiments, the Cas9 comprises one or more mutations at positions selected from: D10, G12, G17, E762, H840, N854, N863, H982, H983, A984, D986, and/or A987, e.g., one or more substitutions selected from D10A, G12A, G17A, E762A, H840A, N854A, N863A, H982A, H983A, A984A, and/or D986A. In some embodiments, the endonuclease domain or DNA binding domain comprises a Cas (e.g., Cas9) sequence from Corynebacterium ulcerans, Corynebacterium diphtheria, Spiroplasma syrphidicola, Prevotella intermedia, Spiroplasma taiwanense, Streptococcus iniae, Belliella baltica, Psychroflexus torquis, Streptococcus thermophilus, Listeria innocua, Campylobacter jejuni, Neisseria meningitidis, Streptococcus pyogenes, or Staphylococcus aureus, or a fragment or variant thereof.

[0357] In some embodiments, the endonuclease domain or DNA binding domain comprises a Cpf1 domain, e.g., comprising one or more substitutions, e.g., at position D917, E1006A, D1255 or any combination thereof, e.g., selected from D917A, E1006A, D1255A, D917A/E1006A, D917A/D1255A, E1006A/D1255A, and D917A/E1006A/D1255A.

[0358] In some embodiments, the endonuclease domain or DNA binding domain comprises spCas9, spCas9-VRQR, spCas9-VRER, xCas9 (sp), saCas9, saCas9-KKH, spCas9-MQKSER, spCas9-LRKIQK, or spCas9-LRVSQL.

[0359] In some embodiments, a gene modifying polypeptide has an endonuclease domain comprising a Cas9 nickase, e.g., Cas9 H840A. In embodiments, the Cas9 H840A has the following amino acid sequence:

Cas9 nickase (H840A):
(SEQ ID NO: 20359)
DKKYSIGLDIGTNSVGWAVITDEYKVPSKKFKVLGNTDRHSIKKNLIGA
LLFDSGETAEATRLKRTARRRYTRRKNRICYLQEIFSNEMAKVDDSFFH
RLEESFLVEEDKKHERHPIFGNIVDEVAYHEKYPTIYHLRKKLVDSTDK
ADLRLIYLALAHMIKFRGHFLIEGDLNPDNSDVDKLFIQLVQTYNQLFE
ENPINASGVDAKAILSARLSKSRRLENLIAQLPGEKKNGLFGNLIALSL
GLTPNFKSNFDLAEDAKLQLSKDTYDDDLDNLLAQIGDQYADLFLAAKN
LSDAILLSDILRVNTEITKAPLSASMIKRYDEHHQDLTLLKALVRQQLP
EKYKEIFFDQSKNGYAGYIDGGASQEEFYKFIKPILEKMDGTEELLVKL
NREDLLRKQRTFDNGSIPHQIHLGELHAILRRQEDFYPFLKDNREKIEK
ILTFRIPYYVGPLARGNSRFAWMTRKSEETITPWNFEEVVDKGASAQSF
IERMTNFDKNLPNEKVLPKHSLLYEYFTVYNELTKVKYVTEGMRKPAFL
SGEQKKAIVDLLFKTNRKVTVKQLKEDYFKKIECFDSVEISGVEDRFNA
SLGTYHDLLKIIKDKDFLDNEENEDILEDIVLTLTLFEDREMIEERLKT
YAHLFDDKVMKQLKRRRYTGWGRLSRKLINGIRDKQSGKTILDFLKSDG
FANRNFMQLIHDDSLTFKEDIQKAQVSGQGDSLHEHIANLAGSPAIKKG
ILQTVKVVDELVKVMGRHKPENIVIEMARENQTTQKGQKNSRERMKRIE
EGIKELGSQILKEHPVENTQLQNEKLYLYYLQNGRDMYVDQELDINRLS
DYDVDAIVPQSFLKDDSIDNKVLTRSDKNRGKSDNVPSEEVVKKMKNYW
RQLLNAKLITQRKFDNLTKAERGGLSELDKAGFIKRQLVETRQITKHVA
QILDSRMNTKYDENDKLIREVKVITLKSKLVSDFRKDFQFYKVREINNY
HHAHDAYLNAVVGTALIKKYPKLESEFVYGDYKVYDVRKMIAKSEQEIG
KATAKYFFYSNIMNFFKTEITLANGEIRKRPLIETNGETGEIVWDKGRD
FATVRKVLSMPQVNIVKKTEVQTGGFSKESILPKRNSDKLIARKKDWDP
KKYGGFDSPTVAYSVLVVAKVEKGKSKKLKSVKELLGITIMERSSFEKN
PIDFLEAKGYKEVKKDLIIKLPKYSLFELENGRKRMLASAGELQKGNEL
ALPSKYVNFLYLASHYEKLKGSPEDNEQKQLFVEQHKHYLDEIIEQISE
FSKRVILADANLDKVLSAYNKHRDKPIREQAENIIHLFTLTNLGAPAAF
KYFDTTIDRKRYTSTKEVLDATLIHQSITGLYETRIDLSQLGGD

[0360] In some embodiments, a gene modifying polypeptide comprises a dCas9 sequence comprising a D10A and/or H840A mutation, e.g., the following sequence:

(SEQ ID NO: 7)
SMDKKYSIGLAIGTNSVGWAVITDDYKVPSKKFKVLGNTDRHSIKKNLI
GALLFDSGETAEATRLKRTARRRYTRRKNRICYLQEIFSNEMAKVDDSF
FHRLEESFLVEEDKKHERHPIFGNIVDEVAYHEKYPTIYHLRKKLVDST
DKADLRLIYLALAHMIKFRGHFLIEGDLNPDNSDVDKLFIQLVQTYNQL
FEENPINASGVDAKAILSARLSKSRRLENLIAQLPGEKKNGLFGNLIAL
SLGLTPNFKSNFDLAEDAKLQLSKDTYDDDLDNLLAQIGDQYADLFLAA
KNLSDAILLSDILRVNTEITKAPLSASMIKRYDEHHQDLTLLKALVRQQ
LPEKYKEIFFDQSKNGYAGYIDGGASQEEFYKFIKPILEKMDGTEELLV
KLNREDLLRKQRTFDNGSIPHQIHLGELHAILRRQEDFYPFLKDNREKI
EKILTFRIPYYVGPLARGNSRFAWMTRKSEETITPWNFEEVVDKGASAQ
SFIERMTNFDKNLPNEKVLPKHSLLYEYFTVYNELTKVKYVTEGMRKPA
FLSGEQKKAIVDLLFKTNRKVTVKQLKEDYFKKIECFDSVEISGVEDRF
NASLGTYHDLLKIIKDKDFLDNEENEDILEDIVLTLTLFEDREMIEERL
KTYAHLFDDKVMKQLKRRRYTGWGRLSRKLINGIRDKQSGKTILDFLKS
DGFANRNFMQLIHDDSLTFKEDIQKAQVSGQGDSLHEHIANLAGSPAIK
KGILQTVKVVDELVKVMGRHKPENIVIEMARENQTTQKGQKNSRERMKR
IEEGIKELGSQILKEHPVENTQLQNEKLYLYYLQNGRDMYVDQELDINR
LSDYDVDAIVPQSFLKDDSIDNKVLTRSDKNRGKSDNVPSEEVVKKMKN
YWRQLLNAKLITQRKFDNLTKAERGGLSELDKAGFIKRQLVETRQITKH
VAQILDSRMNTKYDENDKLIREVKVITLKSKLVSDFRKDFQFYKVREIN
NYHHAHDAYLNAVVGTALIKKYPKLESEFVYGDYKVYDVRKMIAKSEQE
IGKATAKYFFYSNIMNFFKTEITLANGEIRKRPLIETNGETGEIVWDKG
RDFATVRKVLSMPQVNIVKKTEVQTGGFSKESILPKRNSDKLIARKKDW
DPKKYGGFDSPTVAYSVLVVAKVEKGKSKKLKSVKELLGITIMERSSFE
KNPIDFLEAKGYKEVKKDLIIKLPKYSLFELENGRKRMLASAGELQKGN
ELALPSKYVNFLYLASHYEKLKGSPEDNEQKQLFVEQHKHYLDEIIEQI
SEFSKRVILADANLDKVLSAYNKHRDKPIREQAENIIHLFTLTNLGAPA
AFKYFDTTIDRKRYTSTKEVLDATLIHQSITGLYETRIDLSQLGGD

### TAL Effectors and Zinc Finger Nucleases

[0361] In some embodiments, an endonuclease domain or DNA-binding domain comprises a TAL effector molecule. A TAL effector molecule, e.g., a TAL effector molecule that specifically binds a DNA sequence, typically comprises a plurality of TAL effector domains or fragments thereof, and optionally one or more additional portions of naturally occurring TAL effectors (e.g., N- and/or C-terminal of the plurality of TAL effector domains). Many TAL effectors are known to those of skill in the art and are commercially available, e.g., from Thermo Fisher Scientific.

[0362] Naturally occurring TALEs are natural effector proteins secreted by numerous species of bacterial pathogens including the plant pathogen Xanthomonas which modulates gene expression in host plants and facilitates bacterial colonization and survival. The specific binding of TAL effectors is based on a central repeat domain of tandemly arranged nearly identical repeats of typically 33 or 34 amino acids (the repeat-variable di-residues, RVD domain).

[0363] Members of the TAL effectors family differ mainly in the number and order of their repeats. The number of repeats typically ranges from 1.5 to 33.5 repeats and the C-terminal repeat is usually shorter in length (e.g., about 20 amino acids) and is generally referred to as a “half-repeat.” Each repeat of the TAL effector generally features a one-repeat-to-one-base-pair correlation with different repeat types exhibiting different base-pair specificity (one repeat recognizes one base-pair on the target gene sequence). Generally, the smaller the number of repeats, the weaker the protein-DNA interactions. A number of 6.5 repeats has been shown to be sufficient to activate transcription of a reporter gene (Scholze et al., 2010).

[0364] Repeat to repeat variations occur predominantly at amino acid positions 12 and 13, which have therefore been termed “hypervariable” and which are responsible for the specificity of the interaction with the target DNA promoter sequence, as shown in Table 9 listing exemplary repeat variable diresidues (RVD) and their correspondence to nucleic acid base targets.

TABLE 9
RVDs and Nucleic Acid Base Specificity

| Target | Possible RVD Amino Acid Combinations | | | | | | | | | | | | |
|---|---|---|---|---|---|---|---|---|---|---|---|---|---|
| A | NI | NN | CI | HI | KI | | | | | | | | |
| G | NN | GN | SN | VN | LN | DN | QN | EN | HN | RH | NK | AN | FN |
| C | HD | RD | KD | ND | AD | | | | | | | | |
| T | NG | HG | VG | IG | EG | MG | YG | AA | EP | VA | QG | KG | RG |

[0365] Accordingly, it is possible to modify the repeats of a TAL effector to target specific DNA sequences. Further studies have shown that the RVD NK can target G. Target sites of TAL effectors also tend to include a T flanking the 5′ base targeted by the first repeat, but the exact mechanism of this recognition is not known. More than 113 TAL effector sequences are known to date. Non-limiting examples of TAL effectors from Xanthomonas include, Hax2, Hax3, Hax4, AvrXa7, AvrXa10 and AvrBs3.

[0366] Accordingly, the TAL effector domain of a TAL effector molecule described herein may be derived from a TAL effector from any bacterial species (e.g., Xanthomonas species such as the African strain of Xanthomonas oryzae pv. Oryzae (Yu et al. 2011), Xanthomonas campestris pv. Raphani strain 756C and Xanthomonas oryzae pv. Oryzicola strain BLS256 (Bogdanove et al. 2011). In some embodiments, the TAL effector domain comprises an RVD domain as well as flanking sequence(s) (sequences on the N-terminal and/or C-terminal side of the RVD domain) also from the naturally occurring TAL effector. It may comprise more or fewer repeats than the RVD of the naturally occurring TAL effector. The TAL effector molecule can be designed to target a given DNA sequence based on the above code and others known in the art. The number of TAL effector domains (e.g., repeats (monomers or modules)) and their specific sequence can be selected based on the desired DNA target sequence. For example, TAL effector domains, e.g., repeats, may be removed or added in order to suit a specific target sequence. In an embodiment, the TAL effector molecule of the present invention comprises between 6.5 and 33.5 TAL effector domains, e.g., repeats. In an embodiment, TAL effector molecule of the present invention comprises between 8 and 33.5 TAL effector domains, e.g., repeats, e.g., between 10 and 25 TAL effector domains, e.g., repeats, e.g., between 10 and 14 TAL effector domains, e.g., repeats.

[0367] In some embodiments, the TAL effector molecule comprises TAL effector domains that correspond to a perfect match to the DNA target sequence. In some embodiments, a mismatch between a repeat and a target base-pair on the DNA target sequence is permitted as along as it allows for the function of the polypeptide comprising the TAL effector molecule. In general, TALE binding is inversely correlated with the number of mismatches. In some embodiments, the TAL effector molecule of a polypeptide of the present invention comprises no more than 7 mismatches, 6 mismatches, 5 mismatches, 4 mismatches, 3 mismatches, 2 mismatches, or 1 mismatch, and optionally no mismatch, with the target DNA sequence. Without wishing to be bound by theory, in general the smaller the number of TAL effector domains in the TAL effector molecule, the smaller the number of mismatches will be tolerated and still allow for the function of the polypeptide comprising the TAL effector molecule. The binding affinity is thought to depend on the sum of matching repeat-DNA combinations. For example, TAL effector molecules having 25 TAL effector domains or more may be able to tolerate up to 7 mismatches.

[0368] In addition to the TAL effector domains, the TAL effector molecule of the present invention may comprise additional sequences derived from a naturally occurring TAL effector. The length of the C-terminal and/or N-terminal sequence(s) included on each side of the TAL effector domain portion of the TAL effector molecule can vary and be selected by one skilled in the art, for example based on the studies of Zhang et al. (2011). Zhang et al., have characterized a number of C-terminal and N-terminal truncation mutants in Hax3 derived TAL-effector based proteins and have identified key elements, which contribute to optimal binding to the target sequence and thus activation of transcription. Generally, it was found that transcriptional activity is inversely correlated with the length of N-terminus. Regarding the C-terminus, an important element for DNA binding residues within the first 68 amino acids of the Hax 3 sequence was identified. Accordingly, in some embodiments, the first 68 amino acids on the C-terminal side of the TAL effector domains of the naturally occurring TAL effector is included in the TAL effector molecule. Accordingly, in an embodiment, a TAL effector molecule comprises 1) one or more TAL effector domains derived from a naturally occurring TAL effector; 2) at least 70, 80, 90, 100, 110, 120, 130, 140, 150, 170, 180, 190, 200, 220, 230, 240, 250, 260, 270, 280 or more amino acids from the naturally occurring TAL effector on the N-terminal side of the TAL effector domains; and/or 3) at least 68, 80, 90, 100, 110, 120, 130, 140, 150, 170, 180, 190, 200, 220, 230, 240, 250, 260 or more amino acids from the naturally occurring TAL effector on the C-terminal side of the TAL effector domains.

[0369] In some embodiments, an endonuclease domain or DNA-binding domain is or comprises a Zn finger molecule. A Zn finger molecule comprises a Zn finger protein, e.g., a naturally occurring Zn finger protein or engineered Zn finger protein, or fragment thereof. Many Zn finger proteins are known to those of skill in the art and are commercially available, e.g., from Sigma-Aldrich.

[0370] In some embodiments, a Zn finger molecule comprises a non-naturally occurring Zn finger protein that is engineered to bind to a target DNA sequence of choice. See, for example, Beerli, et al. (2002) Nature Biotechnol. 20:135-141; Pabo, et al. (2001) Ann. Rev. Biochem. 70:313-340; Isalan, et al. (2001) Nature Biotechnol. 19:656-660; Segal, et al. (2001) Curr. Opin. Biotechnol. 12:632-637; Choo, et al. (2000) Curr. Opin. Struct. Biol. 10:411-416; U.S. Pat. Nos. 6,453,242; 6,534,261; 6,599,692; 6,503,717; 6,689,558; 7,030,215; 6,794,136; 7,067,317; 7,262,054; 7,070,934; 7,361,635; 7,253,273; and U.S. Patent Publication Nos. 2005/0064474; 2007/0218528; 2005/0267061, all incorporated herein by reference in their entireties.

[0371] An engineered Zn finger protein may have a novel binding specificity, compared to a naturally-occurring Zn finger protein. Engineering methods include, but are not limited to, rational design and various types of selection. Rational design includes, for example, using databases comprising triplet (or quadruplet) nucleotide sequences and individual Zn finger amino acid sequences, in which each triplet or quadruplet nucleotide sequence is associated with one or more amino acid sequences of zinc fingers which bind the particular triplet or quadruplet sequence. See, for example, U.S. Pat. Nos. 6,453,242 and 6,534,261, incorporated by reference herein in their entireties.

[0372] Exemplary selection methods, including phage display and two-hybrid systems, are disclosed in U.S. Pat. Nos. 5,789,538; 5,925,523; 6,007,988; 6,013,453; 6,410,248; 6,140,466; 6,200,759; and 6,242,568; as well as International Patent Publication Nos. WO 98/37186; WO 98/53057; WO 00/27878; and WO 01/88197 and GB 2,338,237. In addition, enhancement of binding specificity for zinc finger proteins has been described, for example, in International Patent Publication No. WO 02/077227.

[0373] In addition, as disclosed in these and other references, zinc finger domains and/or multi-fingered zinc finger proteins may be linked together using any suitable linker sequences, including for example, linkers of 5 or more amino acids in length. See, also, U.S. Pat. Nos. 6,479,626; 6,903,185; and 7,153,949 for exemplary linker sequences 6 or more amino acids in length. The proteins described herein may include any combination of suitable linkers between the individual zinc fingers of the protein. In addition, enhancement of binding specificity for zinc finger binding domains has been described, for example, in co-owned International Patent Publication No. WO 02/077227.

[0374] Zn finger proteins and methods for design and construction of fusion proteins (and polynucleotides encoding same) are known to those of skill in the art and described in detail in U.S. Pat. Nos. 6,140,0815; 789,538; 6,453,242; 6,534,261; 5,925,523; 6,007,988; 6,013,453; and 6,200,759; International Patent Publication Nos. WO 95/19431; WO 96/06166; WO 98/53057; WO 98/54311; WO 00/27878; WO 01/60970; WO 01/88197; WO 02/099084; WO 98/53058; WO 98/53059; WO 98/53060; WO 02/016536; and WO 03/016496.

[0375] In addition, as disclosed in these and other references, Zn finger proteins and/or multi-fingered Zn finger proteins may be linked together, e.g., as a fusion protein, using any suitable linker sequences, including for example, linkers of 5 or more amino acids in length. See, also, U.S. Pat. Nos. 6,479,626; 6,903,185; and 7,153,949 for exemplary linker sequences 6 or more amino acids in length. The Zn finger molecules described herein may include any combination of suitable linkers between the individual zinc finger proteins and/or multi-fingered Zn finger proteins of the Zn finger molecule.

[0376] In certain embodiments, the DNA-binding domain or endonuclease domain comprises a Zn finger molecule comprising an engineered zinc finger protein that binds (in a sequence-specific manner) to a target DNA sequence. In some embodiments, the Zn finger molecule comprises one Zn finger protein or fragment thereof. In other embodiments, the Zn finger molecule comprises a plurality of Zn finger proteins (or fragments thereof), e.g., 2, 3, 4, 5, 6 or more Zn finger proteins (and optionally no more than 12, 11, 10, 9, 8, 7, 6, 5, 4, 3, or 2 Zn finger proteins). In some embodiments, the Zn finger molecule comprises at least three Zn finger proteins. In some embodiments, the Zn finger molecule comprises four, five or six fingers. In some embodiments, the Zn finger molecule comprises 8, 9, 10, 11 or 12 fingers. In some embodiments, a Zn finger molecule comprising three Zn finger proteins recognizes a target DNA sequence comprising 9 or 10 nucleotides. In some embodiments, a Zn finger molecule comprising four Zn finger proteins recognizes a target DNA sequence comprising 12 to 14 nucleotides. In some embodiments, a Zn finger molecule comprising six Zn finger proteins recognizes a target DNA sequence comprising 18 to 21 nucleotides.

[0377] In some embodiments, a Zn finger molecule comprises a two-handed Zn finger protein. Two handed zinc finger proteins are those proteins in which two clusters of zinc finger proteins are separated by intervening amino acids so that the two zinc finger domains bind to two discontinuous target DNA sequences. An example of a two handed type of zinc finger binding protein is SIP1, where a cluster of four zinc finger proteins is located at the amino terminus of the protein and a cluster of three Zn finger proteins is located at the carboxyl terminus (see Remade, et al. (1999) EMBO Journal 18(18):5073-5084). Each cluster of zinc fingers in these proteins is able to bind to a unique target sequence and the spacing between the two target sequences can comprise many nucleotides.

### Linkers

[0378] In some embodiments, a gene modifying polypeptide may comprise a linker, e.g., a peptide linker, e.g., a linker as described in Table 1 or Table 10. In some embodiments, a gene modifying polypeptide comprises, in an N-terminal to C-terminal direction, a Cas domain (e.g., a Cas domain of Table 8), a linker of Table 10 (or a sequence having at least 70%, 80%, 85%, 90%, 95%, or 99% identity thereto), and an RT domain (e.g., an RT domain of Table 6). In some embodiments, a gene modifying polypeptide comprises a flexible linker between the endonuclease and the RT domain, e.g., a linker comprising the amino acid sequence SGGSSGGSSGSETPGTSESATPESSGGSSGGSS (SEQ ID NO: 20360). In some embodiments, an RT domain of a gene modifying polypeptide may be located C-terminal to the endonuclease domain. In some embodiments, an RT domain of a gene modifying polypeptide may be located N-terminal to the endonuclease domain.

TABLE 10
Exemplary linker sequences

| Amino Acid Sequence | SEQ ID NO |
|---|---|
| GGS | |
| GGSGGS | 102 |
| GGSGGSGGS | 103 |
| GGSGGSGGSGGS | 104 |
| GGSGGSGGSGGSGGS | 105 |
| GGSGGSGGSGGSGGSGGS | 106 |
| GGGGS | 107 |
| GGGGSGGGGS | 108 |
| GGGGSGGGGSGGGGS | 109 |
| GGGGSGGGGSGGGGSGGGGS | 110 |
| GGGGSGGGGSGGGGSGGGGSGGGGS | 111 |
| GGGGSGGGGSGGGGSGGGGSGGGGSGGGGS | 112 |
| GGG | |
| GGGG | 114 |
| GGGGG | 115 |
| GGGGGG | 116 |
| GGGGGGG | 117 |
| GGGGGGGG | 118 |
| GSS | |
| GSSGSS | 120 |
| GSSGSSGSS | 121 |
| GSSGSSGSSGSS | 122 |
| GSSGSSGSSGSSGSS | 123 |
| GSSGSSGSSGSSGSSGSS | 124 |
| EAAAK | 125 |
| EAAAKEAAAK | 126 |
| EAAAKEAAAKEAAAK | 127 |
| EAAAKEAAAKEAAAKEAAAK | 128 |
| EAAAKEAAAKEAAAKEAAAKEAAAK | 129 |
| EAAAKEAAAKEAAAKEAAAKEAAAKEAAAK | 130 |
| PAP | |
| PAPAP | 132 |
| PAPAPAP | 133 |
| PAPAPAPAP | 134 |
| PAPAPAPAPAP | 135 |
| PAPAPAPAPAPAP | 136 |
| GGSGGG | 137 |
| GGGGGS | 138 |
| GGSGSS | 139 |
| GSSGGS | 140 |
| GGSEAAAK | 141 |
| EAAAKGGS | 142 |
| GGSPAP | 143 |
| PAPGGS | 144 |
| GGGGSS | 145 |
| GSSGGG | 146 |
| GGGEAAAK | 147 |
| EAAAKGGG | 148 |
| GGGPAP | 149 |
| PAPGGG | 150 |
| GSSEAAAK | 151 |
| EAAAKGSS | 152 |
| GSSPAP | 153 |
| PAPGSS | 154 |
| EAAAKPAP | 155 |
| PAPEAAAK | 156 |
| GGSGGGGSS | 157 |
| GGSGSSGGG | 158 |
| GGGGGSGSS | 159 |
| GGGGSSGGS | 160 |
| GSSGGSGGG | 161 |
| GSSGGGGGS | 162 |
| GGSGGGEAAAK | 163 |
| GGSEAAAKGGG | 164 |
| GGGGGSEAAAK | 165 |
| GGGEAAAKGGS | 166 |
| EAAAKGGSGGG | 167 |
| EAAAKGGGGGS | 168 |
| GGSGGGPAP | 169 |
| GGSPAPGGG | 170 |
| GGGGGSPAP | 171 |
| GGGPAPGGS | 172 |
| PAPGGSGGG | 173 |
| PAPGGGGGS | 174 |
| GGSGSSEAAAK | 175 |
| GGSEAAAKGSS | 176 |
| GSSGGSEAAAK | 177 |
| GSSEAAAKGGS | 178 |
| EAAAKGGSGSS | 179 |
| EAAAKGSSGGS | 180 |
| GGSGSSPAP | 181 |
| GGSPAPGSS | 182 |
| GSSGGSPAP | 183 |
| GSSPAPGGS | 184 |
| PAPGGSGSS | 185 |
| PAPGSSGGS | 186 |
| GGSEAAAKPAP | 187 |
| GGSPAPEAAAK | 188 |
| EAAAKGGSPAP | 189 |
| EAAAKPAPGGS | 190 |
| PAPGGSEAAAK | 191 |
| PAPEAAAKGGS | 192 |
| GGGGSSEAAAK | 193 |
| GGGEAAAKGSS | 194 |
| GSSGGGEAAAK | 195 |
| GSSEAAAKGGG | 196 |
| EAAAKGGGGSS | 197 |
| EAAAKGSSGGG | 198 |
| GGGGSSPAP | 199 |
| GGGPAPGSS | 200 |
| GSSGGGPAP | 201 |
| GSSPAPGGG | 202 |
| PAPGGGGSS | 203 |
| PAPGSSGGG | 204 |
| GGGEAAAKPAP | 205 |
| GGGPAPEAAAK | 206 |
| EAAAKGGGPAP | 207 |
| EAAAKPAPGGG | 208 |
| PAPGGGEAAAK | 209 |
| PAPEAAAKGGG | 210 |
| GSSEAAAKPAP | 211 |
| GSSPAPEAAAK | 212 |
| EAAAKGSSPAP | 213 |
| EAAAKPAPGSS | 214 |
| PAPGSSEAAAK | 215 |
| PAPEAAAKGSS | 216 |
| AEAAAKEAAAKEAAAKEAAAKALEAEAAAKEAAA | 217 |
| KEAAAKEAAAKA | |
| GGGGSEAAAKGGGGS | 218 |
| EAAAKGGGGSEAAAK | 219 |
| SGSETPGTSESATPES | 220 |
| GSAGSAAGSGEF | 221 |
| SGGSSGGSSGSETPGTSESATPESSGGSSGGSS | 222 |

[0379] In some embodiments, a linker of a gene modifying polypeptide comprises a motif chosen from: (SGGS)ₙ (SEQ ID NO: 25), (GGGS)ₙ (SEQ ID NO: 26), (GGGGS)ₙ (SEQ ID NO: 27), (G)ₙ, (EAAAK)ₙ(SEQ ID NO: 28), (GGS)ₙ, or (XP)ₙ.

### Gene Modifying Polypeptide Selection by Pooled Screening

[0380] Candidate gene modifying polypeptides may be screened to evaluate a candidate's gene editing ability. For example, an RNA gene modifying system designed for the targeted editing of a coding sequence in the human genome may be used. In certain embodiments, such a gene modifying system may be used in conjunction with a pooled screening approach.

[0381] For example, a library of gene modifying polypeptide candidates and a template guide RNA (tgRNA) may be introduced into mammalian cells to test the candidates' gene editing abilities by a pooled screening approach. In specific embodiments, a library of gene modifying polypeptide candidates is introduced into mammalian cells followed by introduction of the tgRNA into the cells.

[0382] Representative, non-limiting examples of mammalian cells that may be used in screening include HEK293T cells, U2OS cells, HeLa cells, HepG2 cells, Huh7 cells, K562 cells, or iPS cells.

[0383] A gene modifying polypeptide candidate may comprise 1) a Cas-nuclease, for example a wild-type Cas nuclease, e.g., a wild-type Cas9 nuclease, a mutant Cas nuclease, e.g., a Cas nickase, for example, a Cas9 nickase such as a Cas9 N863A nickase, or a Cas nuclease selected from Table 7 or 8, 2) a peptide linker, e.g., a sequence from Table 1 or 10, that may exhibit varying degrees of length, flexibility, hydrophobicity, and/or secondary structure; and 3) a reverse transcriptase (RT), e.g. an RT domain from Table 1 or 6. A gene modifying polypeptide candidate library comprises: a plurality of different gene modifying polypeptide candidates that differ from each other with respect to one, two or all three of the Cas nuclease, peptide linker or RT domain components, or a plurality of nucleic acid expression vectors that encode such gene modifying polypeptide candidates.

[0384] For screening of gene modifying polypeptide candidates, a two-component system may be used that comprises a gene modifying polypeptide component and a tgRNA component. A gene modifying component may comprise, for example, an expression vector, e.g., an expression plasmid or lentiviral vector, that encodes a gene modifying polypeptide candidate, for example, comprises a human codon-optimized nucleic acid that encodes a gene modifying polypeptide candidate, e.g., a Cas-linker-RT fusion as described above. In a particular embodiment, a lentiviral cassette is utilized that comprises: (i) a promoter for expression in mammalian cells, e.g., a CMV promoter; (ii) a gene modifying library candidate, e.g. a Cas-linker-RT fusion comprising a Cas nuclease of Table CC, a peptide linker of Table AA and an RT of Table BB, for example a Cas-linker-RT fusion as in Table 1; (iii) a self-cleaving polypeptide, e.g., a T2A peptide; (iv) a marker enabling selection in mammalian cells, e.g., a puromycin resistance gene; and (v) a termination signal, e.g., a poly A tail.

[0385] The tgRNA component may comprise a tgRNA or expression vector, e.g., an expression plasmid, that produces the tgRNA, for example, utilizes a U6 promoter to drive expression of the tgRNA, wherein the tgRNA is a non-coding RNA sequence that is recognized by Cas and localizes it to the genomic locus of interest, and that also templates reverse transcription of the desired edit into the genome by the RT domain.

[0386] To prepare a pool of cells expressing gene modifying polypeptide library candidates, mammalian cells, e.g., HEK293T or U2OS cells, may be transduced with pooled gene modifying polypeptide candidate expression vector preparations, e.g., lentiviral preparations, of the gene modifying candidate polypeptide library. In a particular embodiment, lentiviral plasmids are utilized, and HEK293 Lenti-X cells are seeded in 15 cm plates (˜12×10⁶ cells) prior to lentiviral plasmid transfection. In such an embodiment, lentiviral plasmid transfection may be performed using the Lentiviral Packaging Mix (Biosettia) and transfection of the plasmid DNA for the gene modifying candidate library is performed the following day using Lipofectamine 2000 and Opti-MEM media according to the manufacturer's protocol. In such an embodiment, extracellular DNA may be removed by a full media change the next day and virus-containing media may be harvested 48 hours after. Lentiviral media may be concentrated using Lenti-X Concentrator (TaKaRa Biosciences) and 5 mL lentiviral aliquots may be made and stored at −80° C. Lentiviral titering is performed by enumerating colony forming units post-selection, e.g., post Puromycin selection.

[0387] For monitoring gene editing of a target DNA, mammalian cells, e.g., HEK293T or U2OS cells, carrying a target DNA may be utilized. In other embodiments for monitoring gene editing of a target DNA, mammalian cells, e.g., HEK293T or U2OS cells, carrying a target DNA genomic landing pad may be utilized. In particular embodiments, the target DNA genomic landing pad may comprise a gene to be edited for treatment of a disease or disorder of interest. In other particular embodiments, the target DNA is a gene sequence that expresses a protein that exhibits detectable characteristics that may be monitored to determine whether gene editing has occurred. For example, in certain embodiments, a blue fluorescence protein (BFP)- or green fluorescence protein (GFP)-expressing genomic landing pad is utilized. In certain embodiments, mammalian cells, e.g., HEK293T or U2OS cells, comprising a target DNA, e.g., a target DNA genomic landing pad, are seeded in culture plates at 500×-3000× cells per gene modifying library candidate and transduced at a 0.2-0.3 multiplicity of infection (MOI) to minimize multiple infections per cell. Puromycin (2.5 ug/mL) may be added 48 hours post infection to allow for selection of infected cells. In such an embodiment, cells may be kept under puromycin selection for at least 7 days and then scaled up for tgRNA introduction, e.g., tgRNA electroporation.

[0388] To ascertain whether gene editing occurs, mammalian cells containing a target DNA to be edited may be infected with gene modifying polypeptide library candidates then transfected with tgRNA designed for use in editing of the target DNA. Subsequently, the cells may be analyzed to determine whether editing of the target locus has occurred according to the designed outcome, or whether no editing or imperfect editing has occurred, e.g., by using cell sorting and sequence analysis.

[0389] In a particular embodiment, to ascertain whether genome editing occurs, BFP- or GFP-expressing mammalian cells, e.g., HEK293T or U20S cells, may be infected with gene modifying library candidates and then transfected or electroporated with tgRNA plasmid or RNA, e.g., by electroporation of 250,000 cells/well with 200 ng of a tgRNA plasmid designed to convert BFP-to-GFP or GFP-to-BFP, at a cell count ensuring >250×-1000× coverage per library candidate. In such an embodiment, the genome-editing capacity of the various constructs in this assay may be assessed by sorting the cells by Fluorescence-Activated Cell Sorting (FACS) for expression of the color-converted fluorescent protein (FP) at 4-10 days post-electroporation. Cells are sorted and harvested as distinct populations of unedited cells (exhibiting original florescence protein signal), edited cells (exhibiting converted fluorescence protein signal), and imperfect edit (exhibiting no florescence protein signal) cells. A sample of unsorted cells may also be harvested as the input population to determine candidate enrichment during analysis.

[0390] To determine which gene modifying library candidates exhibit genome-editing capacity in an assay, genomic DNA (gDNA) is harvested from the sorted cell populations, and analyzed by sequencing the gene modifying library candidates in each population. Briefly, gene modifying candidates may be amplified from the genome using primers specific to the gene modifying polypeptide expression vector, e.g., the lentiviral cassette, amplified in a second round of PCR to dilute genomic DNA, and then sequenced, for example, sequenced by a next-generation sequencing platform. After quality control of sequencing reads, reads of at least about 1500 nucleotides and generally no more than about 3200 nucleotides are mapped to the gene modifying polypeptide library sequences and those containing a minimum of about an 80% match to a library sequence are considered to be successfully aligned to a given candidate for purposes of this pooled screen. In order to identify candidates capable of performing gene editing in the assay, e.g., the BFP-to-GFP or GFP-to-BFP edit, the read count of each library candidate in the edited population is compared to its read count in the initial, unsorted population.

[0391] For purposes of pooled screening, gene modifying candidates with genome-editing capacity are identified based on enrichment in the edited (converted FP) population relative to unsorted (input) cells. In some embodiments, an enrichment of at least 1.0, 1.5, 2.0, 2.5, 3.0, 4.0, 5.0, 6.0, 7.0, 8.0, 9.0, 10, 15, 20, 25, 30, 40, 50, 60, 70, 80, 90, or at least 100-fold over the input indicates potentially useful gene editing activity, e.g., at least 2-fold enrichment. In some embodiments, the enrichment is converted to a log-value by taking the log base 2 of the enrichment ratio. In some embodiments, a log 2 enrichment score of at least 0, 1, 2, 3, 4, 5, 5.5, 6.0, 6.2, 6.3, 6.4, 6.5, or at least 6.6 indicates potentially useful gene editing activity, e.g., a log 2 enrichment score of at least 1.0. In particular embodiments, enrichment values observed for gene modifying candidates may be compared to enrichment values observed under similar conditions utilizing a reference, e.g., Element ID No: 17380.

[0392] In some embodiments, multiple tgRNAs may be used to screen the gene modifying candidate library. In particular embodiments, a plurality of tgRNAs may be utilized to optimize template/Cas-linker-RT fusion pairs, e.g., for gene editing of particular target genes, for example, gene targets for the treatment of disease. In specific embodiments, a pooled approach to screening gene modifying candidates may be performed using a multiplicity of different tgRNAs in an arrayed format.

[0393] In some embodiments, multiple types of edits, e.g., insertions, substitutions, and/or deletions of different lengths, may be used to screen the gene modifying candidate library.

[0394] In some embodiments, multiple target sequences, e.g., different fluorescent proteins, may be used to screen the gene modifying candidate library. In some embodiments, multiple target sequences, e.g., different fluorescent proteins, may be used to screen the gene modifying candidate library. In some embodiments, multiple cell types, e.g., HEK293T or U2OS, may be used to screen the gene modifying candidate library. The person of ordinary skill in the art will appreciate that a given candidate may exhibit altered editing capacity or even the gain or loss of any observable or useful activity across different conditions, including tgRNA sequence (e.g., nucleotide modifications, PBS length, RT template length), target sequence, target location, type of edit, location of mutation relative to the first-strand nick of the gene modifying polypeptide, or cell type. Thus, in some embodiments, gene modifying library candidates are screened across multiple parameters, e.g., with at least two distinct tgRNAs in at least two cell types, and gene editing activity is identified by enrichment in any single condition. In other embodiments, a candidate with more robust activity across different tgRNA and cell types is identified by enrichment in at least two conditions, e.g., in all conditions screened. For clarity, candidates found to exhibit little to no enrichment under any given condition are not assumed to be inactive across all conditions and may be screened with different parameters or reconfigured at the polypeptide level, e.g., by swapping, shuffling, or evolving domains (e.g., RT domain), linkers, or other signals (e.g., NLS).

### Sequences of Exemplary Cas9-Linker-RT Fusions

[0395] In some embodiments, a gene modifying polypeptide comprises a linker sequence and an RT sequence. In some embodiments, a gene modifying polypeptide comprises a linker sequence as listed in Table 1, or an amino acid sequence having at least 75%, 80%, 85%, 90%, 95%, 96%, 97%, 98%, or 99% identity thereto. In some embodiments, a gene modifying polypeptide comprises the amino acid sequence of an RT domain as listed in Table 1, or an amino acid sequence having at least 75%, 80%, 85%, 90%, 95%, 96%, 97%, 98%, or 99% identity thereto. In some embodiments, a gene modifying polypeptide comprises a linker sequence as listed in Table 1, or an amino acid sequence having at least 75%, 80%, 85%, 90%, 95%, 96%, 97%, 98%, or 99% identity thereto; and the amino acid sequence of an RT domain as listed in Table 1, or an amino acid sequence having at least 75%, 80%, 85%, 90%, 95%, 96%, 97%, 98%, or 99% identity thereto. In some embodiments, a gene modifying polypeptide comprises: (i) a linker sequence as listed in a row of Table 1, or an amino acid sequence having at least 75%, 80%, 85%, 90%, 95%, 96%, 97%, 98%, or 99% identity thereto; and (ii) the amino acid sequence of an RT domain as listed in the same row of Table 1, or an amino acid sequence having at least 75%, 80%, 85%, 90%, 95%, 96%, 97%, 98%, or 99% identity thereto. For each RT domain named in Table 1, the corresponding amino acid sequence can be found in Table 6 herein.

### Dimerization Domains

[0396] In some embodiments, a gene modifying system as described herein comprises a DNA binding domain (DBD), e.g., comprising a Cas domain (e.g., a Cas9 domain, e.g., an nCas9 or dCas9 domain); an RNA binding domain (RBD); and a retroviral reverse transcriptase (RT) domain. In some embodiments, the DBD is attached to the RBD via binding between two dimerization domains. In some embodiments, the DBD is attached to the RT domain via binding between two dimerization domains. In some embodiments, the RT domain is attached to the RBD via binding between two dimerization domains.

[0397] In some embodiments, a pair of dimerization domains comprised in a gene modifying polypeptide or complex as described herein can be induced to dimerize by a compound (e.g., a small molecule). In some embodiments, a pair of dimerization domains comprised in a gene modifying polypeptide or complex as described herein can be induced to dimerize by exposure to light (e.g., of a specific color and/or wavelength). In some embodiments, a pair of dimerization domains comprised in a gene modifying polypeptide or complex as described herein comprise a Chain A sequence (or a sequence having at least 75%, 80%, 85%, 90%, 95%, 96%, 97%, 98%, or 99% identity thereto) and a Chain B sequence (or a sequence having at least 75%, 80%, 85%, 90%, 95%, 96%, 97%, 98%, or 99% identity thereto), as listed in a single row of Table 34. In embodiments, the pair of dimerization domains can be induced by the inducer listed in the same row of Table 34.

TABLE 34
Exemplary chemical- or light-induced dimerization domains

| | chain A | | Exemplary | | chain B | | Exemplary | |
|---|---|---|---|---|---|---|---|---|
| inducer(s) | name | chain A sequence | chain A source | SEQ ID NO: | name | chain B sequence | chain B source | SEQ ID NO: |
| rapamycin/rapalog | FKBP | GVQVETISPGDGRTFPKRGQTC | snapgene | 20361 | FRB | ILWHEMWHEGLEEASRLYFG | snapgene | 20372 |
| | | VVHYTGMLEDGKKFDSSRDRNK | | | | ERNVKGMFEVLEPLHAMMER | | |
| | | PFKFMLGKQEVIRGWEEGVAQM | | | | GPQTLKETSFNQAYGRDLME | | |
| | | SVGQRAKLTISPDYAYGATGHP | | | | AQEWCRKYMKSGNVKDLTQA | | |
| | | GIIPPHATLVFDVELLKLE | | | | WDLYYHVFRRISK | | |
| rapamycin/rapalog | FKBP | GVQVETISPGDGRTFPKRGQTC | snapgene | 20361 | FRB | EMWHEGLEEASRLYFGERNV | snapgene | 20373 |
| | | VVHYTGMLEDGKKFDSSRDRNK | | | | KGMFEVLEPLHAMMERGPQT | | |
| | | PFKFMLGKQEVIRGWEEGVAQM | | | | LKETSFNQAYGRDLMEAQEW | | |
| | | SVGQRAKLTISPDYAYGATGHP | | | | CRKYMKSGNVKDLTQAWDLY | | |
| | | GIIPPHATLVFDVELLKLE | | | | YHVFRRISKQL | | |
| rapamycin/rapalog | FKBP | GVQVETISPGDGRTFPKRGQTC | snapgene | 20361 | FRB* | ILWHEMWHEGLEEASRLYFG | addgene | 20374 |
| | | VVHYTGMLEDGKKFDSSRDRNK | | | | ERNVKGMFEVLEPLHAMMER | 108836 | |
| | | PFKFMLGKQEVIRGWEEGVAQM | | | | GPQTLKETSFNQAYGRDLME | (pBW1308) | |
| | | SVGQRAKLTISPDYAYGATGHP | | | | AQEWCRKYMKSGNVKDLLQA | | |
| | | GIIPPHATLVFDVELLKLE | | | | WDLYYHVFRRIS | | |
| rapamycin/rapalog | FKBP | GVQVETISPGDGRTFPKRGQTC | snapgene | 20361 | FRB* | ILWHEMWHEGLEEASRLYFG | snapgene | 20375 |
| | | VVHYTGMLEDGKKFDSSRDRNK | | | | ERNVKGMFEVLEPLHAMMER | | |
| | | PFKFMLGKQEVIRGWEEGVAQM | | | | GPQTLKETSFNQAYGRDLME | | |
| | | SVGQRAKLTISPDYAYGATGHP | | | | AQEWCRKYMKSGNVKDLLQA | | |
| | | GIIPPHATLVFDVELLKLE | | | | WDLYYHVFRRISK | | |
| rapamycin/rapalog | FKBP | SRGVQVETISPGDGRTFPKRGQ | addgene | 20362 | FRB | ILWHEMWHEGLEEASRLYFG | snapgene | 20372 |
| | | TCVVHYTGMLEDGKKFDSSRDR | 108837 | | | ERNVKGMFEVLEPLHAMMER | | |
| | | NKPFKFMLGKQEVIRGWEEGVA | (pBHW1309) | | | GPQTLKETSFNQAYGRDLME | | |
| | | QMSVGQRAKLTISPDYAYGATG | | | | AQEWCRKYMKSGNVKDLTQA | | |
| | | HPGIIPPHATLVFDVELLKLE | | | | WDLYYHVFRRISK | | |
| rapamycin/rapalog | FKBP | SRGVQVETISPGDGRTFPKRGQ | addgene | 20362 | FRB | EMWHEGLEEASRLYFGERNV | snapgene | 20373 |
| | | TCVVHYTGMLEDGKKFDSSRDR | 108837 | | | KGMFEVLEPLHAMMERGPQT | | |
| | | NKPFKFMLGKQEVIRGWEEGVA | (pBHW1309) | | | LKETSFNQAYGRDLMEAQEW | | |
| | | QMSVGQRAKLTISPDYAYGATG | | | | CRKYMKSGNVKDLTQAWDLY | | |
| | | HPGIIPPHATLVFDVELLKLE | | | | YHVFRRISKQL | | |
| rapamycin/rapalog | FKBP | SRGVQVETISPGDGRTFPKRGQ | addgene | 20362 | FRB* | ILWHEMWHEGLEEASRLYFG | addgene | 20374 |
| | | TCVVHYTGMLEDGKKFDSSRDR | 108837 | | | ERNVKGMFEVLEPLHAMMER | 108836 | |
| | | NKPFKFMLGKQEVIRGWEEGVA | (pBHW1309) | | | GPQTLKETSFNQAYGRDLME | (pBW1308) | |
| | | QMSVGQRAKLTISPDYAYGATG | | | | AQEWCRKYMKSGNVKDLLQA | | |
| | | HPGIIPPHATLVFDVELLKLE | | | | WDLYYHVFRRIS | | |
| rapamycin/rapalog | FKBP | SRGVQVETISPGDGRTFPKRGQ | addgene | 20362 | FRB* | ILWHEMWHEGLEEASRLYFG | snapgene | 20375 |
| | | TCVVHYTGMLEDGKKFDSSRDR | 108837 | | | ERNVKGMFEVLEPLHAMMER | | |
| | | NKPFKFMLGKQEVIRGWEEGVA | (pBHW1309) | | | GPQTLKETSFNQAYGRDLME | | |
| | | QMSVGQRAKLTISPDYAYGATG | | | | AQEWCRKYMKSGNVKDLLQA | | |
| | | HPGIIPPHATLVFDVELLKLE | | | | WDLYYHVFRRISK | | |
| abscisic | ABI | PLYGFTSICGRRPEMEAAVSTI | addgene | 20363 | PYL | APTQDEFTQLSQSIAEFHTY | addgene | 20376 |
| acid | | PRFLQSSSGSMLDGRFDPQSAA | 135985 | | | QLGNGRCSSLLAQRIHAPPE | 135988 | |
| | | HFFGVYDGHGGSQVANYCRERM | (TL) | | | TVWSVVRRFDRPQIYKHFIK | (TL) | |
| | | HLALAEEIAKEKPMLCDGDTWL | | | | SCNVSEDFEMRVGCTRDVNV | | |
| | | EKWKKALFNSFLRVDSEIESVA | | | | ISGLPANTSRERLDLLDDDR | | |
| | | PETVGSTSVVAVVFPSHIFVAN | | | | RVTGFSITGGEHRLRNYKSV | | |
| | | CGDSRAVLCRGKTALPLSVDHK | | | | TTVHRFEKEEEEERIWTVVL | | |
| | | PDREDEAARIEAAGGKVIQWNG | | | | ESYVVDVPEGNSEEDTRLFA | | |
| | | ARVFGVLAMSRSIGDRYLKPSI | | | | DTVIRLNLQKLASITEAMN | | |
| | | IPDPEVTAVKRVKEDDCLILAS | | | | | | |
| | | DGVWDVMTDEEACEMARKRILL | | | | | | |
| | | WHKKNAVAGDASLLADERRKEG | | | | | | |
| | | KDPAAMSAAEYLSKLAIQRGSK | | | | | | |
| | | DNISVVVVDLK | | | | | | |
| abscisic | ABI | PLYGFTSICGRRPEMEAAVSTI | addgene | 20363 | PYL | APTQDEFTQLSQSIAEFHTY | addgene | 20377 |
| acid | | PRFLQSSSGSMLDGRFDPQSAA | 135985 | | | QLGNGRCSSLLAQRIHAPPE | 108841 | |
| | | HFFGVYDGHGGSQVANYCRERM | (TL) | | | TVWSVVRRFDRPQIYKHFIK | (pBW1313) | |
| | | HLALAEEIAKEKPMLCDGDTWL | | | | SCNVSEDFEMRVGCTRDVNV | | |
| | | EKWKKALFNSFLRVDSEIESVA | | | | ISGLPANTSRERLDLLDDDR | | |
| | | PETVGSTSVVAVVFPSHIFVAN | | | | RVTGFSITGGEHRLRNYKSV | | |
| | | CGDSRAVLCRGKTALPLSVDHK | | | | TTVHRFEKEEEEERIWTVVL | | |
| | | PDREDEAARIEAAGGKVIQWNG | | | | ESYVVDVPEGNSEEDTRLFA | | |
| | | ARVFGVLAMSRSIGDRYLKPSI | | | | DTVIRLNLQKLASITEAMNY | | |
| | | IPDPEVTAVKRVKEDDCLILAS | | | | PYDVPDYA | | |
| | | DGVWDVMTDEEACEMARKRILL | | | | | | |
| | | WHKKNAVAGDASLLADERRKEG | | | | | | |
| | | KDPAAMSAAEYLSKLAIQRGSK | | | | | | |
| | | DNISVVVVDLK | | | | | | |
| abscisic | ABI | PLYGFTSICGRRPEMEDAVSTI | addgene | 20364 | PYL | APTQDEFTQLSQSIAEFHTY | addgene | 20376 |
| acid | | PRFLQSSSGSMLDGRFDPQSAA | 108839 | | | QLGNGRCSSLLAQRIHAPPE | 135988 | |
| | | HFFGVYDGHGGSQVANYCRERM | (pBW1311) | | | TVWSVVRRFDRPQIYKHFIK | (TL) | |
| | | HLALAEEIAKEKPMLCDGDTWL | | | | SCNVSEDFEMRVGCTRDVNV | | |
| | | EKWKKALFNSFLRVDSEIGSVA | | | | ISGLPANTSRERLDLLDDDR | | |
| | | PETVGSTSVVAVVFPSHIFVAN | | | | RVTGFSITGGEHRLRNYKSV | | |
| | | CGDSRAVLCRGKTALPLSVDHK | | | | TTVHRFEKEEEEERIWTVVL | | |
| | | PDREDEAARIEAAGGKVIQWNG | | | | ESYVVDVPEGNSEEDTRLFA | | |
| | | ARVFGVLAMSRSIGDRYLKPSI | | | | DTVIRLNLQKLASITEAMN | | |
| | | IPDPEVTAVKRVKEDDCLILAS | | | | | | |
| | | DGVWDVMTDEEACEMARKRILL | | | | | | |
| | | WHKKNAVAGDASLLADERRKEG | | | | | | |
| | | KDPAAMSAAEYLSKLAIQRGSK | | | | | | |
| | | DNISVVVVDLK | | | | | | |
| abscisic | ABI | PLYGFTSICGRRPEMEDAVSTI | addgene | 20364 | PYL | APTQDEFTQLSQSIAEFHTY | addgene | 20377 |
| acid | | PRFLQSSSGSMLDGRFDPQSAA | 108839 | | | QLGNGRCSSLLAQRIHAPPE | 108841 | |
| | | HFFGVYDGHGGSQVANYCRERM | (pBW1311) | | | TVWSVVRRFDRPQIYKHFIK | (pBW1313) | |
| | | HLALAEEIAKEKPMLCDGDTWL | | | | SCNVSEDFEMRVGCTRDVNV | | |
| | | EKWKKALFNSFLRVDSEIGSVA | | | | ISGLPANTSRERLDLLDDDR | | |
| | | PETVGSTSVVAVVFPSHIFVAN | | | | RVTGFSITGGEHRLRNYKSV | | |
| | | CGDSRAVLCRGKTALPLSVDHK | | | | TTVHRFEKEEEEERIWTVVL | | |
| | | PDREDEAARIEAAGGKVIQWNG | | | | ESYVVDVPEGNSEEDTRLFA | | |
| | | ARVFGVLAMSRSIGDRYLKPSI | | | | DTVIRLNLQKLASITEAMNY | | |
| | | IPDPEVTAVKRVKEDDCLILAS | | | | PYDVPDYA | | |
| | | DGVWDVMTDEEACEMARKRILL | | | | | | |
| | | WHKKNAVAGDASLLADERRKEG | | | | | | |
| | | KDPAAMSAAEYLSKLAIQRGSK | | | | | | |
| | | DNISVVVVDLK | | | | | | |
| gibberellin/ | GAI | KRDHHHHHHQDKKTMMMNEEDD | addgene | 20365 | GID1 | AASDEVNLIESRTVVPLNTW | addgene | 20378 |
| GA3- | | GNGMDELLAVLGYKVRSSEMAD | 108845 | | | VLISNFKVAYNILRRPDGTF | 108843 | |
| AM | | VAQKLEQLEVMMSNVQEDDLSQ | (pBW2067) | | | NRHLAEYLDRKVTANANPVD | (pBW2065) | |
| (gibberellic | | LATETVHYNPAELYTWLDSMLT | | | | GVFSFDVLIDRRINLLSRVY | | |
| ester) | | DLN | | | | RPAYADQEQPPSILDLEKPV | | |
| | | | | | | DGDIVPVILFFHGGSFAHSS | | |
| | | | | | | ANSAIYDTLCRRLVGLCKCV | | |
| | | | | | | VVSVNYRRAPENPYPCAYDD | | |
| | | | | | | GWIALNWVNSRSWLKSKKDS | | |
| | | | | | | KVHIFLAGDSSGGNIAHNVA | | |
| | | | | | | LRAGESGIDVLGNILLNPMF | | |
| | | | | | | GGNERTESEKSLDGKYFVTV | | |
| | | | | | | RDRDWYWKAFLPEGEDREHP | | |
| | | | | | | ACNPFSPRGKSLEGVSFPKS | | |
| | | | | | | LVVVAGLDLIRDWQLAYAEG | | |
| | | | | | | LKKAGQEVKLMHLEKATVGF | | |
| | | | | | | YLLPNNNHFHNVMDEISAFV | | |
| | | | | | | NAEC | | |
| blue | CRY2 | KMDKKTIVWFRRDLRIEDNPAL | addgene | 20366 | CIBN | NGAIGGDLLLNFPDMSVLER | addgene | 20379 |
| light | | AAAAHEGSVFPVFIWCPEEEGQ | 135989 | | | QRAHLKYLNPTFDSPLAGFF | 135986 | |
| | | FYPGRASRWWMKQSLAHLSQSL | (TL) | | | ADSSMITGGEMDSYLSTAGL | (TL) | |
| | | KALGSDLTLIKTHNTISAILDC | | | | NLPMMYGETTVEGDSRLSIS | | |
| | | IRVTGATKVVFNHLYDPVSLVR | | | | PETTLGTGNFKAAKFDTETK | | |
| | | DHTVKEKLVERGISVQSYNGDL | | | | DCNEAAKKMTMNRDDLVEEG | | |
| | | LYEPWEIYCEKGKPFTSFNSYW | | | | EEEKSKITEQNNGSTKSIKK | | |
| | | KKCLDMSIESVMLPPPWRLMPI | | | | MKHKAKKEENNFSNDSSKVT | | |
| | | TAAAEAIWACSIEELGLENEAE | | | | KELEKTDYI | | |
| | | KPSNALLTRAWSPGWSNADKLL | | | | | | |
| | | NEFIEKQLIDYAKNSKKVVGNS | | | | | | |
| | | TSLLSPYLHFGEISVRHVFQCA | | | | | | |
| | | RMKQIIWARDKNSEGEESADLF | | | | | | |
| | | LRGIGLREYSRYICENFPFTHE | | | | | | |
| | | QSLLSHLRFFPWDADVDKFKAW | | | | | | |
| | | RQGRTGYPLVDAGMRELWATGW | | | | | | |
| | | MHNRIRVIVSSFAVKFLLLPWK | | | | | | |
| | | WGMKYFWDTLLDADLECDILGW | | | | | | |
| | | QYISGSIPDGHELDRLDNPALQ | | | | | | |
| | | GAKYDPEGEYIRQWLPELARLP | | | | | | |
| | | TEWIHHPWDAPLTVLKASGVEL | | | | | | |
| | | GTNYAKPIVDIDTARELLAKAI | | | | | | |
| | | SRTREAQIMIGAA | | | | | | |
| blue | CRY2 | KMDKKTIVWFRRDLRIEDNPAL | addgene | 20366 | CIBN | NGAIGGDLLLNFPDMSVLER | snapgene | 20380 |
| light | | AAAAHEGSVFPVFIWCPEEEGQ | 135989 | | | QRAHLKYLNPTFDSPLAGFF | | |
| | | FYPGRASRWWMKQSLAHLSQSL | (TL) | | | ADSSMITGGEMDSYLSTAGL | | |
| | | KALGSDLTLIKTHNTISAILDC | | | | NLPMMYGETTVEGDSRLSIS | | |
| | | IRVTGATKVVFNHLYDPVSLVR | | | | PETTLGTGNFKKRKFDTETK | | |
| | | DHTVKEKLVERGISVQSYNGDL | | | | DCNEKKKKMTMNRDDLVEEG | | |
| | | LYEPWEIYCEKGKPFTSFNSYW | | | | EEEKSKITEQNNGSTKSIKK | | |
| | | KKCLDMSIESVMLPPPWRLMPI | | | | MKHKAKKEENNFSNDSSKVT | | |
| | | TAAAEAIWACSIEELGLENEAE | | | | KELEKTDYI | | |
| | | KPSNALLTRAWSPGWSNADKLL | | | | | | |
| | | NEFIEKQLIDYAKNSKKVVGNS | | | | | | |
| | | TSLLSPYLHFGEISVRHVFQCA | | | | | | |
| | | RMKQIIWARDKNSEGEESADLF | | | | | | |
| | | LRGIGLREYSRYICENFPFTHE | | | | | | |
| | | QSLLSHLRFFPWDADVDKFKAW | | | | | | |
| | | RQGRTGYPLVDAGMRELWATGW | | | | | | |
| | | MHNRIRVIVSSFAVKFLLLPWK | | | | | | |
| | | WGMKYFWDTLLDADLECDILGW | | | | | | |
| | | QYISGSIPDGHELDRLDNPALQ | | | | | | |
| | | GAKYDPEGEYIRQWLPELARLP | | | | | | |
| | | TEWIHHPWDAPLTVLKASGVEL | | | | | | |
| | | GTNYAKPIVDIDTARELLAKAI | | | | | | |
| | | SRTREAQIMIGAA | | | | | | |
| blue | pMag | HTLYAPGGYDIMGYLRQIRNRP | snapgene, | 20367 | nMagHigh1 | HTLYAPGGYDIMGYLDQIGN | | 20381 |
| light | | NPQVELGPVDTSCALILCDLKQ | addgene | | | RPNPQVELGPVDTSCALILC | | |
| | | KDTPIVYASEAFLYMTGYSNAE | 108848 | | | DLKQKDTPIVYASEAFLYMT | | |
| | | VLGRNCRFLQSPDGMVKPKSTR | (pBW2655) | | | GYSNAEVLGRNCRFLQSPDG | | |
| | | KYVDSNTINTMRKAIDRNAEVQ | | | | MVKPKSTRKYVDSNTINTIR | | |
| | | VEVVNFKKNGQRFVNFLTMIPV | | | | KAIDRNAEVQVEVVNFKKNG | | |
| | | RDETGEYRYSMGFQCETE | | | | QRFVNFLTIIPVRDETGEYR | | |
| | | | | | | YSMGFQCETE | | |
| blue | pMag | HTLYAPGGYDIMGYLRQIRNRP | snapgene, | 20367 | nMag | HTLYAPGGYDIMGYLDQIGN | | 20382 |
| light | | NPQVELGPVDTSCALILCDLKQ | addgene | | | RPNPQVELGPVDTSCALILC | | |
| | | KDTPIVYASEAFLYMTGYSNAE | 108848 | | | DLKQKDTPIVYASEAFLYMT | | |
| | | VLGRNCRFLQSPDGMVKPKSTR | (pBW2655) | | | GYSNAEVLGRNCRFLQSPDG | | |
| | | KYVDSNTINTMRKAIDRNAEVQ | | | | MVKPKSTRKYVDSNTINTMR | | |
| | | VEVVNFKKNGQRFVNFLTMIPV | | | | KAIDRNAEVQVEVVNFKKNG | | |
| | | RDETGEYRYSMGFQCETE | | | | QRFVNFLTMIPVRDETGEYR | | |
| | | | | | | YSMGFQCETE | | |
| blue | pMagFast2 | HTLYAPGGYDIMGYLRQIRNRP | | 20368 | nMagHigh1 | HTLYAPGGYDIMGYLDQIGN | | 20381 |
| light | | NPQVELGPVDTSCALVLCDLKQ | | | | RPNPQVELGPVDTSCALILC | | |
| | | KDTPVVYASEAFLYMTGYSNAE | | | | DLKQKDTPIVYASEAFLYMT | | |
| | | VLGRNCRFLQSPDGMVKPKSTR | | | | GYSNAEVLGRNCRFLQSPDG | | |
| | | KYVDSNTINTMRKAIDRNAEVQ | | | | MVKPKSTRKYVDSNTINTIR | | |
| | | VEVVNFKKNGQRFVNFLTMIPV | | | | KAIDRNAEVQVEVVNFKKNG | | |
| | | RDETGEYRYSMGFQCETE | | | | QRFVNFLTIIPVRDETGEYR | | |
| | | | | | | YSMGFQCETE | | |
| blue | pMagFast2 | HTLYAPGGYDIMGYLRQIRNRP | | 20368 | nMag | HTLYAPGGYDIMGYLDQIGN | | 20382 |
| light | | NPQVELGPVDTSCALVLCDLKQ | | | | RPNPQVELGPVDTSCALILC | | |
| | | KDTPVVYASEAFLYMTGYSNAE | | | | DLKQKDTPIVYASEAFLYMT | | |
| | | VLGRNCRFLQSPDGMVKPKSTR | | | | GYSNAEVLGRNCRFLQSPDG | | |
| | | KYVDSNTINTMRKAIDRNAEVQ | | | | MVKPKSTRKYVDSNTINTMR | | |
| | | VEVVNFKKNGQRFVNFLTMIPV | | | | KAIDRNAEVQVEVVNFKKNG | | |
| | | RDETGEYRYSMGFQCETE | | | | QRFVNFLTMIPVRDETGEYR | | |
| | | | | | | YSMGFQCETE | | |
| red light | PhyB | VSGVGGSGGGRGGGRGGEEEPS | pBW2682 | 20369 | PIF6 | MFLPTDYCCRLSDQEYMELV | pBW2684 | 20383 |
| | | SSHTPNNRRGGEQAQSSGTKSL | | | | FENGQILAKGQRSNVSLHNQ | | |
| | | RPRSNTESMSKAIQQYTVDARL | | | | RTKSIMDLYEAEYNEDFMKS | | |
| | | HAVFEQSGESGKSFDYSQSLKT | | | | IIHGGGGAITNLGDTQVVPQ | | |
| | | TTYGSSVPEQQITAYLSRIQRG | | | | SHVAAAHETNMLESNKHVD | | |
| | | GYIQPFGCMIAVDESSFRIIGY | | | | | | |
| | | SENAREMLGIMPQSVPTLEKPE | | | | | | |
| | | ILAMGTDVRSLFTSSSSILLER | | | | | | |
| | | AFVAREITLLNPVWIHSKNTGK | | | | | | |
| | | PFYAILHRIDVGVVIDLEPART | | | | | | |
| | | EDPALSIAGAVQSQKLAVRAIS | | | | | | |
| | | QLQALPGGDIKLLCDTVVESVR | | | | | | |
| | | DLTGYDRVMVYKFHEDEHGEVV | | | | | | |
| | | AESKRDDLEPYIGLHYPATDIP | | | | | | |
| | | QASRFLFKQNRVRMIVDCNATP | | | | | | |
| | | VLVVQDDRLTQSMCLVGSTLRA | | | | | | |
| | | PHGCHSQYMANMGSIASLAMAV | | | | | | |
| | | IINGNEDDGSNVASGRSSMRLW | | | | | | |
| | | GLVVCHHTSSRCIPFPLRYACE | | | | | | |
| | | FLMQAFGLQLNMELQLALQMSE | | | | | | |
| | | KRVLRTQTLLCDMLLRDSPAGI | | | | | | |
| | | VTQSPSIMDLVKCDGAAFLYHG | | | | | | |
| | | KYYPLGVAPSEVQIKDVVEWLL | | | | | | |
| | | ANHADSTGLSTDSLGDAGYPGA | | | | | | |
| | | AALGDAVCGMAVAYITKRDFLF | | | | | | |
| | | WFRSHTAKEIKWGGAKHHPEDK | | | | | | |
| | | DDGQRMHPRSSFQAFLEVVKSR | | | | | | |
| | | SQPWETAEMDAIHSLQLILRDS | | | | | | |
| | | FKESEAAMNSKVVDGVVQPCRD | | | | | | |
| | | MAGEQGIDELGAVAREMVRLIE | | | | | | |
| | | TATVPIFAVDAGGCINGWNAKI | | | | | | |
| | | AELTGLSVEEAMGKSLVSDLIY | | | | | | |
| | | KENEATVNKLLSRALRGDEEKN | | | | | | |
| | | VEVKLKTFSPELQGKAVFVVVN | | | | | | |
| | | ACSSKDYLNNIVGVCFVGQDVT | | | | | | |
| | | SQKIVMDKFINIQGDYKAIVHS | | | | | | |
| | | PNPLIPPIFAADENTCCLEWNM | | | | | | |
| | | AMEKLTGWSRSEVIGKMIVGEV | | | | | | |
| | | FGSCCMLKGPDALTKFMIVLHN | | | | | | |
| | | AIGGQDTDKFPFPFFDRNGKFV | | | | | | |
| | | QALLTANKRVSLEGKVIGAFCF | | | | | | |
| | | LQIPS | | | | | | |
| red light | PhyB | VSGVGGSGGGRGGGRGGEEEPS | pBW2682 | 20369 | PIF6 | MFLPTDYCCRLSDQEYMELV | pBW2684 | 20383 |
| | | SSHTPNNRRGGEQAQSSGTKSL | | | | FENGQILAKGQRSNVSLHNQ | | |
| | | RPRSNTESMSKAIQQYTVDARL | | | | RTKSIMDLYEAEYNEDFMKS | | |
| | | HAVFEQSGESGKSFDYSQSLKT | | | | IIHGGGGAITNLGDTQVVPQ | | |
| | | TTYGSSVPEQQITAYLSRIQRG | | | | SHVAAAHETNMLESNKHVD | | |
| | | GYIQPFGCMIAVDESSFRIIGY | | | | | | |
| | | SENAREMLGIMPQSVPTLEKPE | | | | | | |
| | | ILAMGTDVRSLFTSSSSILLER | | | | | | |
| | | AFVAREITLLNPVWIHSKNTGK | | | | | | |
| | | PFYAILHRIDVGVVIDLEPART | | | | | | |
| | | EDPALSIAGAVQSQKLAVRAIS | | | | | | |
| | | QLQALPGGDIKLLCDTVVESVR | | | | | | |
| | | DLTGYDRVMVYKFHEDEHGEVV | | | | | | |
| | | AESKRDDLEPYIGLHYPATDIP | | | | | | |
| | | QASRFLFKQNRVRMIVDCNATP | | | | | | |
| | | VLVVQDDRLTQSMCLVGSTLRA | | | | | | |
| | | PHGCHSQYMANMGSIASLAMAV | | | | | | |
| | | IINGNEDDGSNVASGRSSMRLW | | | | | | |
| | | GLVVCHHTSSRCIPFPLRYACE | | | | | | |
| | | FLMQAFGLQLNMELQLALQMSE | | | | | | |
| | | KRVLRTQTLLCDMLLRDSPAGI | | | | | | |
| | | VTQSPSIMDLVKCDGAAFLYHG | | | | | | |
| | | KYYPLGVAPSEVQIKDVVEWLL | | | | | | |
| | | ANHADSTGLSTDSLGDAGYPGA | | | | | | |
| | | AALGDAVCGMAVAYITKRDFLF | | | | | | |
| | | WFRSHTAKEIKWGGAKHHPEDK | | | | | | |
| | | DDGQRMHPRSSFQAFLEVVKSR | | | | | | |
| | | SQPWETAEMDAIHSLQLILRDS | | | | | | |
| | | FKESEAAMNSKVVDGVVQPCRD | | | | | | |
| | | MAGEQGIDELGAVAREMVRLIE | | | | | | |
| | | TATVPIFAVDAGGCINGWNAKI | | | | | | |
| | | AELTGLSVEEAMGKSLVSDLIY | | | | | | |
| | | KENEATVNKLLSRALRGDEEKN | | | | | | |
| | | VEVKLKTFSPELQGKAVFVVVN | | | | | | |
| | | ACSSKDYLNNIVGVCFVGQDVT | | | | | | |
| | | SQKIVMDKFINIQGDYKAIVHS | | | | | | |
| | | PNPLIPPIFAADENTCCLEWNM | | | | | | |
| | | AMEKLTGWSRSEVIGKMIVGEV | | | | | | |
| | | FGSCCMLKGPDALTKFMIVLHN | | | | | | |
| | | AIGGQDTDKFPFPFFDRNGKFV | | | | | | |
| | | QALLTANKRVSLEGKVIGAFCF | | | | | | |
| | | LQIPS | | | | | | |
| red light | PhyBNT | VSGVGGSGGGRGGGRGGEEEPS | pBW2682 | 20370 | PIF6 | MFLPTDYCCRLSDQEYMELV | pBW2684 | 20383 |
| | | SSHTPNNRRGGEQAQSSGTKSL | | | | FENGQILAKGQRSNVSLHNQ | | |
| | | RPRSNTESMSKAIQQYTVDARL | | | | RTKSIMDLYEAEYNEDFMKS | | |
| | | HAVFEQSGESGKSFDYSQSLKT | | | | IIHGGGGAITNLGDTQVVPQ | | |
| | | TTYGSSVPEQQITAYLSRIQRG | | | | SHVAAAHETNMLESNKHVD | | |
| | | GYIQPFGCMIAVDESSFRIIGY | | | | | | |
| | | SENAREMLGIMPQSVPTLEKPE | | | | | | |
| | | ILAMGTDVRSLFTSSSSILLER | | | | | | |
| | | AFVAREITLLNPVWIHSKNTGK | | | | | | |
| | | PFYAILHRIDVGVVIDLEPART | | | | | | |
| | | EDPALSIAGAVQSQKLAVRAIS | | | | | | |
| | | QLQALPGGDIKLLCDTVVESVR | | | | | | |
| | | DLTGYDRVMVYKFHEDEHGEVV | | | | | | |
| | | AESKRDDLEPYIGLHYPATDIP | | | | | | |
| | | QASRFLFKQNRVRMIVDCNATP | | | | | | |
| | | VLVVQDDRLTQSMCLVGSTLRA | | | | | | |
| | | PHGCHSQYMANMGSIASLAMAV | | | | | | |
| | | IINGNEDDGSNVASGRSSMRLW | | | | | | |
| | | GLVVCHHTSSRCIPFPLRYACE | | | | | | |
| | | FLMQAFGLQLNMELQLALQMSE | | | | | | |
| | | KRVLRTQTLLCDMLLRDSPAGI | | | | | | |
| | | VTQSPSIMDLVKCDGAAFLYHG | | | | | | |
| | | KYYPLGVAPSEVQIKDVVEWLL | | | | | | |
| | | ANHADSTGLSTDSLGDAGYPGA | | | | | | |
| | | AALGDAVCGMAVAYITKRDFLF | | | | | | |
| | | WFRSHTAKEIKWGGAKHHPEDK | | | | | | |
| | | DDGQRMHPRSSFQAFLEVVKSR | | | | | | |
| | | SQPWETAEMDAIHSLQLILRDS | | | | | | |
| | | FKES | | | | | | |
| red light | PhyBNT | VSGVGGSGGGRGGGRGGEEEPS | pBW2682 | 20370 | PIF6 | MFLPTDYCCRLSDQEYMELV | pBW2684 | 20383 |
| | | SSHTPNNRRGGEQAQSSGTKSL | | | | FENGQILAKGQRSNVSLHNQ | | |
| | | RPRSNTESMSKAIQQYTVDARL | | | | RTKSIMDLYEAEYNEDFMKS | | |
| | | HAVFEQSGESGKSFDYSQSLKT | | | | IIHGGGGAITNLGDTQVVPQ | | |
| | | TTYGSSVPEQQITAYLSRIQRG | | | | SHVAAAHETNMLESNKHVD | | |
| | | GYIQPFGCMIAVDESSFRIIGY | | | | | | |
| | | SENAREMLGIMPQSVPTLEKPE | | | | | | |
| | | ILAMGTDVRSLFTSSSSILLER | | | | | | |
| | | AFVAREITLLNPVWIHSKNTGK | | | | | | |
| | | PFYAILHRIDVGVVIDLEPART | | | | | | |
| | | EDPALSIAGAVQSQKLAVRAIS | | | | | | |
| | | QLQALPGGDIKLLCDTVVESVR | | | | | | |
| | | DLTGYDRVMVYKFHEDEHGEVV | | | | | | |
| | | AESKRDDLEPYIGLHYPATDIP | | | | | | |
| | | QASRFLFKQNRVRMIVDCNATP | | | | | | |
| | | VLVVQDDRLTQSMCLVGSTLRA | | | | | | |
| | | PHGCHSQYMANMGSIASLAMAV | | | | | | |
| | | IINGNEDDGSNVASGRSSMRLW | | | | | | |
| | | GLVVCHHTSSRCIPFPLRYACE | | | | | | |
| | | FLMQAFGLQLNMELQLALQMSE | | | | | | |
| | | KRVLRTQTLLCDMLLRDSPAGI | | | | | | |
| | | VTQSPSIMDLVKCDGAAFLYHG | | | | | | |
| | | KYYPLGVAPSEVQIKDVVEWLL | | | | | | |
| | | ANHADSTGLSTDSLGDAGYPGA | | | | | | |
| | | AALGDAVCGMAVAYITKRDFLF | | | | | | |
| | | WFRSHTAKEIKWGGAKHHPEDK | | | | | | |
| | | DDGQRMHPRSSFQAFLEVVKSR | | | | | | |
| | | SQPWETAEMDAIHSLQLILRDS | | | | | | |
| | | FKES | | | | | | |
| near | PpsR2 | ASKSVHADITLLLDMEGVIREA | pBW278 | 20371 | BphP1 | VAGHASGSPAFGTADLSNCE | pBW2779 | 20384 |
| infrared | | TLSPTMAAESVDGWLGRRWSDI | 0 | | | REEIHLAGSIQPHGALLVVS | | |
| light | | AGAEGGDKVRRMVEDARRSGIS | | | | EPDHRIIQASANAAEFLNLG | | |
| | | AFRQINQPFPSGVEIPIEFTTM | | | | SVLGVPLAEIDGDLLIKILP | | |
| | | LLGDRTGMIAVGKNMQAVTELH | | | | HLDPTAEGMPVAVRCRIGNP | | |
| | | SRLIAAQQAMERDYWRLRELET | | | | STEYDGLMHRPPEGGLIIEL | | |
| | | RYRLVFDAAADAVMIVSAGDMR | | | | ERAGPPIDLSGTLAPALERI | | |
| | | IVEANRAAVNAISRVERGNDDL | | | | RTAGSLRALCDDTALLFQQC | | |
| | | AGRDFLAEVAAADRDAVRDMLA | | | | TGYDRVMVYRFDEQGHGEVF | | |
| | | QVRQRGTALSVLVHLGRYDRAW | | | | SERHVPGLESYFGNRYPSSD | | |
| | | MLRGSLMSSERRQVFLLHFTPV | | | | IPQMARRLYERQRVRVLVDV | | |
| | | TTTPAIDDVDDDAVLRGLIDRI | | | | SYQPVPLEPRLSPLTGRDLD | | |
| | | PDGFVALDSEGVVRHANQAFLD | | | | MSGCFLRSMSPIHLQYLKNM | | |
| | | LVQIGSKPAAVGRSLGVWMGRP | | | | GVRATLVVSLVVGGKLWGLV | | |
| | | GADLSSLLTLLRRYKTVRLFQT | | | | ACHHYLPRFIHFELRAICEL | | |
| | | TIRGELGTETEVEVSAVDGEDD | | | | LAEAIATRITALESFAQSQS | | |
| | | QYIGVLMRNVARRLDAADDHDA | | | | ELFVQRLEQRMIEAITREGD | | |
| | | LRQALGPISKQLGRSSLRKLVK | | | | WRAAIFDTSQSILQPLHADG | | |
| | | NAVSIVEQHYVKEALLRSKGNR | | | | CALVYEDQIRTIGDVPSTQD | | |
| | | TATAELLGLSRQSLYAKLNSYG | | | | VREIAGWLDRQPRAAVTSTA | | |
| | | FDDKGVVASAADGAEGASDDAE | | | | SLGLDVPELAHLTRMASGVV | | |
| | | D | | | | AAPISDHRGEFLMWFRPERV | | |
| | | | | | | HTVTWGGDPKKPFTMGDTPA | | |
| | | | | | | DLSPRRSFAKWHQVVEGTSD | | |
| | | | | | | PWTAADLAAARTIGQTVADI | | |
| | | | | | | VLQFRAVRTLIAREQYEQFS | | |
| | | | | | | SQVHASMQPVLITDAEGRIL | | |
| | | | | | | LMNDSFRDMLPAGSPSAVHL | | |
| | | | | | | DDLAGFFVESNDELRNVAEL | | |
| | | | | | | IDHGRGWRGEVLLRGAGNRP | | |
| | | | | | | LPLAVRADPVTRTEDQSLGF | | |
| | | | | | | VLIFSDATDRRTADAARTRF | | |
| | | | | | | QEGILASARPGVRLDSKSDL | | |
| | | | | | | LHEKLLSALVENAQLAALEI | | |
| | | | | | | TYGVETGRIAELLEGVRQSM | | |
| | | | | | | LRTAEVLGHLVQHAARTAGS | | |
| | | | | | | DSSSNGSQNKK | | |

[0398] In some embodiments, a pair of dimerization domains comprised in a gene modifying polypeptide or complex as described herein comprise an antibody, or a functional fragment thereof, and a peptide recognized by the antibody or fragment thereof. In some embodiments, a pair of dimerization domains comprised in a gene modifying polypeptide or complex as described herein comprise a Chain A sequence (or a sequence having at least 75%, 80%, 85%, 90%, 95%, 96%, 97%, 98%, or 99% identity thereto) and a Chain B sequence (or a sequence having at least 75%, 80%, 85%, 90%, 95%, 96%, 97%, 98%, or 99% identity thereto), as listed in a single row of Table 35.

TABLE 35
Exemplary antibody-peptide dimerization domains

| | | chain | Ex- | | | | Ex- | |
|---|---|---|---|---|---|---|---|---|
| | chain | A | emplary | SEQ | chain | | emplary | SEQ |
| | A | se- | chain A | ID | B | | chain B | ID |
| system | name | quence | source | NO: | name | chain B sequence | source | NO: |
| SunTag | GCN4_ | EELLSK | snap- | 20385 | GCN4_ | GPDIVMTQSPSSLSASVGDRVTITCRSSTG | addgene | 20388 |
| | v4 | NYHLEN | gene | | scFv | AVTTSNYASWVQEKPGKLFKGLIGGTNNRA | 60904 | |
| | | EVARLK | | | | PGVPSRFSGSLIGDKATLTISSLQPEDFAT | | |
| | | K | | | | YFCALWYSNHWVFGQGTKVELKRGGGGSGG | | |
| | | | | | | GGSGGGGSSGGGSEVKLLESGGGLVQPGGS | | |
| | | | | | | LKLSCAVSGFSLTDYGVNWVRQAPGRGLEW | | |
| | | | | | | IGVIWGDGITDYNSALKDRFIISKDNGKNT | | |
| | | | | | | VYLQMSKVRSDDTALYYCVTGLFDYWGQGT | | |
| | | | | | | LVTVSS | | |
| SunTag | GCN4_ | EELLSK | snap- | 20385 | GCN4_ | GPDIVMTQSPSSLSASVGDRVTITCRSSTG | addgene | 20388 |
| | v4 | NYHLEN | gene | | scFv | AVTTSNYASWVQEKPGKLFKGLIGGTNNRA | 60904 | |
| | | EVARLK | | | | PGVPSRFSGSLIGDKATLTISSLQPEDFAT | | |
| | | K | | | | YFCALWYSNHWVFGQGTKVELKRGGGGSGG | | |
| | | | | | | GGSGGGGSSGGGSEVKLLESGGGLVQPGGS | | |
| | | | | | | LKLSCAVSGFSLTDYGVNWVRQAPGRGLEW | | |
| | | | | | | IGVIWGDGITDYNSALKDRFIISKDNGKNT | | |
| | | | | | | VYLQMSKVRSDDTALYYCVTGLFDYWGQGT | | |
| | | | | | | LVTVSS | | |
| SunTag | GCN4_ | LLPKNY | snap- | 20386 | GCN4_ | GPDIVMTQSPSSLSASVGDRVTITCRSSTG | addgene | 20388 |
| | v1 | HLENEV | gene | | scFv | AVTTSNYASWVQEKPGKLFKGLIGGTNNRA | 60904 | |
| | | ARLKKI | | | | PGVPSRFSGSLIGDKATLTISSLQPEDFAT | | |
| | | VGER | | | | YFCALWYSNHWVFGQGTKVELKRGGGGSGG | | |
| | | | | | | GGSGGGGSSGGGSEVKLLESGGGLVQPGGS | | |
| | | | | | | LKLSCAVSGFSLTDYGVNWVRQAPGRGLEW | | |
| | | | | | | IGVIWGDGITDYNSALKDRFIISKDNGKNT | | |
| | | | | | | VYLQMSKVRSDDTALYYCVTGLFDYWGQGT | | |
| | | | | | | LVTVSS | | |
| SunTag | GCN4_ | LLPKNY | snap- | 20386 | GCN4_ | GPDIVMTQSPSSLSASVGDRVTITCRSSTG | addgene | 20388 |
| | v1 | HLENEV | gene | | scFv | AVTTSNYASWVQEKPGKLFKGLIGGTNNRA | 60904 | |
| | | ARLKKL | | | | PGVPSRFSGSLIGDKATLTISSLQPEDFAT | | |
| | | VGER | | | | YFCALWYSNHWVFGQGTKVELKRGGGGSGG | | |
| | | | | | | GGSGGGGSSGGGSEVKLLESGGGLVQPGGS | | |
| | | | | | | LKLSCAVSGFSLTDYGVNWVRQAPGRGLEW | | |
| | | | | | | IGVIWGDGITDYNSALKDRFIISKDNGKNT | | |
| | | | | | | VYLQMSKVRSDDTALYYCVTGLFDYWGQGT | | |
| | | | | | | LVTVSS | | |
| Moon | gp41_ | KNEQEL | addgene | 20387 | moon- | EVQLVESGGGLVQPGGSLRLSCAASGSISS | addgene | 20389 |
| Tag | pep- | LELDKW | 128605 | | tag_ | VDVMSWYRQAPGKQRELVAFITDRGRTNYK | 128602 | |
| | tide | ASL | | | nano- | VSVKGRFTISRDNSKNMVYLQMNSLKPEDT | | |
| | | | | | body | ADYLCRAESRTSWSSPSPLDVWGRGTQVTV | | |
| | | | | | | SS | | |

[0399] In some embodiments, a dimerization domain comprised in a gene modifying polypeptide or complex as described herein comprises a coiled-coil dimerization domain. In some embodiments, a dimerization domain comprised in a gene modifying polypeptide or complex as described herein comprises a sequence as listed in a single row of Table 36, or a sequence having at least 75%, 80%, 85%, 90%, 95%, 96%, 97%, 98%, or 99% identity thereto. In some embodiments, a pair of dimerization domains comprised in a gene modifying polypeptide or complex as described herein comprise copies of the same coiled-coil dimerization domain (or coiled-coil dimerization domains having at least 90%, 95%, 96%, 97%, 98%, or 99% identity relative to each other).

TABLE 36
Exemplary coiled coil dimerization domains

| Name | Sequence |
|---|---|
| P1 | SPEDEIQALEEENAQLEQENAALEEEIAQLEYG (SEQ ID NO: 20390) |
| P2 | SPEDKIAQLKEKNAALKEKNQQLKEKIQALKYG (SEQ ID NO: 20391) |
| P3 | SPEDEIQQLEEEIAQLEQKNAALKEKNQALKYG (SEQ ID NO: 20392) |
| P4 | SPEDKIAQLKQKIQALKQENQQLEEENAALEYG (SEQ ID NO: 20393) |
| P3S | SPEDEIQQLEEEISQLEQKNSQLKEKNQQLKYG (SEQ ID NO: 20394) |
| P4S | SPEDKISQLKQKIQQLKQENQQLEEENSQLEYG (SEQ ID NO: 20395) |
| P5 | SPEDENAALEEKIAQLKQKNAALKEEIQALEYG (SEQ ID NO: 20396) |
| P6 | SPEDKNAALKEEIQALEEENQALEEKIAQLKYG (SEQ ID NO: 20397) |
| P7 | SPEDEIQALEEKNAQLKQEIAALEEKNQALKYG (SEQ ID NO: 20398) |
| P8 | SPEDKIAQLKEENQQLEQKIQALKEENAALEYG (SEQ ID NO: 20399) |
| P9 | SPEDENQALEQKNAQLKQEIAALEQEIAQLEYG (SEQ ID NO: 20400) |
| P10 | SPEDKNAQLKEENAALEEKIQQLKEKIQALKYG (SEQ ID NO: 20401) |
| P11 | SPEDENQALEQEIAQLEQEIAALEQKNAQLKYG (SEQ ID NO: 20402) |
| P12 | SPEDKNAQLKEKIAALKEKIQQLKEENQALEYG (SEQ ID NO: 20403) |
| DHD9 | GSPKEEARELIRKQKELIKEQKKLIKEAKQKSDSRDAERIWKRSREINRESKKINKRIKELIKS (SEQ ID NO: |
| | 20404) |
| DHD9 | PKKEAEELAEESEELHDRSEKLHERAEQSSNSEEARKILEDIERISERIEEISDRIERLLRS (SEQ ID NO: |
| | 20405) |
| DHD13_XAAA | GTKEDILERQRKIIERAQEIHRRQQEILEELERIIRKPGSSEEAMKRMLKLLEESLRLLKELLELSEESAQLLYEQR |
| | (SEQ ID NO: 20406) |
| DHD13_XAAA | GTEKRLLEEAERAHREQKEIIKKAQELHRRLEEIVRQSGSSEEAKKEAKKILEEIRELSKRSLELLREILYLSQEQK |
| | GSLVPR (SEQ ID NO: 20407) |
| DHD13_XAXA | TKEDILERQRKIIERAQEIIRRQQEILEELERIIRKPGSSEEAMKRMLKLLEESLRLLKELLELLEESAQLLYEQR |
| | (SEQ ID NO: 20408) |
| DHD13_XAXA | GSTEKRLLEEAERAHREAKEIIKKAQELHRRLEEIVRQSGSSEEAKKEAKKILEEIRELSKRLLELLREILYLSQEQ |
| | K (SEQ ID NO: 20409) |
| DHD13_XAAX | TKEDILERARKIIERAQEIHRRQQEILEELERIIRKPGSSEEAMKRMLKLLEESLRLLKELLELSEELAQLLYEQR |
| | (SEQ ID NO: 20410) |
| DHD13_XAAX | GSTEKRLLEEAERAIREQKEIIKKAQELHRRLEEIVRQSGSSEEAKKEAKKILEEIRELSKRSLELLREILYLLQEQ |
| | K (SEQ ID NO: 20411) |
| DHD13_2:341 | TKEDILERQRKIIERAQEIHRRQQEILEELEYIIR (SEQ ID NO: 20412) |
| DHD13_2:341 | MSEEAMKRMLKLLEESLRLLKELLELSEESAQLLYEQRKANNGSETEKRLLEEAERAHREQKEIIKKAQELHRRLEE |
| | IVRQSGSSEEAKKEAKKILEEIRELSKRSLELLREILYLSQEQK (SEQ ID NO: 20413) |
| DHD13_AAAA | MTKEDILERQRKIIERAQEIHRRQQEILKEQEKIIRKPGSSEEAMKRSLKLIEESLRLLKELLELSEESAQLLYEQR |
| | (SEQ ID NO: 20414) |
| DHD13_AAAA | GTEKRLLEEAERAHREQKEIIKKAQELHKELTKIHQQSGSSEEAKKRALKISQEIRELSKRSLELLREILYLSQEQK |
| | (SEQ ID NO: 20415) |
| DHD13_BAAA | TKEDILERQRKIIERAQEIHRRQQEILKRSEEIIRKPGSSEEALETLRELQEESLRLLKELLELSEESAQLLYEQR |
| | (SEQ ID NO: 20416) |
| DHD13_BAAA | GSTEKRLLEEAERAHREQKEIIKKAQELHRRTEEIIRQSGSSEEAKDELRRIQEEIRELSKRSLELLREILYLSQEQ |
| | K (SEQ ID NO: 20417) |
| DHD13_4:123 | TTKRYLEEAERAHREQKEIIKKAQELHRRLEEIVRQ (SEQ ID NO: 20418) |
| DHD13_4:123 | GSSEEAKKEAKKILEEIRELSKRSLELLREILYLSQQVNDVDEKALERQRKIIERAQEIHRRQQEILEELERIIRKP |
| | GSSEEAMKRMLKLLEESLRLLKELLELSEESAQLLYEAR (SEQ ID NO: 20419) |
| DHD13_1:234 | EAMKRMLKLLEESLRLLKELLELSEESAQLLYEAR (SEQ ID NO: 20420) |
| DHD13_1:234 | TTKRYLEEAERAHREQKEIIKKAQELHRRLEEIVRQSGSSEEAKKEAKKILEEIRELSKRSLELLREILYLSQQVND |
| | VDEKALERQRKIIERAQEIHRRQQEILEELERIIRKPGS (SEQ ID NO: 20421) |
| DHD15 | TREELLRENIELAKEHIEIMREILELLQKMEELLEKARGADEDVAKTIKELLRRLKEIIERNQRIAKEHEYIARERS |
| | (SEQ ID NO: 20422) |
| DHD15 | GTERKLLERSRRLQEESKRLLDEMAEIMRRIKKLLKKARGADEKVLDELRKIIERIRELLDRSRKIHERSEEIAYKE |
| | E (SEQ ID NO: 20423) |
| DHD20 | GDRQELIRRNIELLKEHIKILEEISQLIEELSELLDKSSSEEVVKRYKKILERYKQLLRKSQEIHKESSEIAKKES |
| | (SEQ ID NO: 20424) |
| DHD20 | GDEQKLIERSQRMQKESLELLKEIIKILDTIEKLLDKPDSEELLDTIKKLHDTLKKIHDRNKKLLKEHEEILRQRSG |
| | SLVPR (SEQ ID NO: 20425) |
| DHD21 | DKEEEYKRLLDEIKEILKESKEVLKDSKRVLEDIKRKVPDDDLVKLLEKHVRLLEEHVKLLEQLIREAEKSSK |
| | (SEQ ID NO: 20426) |
| DHD21 | QGSSAEELLKKIKESEKKIRDSLRKIKEIIKKSRKEGVDDKQLDLIRKVVESHRDLLRLHRDLLRLLREETS (SEQ |
| | ID NO: 20427) |
| DHD25 | DIDESIKEVEKLLEEVEQSLQKLDDSLKKLLEKVNQDPDVDDSVRKIVKRHVEILKRHEEVLKRLIEVVKEHTKTVK |
| | (SEQ ID NO: 20428) |
| DHD25 | GSDREEVHKEIVKLIREIIKIHKKILKIHEKIKNGEIDPSEILKLSEEIKKLIDTIIKIIEDLEQLTRDLRR (SEQ |
| | ID NO: 20429) |
| DHD27 | DRKEIVKRHQKVVELLKESSKLLRESSKLLQRLLDKTGDENLQKAVDDQDKAIKRQETAIRKSQEASKKLD (SEQ |
| | ID NO: 20430) |
| DHD27 | DNSEEIKKVAKTSREVAEYSERVAKENDKVVKTLEEGKIDESELLRLLEESIKIFDTALKLHEEAYKLHQDLVRKVS |
| | (SEQ ID NO: 20431) |
| DHD30 | DESEAASVAIESVQILVESVKLLEESVRILLDAVKKNGVEDLLRVAQRWEKLVDEWLKVVKRWLDNVRDIQR (SEQ |
| | ID NO: 20432) |
| DHD30 | GSDKAEEVEKSVRKIEESIKKIRKSIKKAEDAVQLLKEGKIDAKDFLRIVREDLEVVKEDVEIVKEDVENVREFSS |
| | (SEQ ID NO: 20433) |
| DHD33 | SDKEVSDKLLKASKKLLKVSEELLEVVRRLLKALKDDELIKKIADLLRKIIDKDKKFIRTSEEIVKESR (SEQ ID |
| | NO: 20434) |
| DHD33 | GSDLKEVLKTVEEAVKEIIKSSEELLQISRKILEISRVGVDEHEYISAIREYLKALEKHIQILKKFIEILKELIRAV |
| | S (SEQ ID NO: 20435) |
| DHD34_XAAXA | SKEEIDKIVKKHKKKIEEHKKKVDELKKLVEEHDKRVSQDKDDKVKKLSEEVKKIIKRLEEVSKRLEEVSKKLLKVI |
| | SDKR (SEQ ID NO: 20436) |
| DHD34_XAAXA | GSNDEELKKILETLDRILKKLDKILTRLIEVLKKSEDPNLDDKDYTELVKQFIELIKKYEEVVKEYEEVVRQLIRLE |
| | S (SEQ ID NO: 20437) |
| DHD34_XAXXA | SKEEIDKIVKKHKKKIEELKKLVDELKKLVEEHDKRVSQDKDDKVKKLSEEVKKIIKRVEEVAKRLEEVSKKLLKVI |
| | SDKR (SEQ ID NO: 20438) |
| DHD34_XAXXA | GSNDEELKKILETLDRILKKLEKILTRLIEVLKKSEDPNLDDKDYTELVKQFIELIKKFEEVIKEYEEVVRQLIRLF |
| | S (SEQ ID NO: 20439) |
| DHD34_XAAAA | SKEEIDKIVKKHKKKIEEHKKKVDEHKKLVEEHDKRVSQDKDDKVKKLSEELKKISKRLEEVSKRLEEVSKKLLKVI |
| | SDKR (SEQ ID NO: 20440) |
| DHD34_XAAAA | GSNDEELKKILETLDRILKKLDKILTRLDEVLKKSEDPNLDDKDYTELVKQYIELVKKYEEVVKEYEEVVRQLIRLE |
| | S (SEQ ID NO: 20441) |
| DHD36 | DHSRKLKEILDRLRKHVKRLKEHLDELRDLVRQVPEDKLLEHVVKLSDKILQISERAVREFTKSVDKDS (SEQ ID |
| | NO: 20442) |
| DHD36 | GSDKKDELERILDEIRRLIERLDEILSRLNKLLELLKHGVPNAKEVVKDYIRLLKEYLELVKEFLKLVKRHADLVS |
| | (SEQ ID NO: 20443) |
| DHD37_ABXB | DSDEHLKKLKTFLENLRRHLDRLDKHIKQLRDILSENPEDERVKDVIDLSERSVRIVKTVIKIFEDSVRKKE (SEQ |
| | ID NO: 20444) |
| DHD37_ABXB | GSDDKELDKLLDTLEKILQTATKIIDDANKLLEKLRRSERKDPKVVETYVELLKRHEKAVKELLEIAKTHAKKVE |
| | (SEQ ID NO: 20445) |
| DHD37_BBBB | MDEEDHLKKLKTHLEKLERHLKLLEDHAKKLEDILKERPEDSAVKESIDELRRSIELVRESIEIFRQSVEEEE |
| | (SEQ ID NO: 20446) |
| DHD37_BBBB | GDVKELTKILDTLTKILETATKVIKDATKLLEEHRKSDKPDPRLIETHKKLVEEHETLVRQHKELAEEHLKRTR |
| | (SEQ ID NO: 20447) |
| DHD37_XBXB | DSDEHLKKLKTFLENLRRHLDRLDKLLKELRDILSENPEDERVKDVIDELERVIRIVKTVIKIFEDSVRKKE (SEQ |
| | ID NO: 20448) |
| DHD37_XBXB | GSDDKELDKLLDTLEKILQTATKIIDDLNKVLEKLRRSERKDPKVIETVVELLKRHEKAVKELLEIAKTHAKKVE |
| | (SEQ ID NO: 20449) |
| DHD37_AXXB | DSDEHLKKLKTFLENLRRLEDLLDKHIKQLRDILSENPEDERVKDVIDLSERVVRTVKTVIKIFEDSVRKKE (SEQ |
| | ID NO: 20450) |
| DHD37_AXXB | GSDDKELDKLLDTLEKILQTATKVVDDANKLLEKLRRSERKDPKVVETYVELLKRLEKLIKELLEIAKTHAKKVE |
| | (SEQ ID NO: 20451) |
| DHD37_3:124 | DSDEHLKKLKTFLENLRRHLDRLDKHIKQLRDILSEN (SEQ ID NO: 20452) |
| DHD37_3:124 | EDERVKDVIDLSERSVRIVKTVIKIFEDSVRKLEKTKPDSKTAKELDKLLDTLEKILQTATKIIDDANKLLEKLRRS |
| | ERKDPKVVETYVELLKRHEKAVKELLEIAKTHAKKVE (SEQ ID NO: 20453) |
| DHD37_1:234 | DSDEHLYKLKTFLENLRRHLDRLDKHIKQLRDILSENPEDERVKDAIDLSERSVRIVKTVIKIFEDSVRKKEKRPID |
| | KRDDKELDKLLDTLEKILQTATKIIDDANKLLEYLRR (SEQ ID NO: 20454) |
| DHD37_1:234 | GDPKVVETYVELLKRHEKAVKELLEIAKTHAKKVE (SEQ ID NO: 20455) |
| DHD37_AXBB | DSDEHLDRLDKHLKKLKTFLENLRRHIKQLRDILSENPEDERVKDVIDLSKTVIKIFEDSVRKKERSVRIVE (SEQ |
| | ID NO: 20456) |
| DHD37_AXBB | GSDDKEATKI IDDLDKLLDTLEKILQTANKLLEKLRRSERKDPKVVETYVKAVKELLEIAKTHAELLKRHEKKVE |
| | (SEQ ID NO: 20457) |
| DHD37_XBBA | DSDEHIKQLRDHLDRLDKHLKKLKTFLENLRRILSENPEDERVKTVIKIFEDSVRKKERSVRIVKDVIDLSE (SEQ |
| | ID NO: 20458) |
| DHD37_XBBA | GSDDKEANKLLEKATKIIDDLDKLLDTLEKILQTLRRSERKDPKAVKELLEIAKTHAELLKRHEKVVETYVKKVE |
| | (SEQ ID NO: 20459) |
| DHD39 | DHSRKLEEILDRLRKHVKRLLEHLRELLSLVKENPEDKDLVEVLELSLAILRRSLEAVEAFLKSVTKKDPDDEDLRR |
| | KADEIRKEVEEIKKSLAEVEKEIYKLK (SEQ ID NO: 20460) |
| DHD39 | GSSADDVLEDILKIIRELIEILDQILSLLNQLLKLLRHGVPNAKKVVEKYKEILELYLQLVSLFLKIVKTHADAVSG |
| | KIDKKAEEEIKKEEEKIKEKLRQAKDILKKLQEEIDKTR (SEQ ID NO: 20461) |
| DHD40 | DRDAHLYKLLTFLEQLVRHLDRLVKHITQLRDIVKKDPEDERAVDVIRQSVRSLEIVITVLKIFVDSVSDAARSKEA |
| | EKIVRKIRKEIDEIRQKLREIDKEVKKTTS (SEQ ID NO: 20462) |
| DHD40 | GSNDKVLDKILDILDRILRLATRVIDLANKLLQVKKKSTHKDPRIVETYKELLKIHETAVRLLLELADLHRRLKSKD |
| | EEANKRVETELDRIRKKVKDIEDKVRKLEDKVRKTAS (SEQ ID NO: 20463) |
| DHD43 | NDLSKEVLKKLEKSVEELLRRVQKSVKEAQKRGLLSDELVDRHLKILNQLVKRHLELLQEVIKRSDKK (SEQ ID |
| | NO: 20464) |
| DHD43 | GSDEAVKRVVEKSLKILDEVIKKSLDILRELIELQIRHAKDDESVIRASKSALKDAIEALKKSLDEIKKALKRSADE |
| | G (SEQ ID NO: 20465) |
| DHD65 | SSEEVVKVHEKVVKLHKEILELLKKIIKIHETAARDPDDKDSIKKLSDEIKKIVKRIEDISDQAKRESSDAQRKQS |
| | (SEQ ID NO: 20466) |
| DHD65 | DKEEESKELLKKLKEILKRSEELLEESKELLKLAKNGEIDESELADADRKLNKKHEKLVQDIQDLLREHERQDR |
| | (SEQ ID NO: 20467) |
| DHD70 | DEKKKIDKIVKETEDLLQKSEKLLQQSKEAVKRIRSQVKENEIVDRLLRISEELLKISRRLVEISRRIASTLS |
| | (SEQ ID NO: 20468) |
| DHD70 | GSSKEEVIRLLKENVRLIKENLELLTRNLKLITDLVRGSNGSEEKIKTLKELLKEYRELLKRYRKLVEDYKRLVDKH |
| | D (SEQ ID NO: 20469) |
| DHD88 | EIQELIKSSRRIIEESKELIKESEEVLRRIKEILDRIRNGVDNQEDLLREILKLLTKNLKIIQRNLKLLQDNAEILK |
| | RLVS (SEQ ID NO: 20470) |
| DHD88 | GSYIEDVIKKILDVSRELIKLSRTIIKISEEINKQLQQGRDTKDLVKKYDEIIKKYTRIVQHYTELIKELQKLLS |
| | (SEQ ID NO: 20471) |
| DHD89 | SPTEEAIQLSQRVIELSKRVIELSKEILKLLKRVLDLLPDLDKNEEKRLDDYDKELKEYDKELKKYEKRLKDLAS |
| | (SEQ ID NO: 20472) |
| DHD89 | GSEEEEILKIQKELLRIQSEILDKQKKILDTLRSNGAVTEEVRSILEKVERLSEEAKELSKEAKELTKEVSKLIS |
| | (SEQ ID NO: 20473) |
| DHD90 | SPLKELNNQLLRLLRELVKVSKKIVDLSKTIIEVLKHTDLDPRLLDSLEKSQQELDKSQKELDKVVKELTKVNKKLQ |
| | (SEQ ID NO: 20474) |
| DHD90 | GSPLEDLVRKYDELVKTYEKLVEEFKKAVDKYDKAVKKAPVSKEATDSLDLIRKVLELLDRNLKLIKENAKLIKELL |
| | K (SEQ ID NO: 20475) |
| DHD91 | SPTRENEKVIKENEKVISDNERVLEEVVKVVETATDRKEIQDAVDEVRKSVDKLRDSVRKLEESVRTLD (SEQ ID |
| | NO: 20476) |
| DHD91 | GSPIKDISKRLLEISKRLVEISDRIVELLQRIADSKDPNKDLQKEVKDVLEEYKRLVREYREVVKEYEKVVS (SEQ |
| | ID NO: 20477) |
| DHD92 | DEDEHVKQLIKNADLLRKHAELLKELVKLFQEIASQIPDDRVAKKVIDVVDRIDKILKQTEKLVRRTKQILDYSR |
| | (SEQ ID NO: 20478) |
| DHD92 | GSNLEELVKLLKEVLEMHERLLRIHEDLVEAHKSNASDKESERKLKKSDKDIKESLKKIKSIIDQVRYIQS (SEQ |
| | ID NO: 20479) |
| DHD93 | PVEDIIEESLRLLEESLKLLNRILKLLEDSLRKLPRSEEWRQRLDEFRKKLEDWKEELERWIEDVRYKKT (SEQ |
| | ID NO: 20480) |
| DHD93 | GSDEDYESREIIDEIRKLLDRSKKIVHRSQRLVERVKSTPLSEDQEDLIRRHEETINRHRELVKELEKVLEDHERHI |
| | R (SEQ ID NO: 20481) |
| DHD94 | PEEDSRRVLERFVRVSREVLKVLEEFLRVSEELLREADRDRDRRLEEYERQVDELREEIRRYKEEVDKFDKEVKYYK |
| | K (SEQ ID NO: 20482) |
| DHD94 | GSPEKDENRKLLDKVRKLVEKSRRLVEELRKLVDQSTKNGLIDEKALRKQQEVLRKVEEVLEKQERVLRELEEISYR |
| | VI (SEQ ID NO: 20483) |
| DHD94_3:214 | GSPERDENRKLLDKVRKLVEKSRRLVEELRKLVDQSTKN (SEQ ID NO: 20484) |
| DHD94_3:214 | GSDEKALRKQQEVLRKVEEVLEKQERVLRELEEISYRVITRGEDHKAEEDSRRVLERFVRVSREVLKVLEEFLRVSE |
| | ELLREADRDRDRRLEEYERQVDELREEIRRYKEEVDKFDKEVKYYKK (SEQ ID NO: 20485) |
| DHD94_2:143 | GSDRRLEEYERQVDELREEIRRYKEEVDKEDKEVKYYKK (SEQ ID NO: 20486) |
| DHD94_2:143 | GSPERDENRKLLDKVRKLVEKSRRLVEELRKLVDQSTKNGLIDEKALRKQQEVLRKVEEVLEKQERVLRELEEISYR |
| | VITRGEDHKAEEDSRRVLERFVRVSREVLKVLEEFLRVSEELLREADR (SEQ ID NO: 20487) |
| DHD95 | DLSEESKKFVEKVKKLEKESRELEKQVKKIEEDSRSVENDVQKEFLELLKRLLDIQKKVVEVLREVVKVQQYVDS |
| | (SEQ ID NO: 20488) |
| DHD95 | GSDSEYESRQVLRELDTVLKDSHTVLEALRQVIRDSQDVVSKSDEESRRVIDDLEKVIQDSKKVLDDIKRLIDKSKS |
| | IKS (SEQ ID NO: 20489) |
| DHD96 | NEDELLKLLTENLKLLDENLKLLRENLSLLRQANNITDKNRIREIVKQSKEIVKQSREILKQSKEIVERIKYIVS |
| | (SEQ ID NO: 20490) |
| DHD96 | GSSLYELTQRYEKLVQQYEELVKDYRRLVKKLEKLKRDNKPDKRLLKEIVDVIKKSVEIIDRSLKLLEESIKILEET |
| | D (SEQ ID NO: 20491) |
| DHD97 | SQERSLEILKRILDVLKESLEILKESLSILRQLASRIKNPNRKIEEILKESDKIIKESDKVLKEIEEVIRYSS |
| | (SEQ ID NO: 20492) |
| DHD97 | GSDIEYESKEILELIKELLKLSRELLKESRRALELVRKSRDDSIVEEVIQVHKKVLDIHKEVLKIVRKVVEVHRRVK |
| | S (SEQ ID NO: 20493) |
| DHD98 | SKKDESTKLERLAEKIDEITKRIEELVKDVKRKSSEGVDKDQQQKIDEVFQKLLDLQREILEILDRILKVQQYILD |
| | (SEQ ID NO: 20494) |
| DHD98 | GSDLEYLNRRLLQLIKTLIDLNRHLLKLIDKLKKLNSREGDEEKIKEESKQIQEQFKEIVERSKEIIKQIKEIIKRS |
| | Q (SEQ ID NO: 20495) |
| DHD99 | DFERSSRRLEKVVEDLRRSSDRLREVIDELRKSADEKDEDEDLRRARKEHRDLIEELKRALEKQEEIIKHLQELVYR |
| | QL (SEQ ID NO: 20496) |
| DHD99 | GSEESEEVRKVVERIKKISRELEEVVKELDRVSKEFDRHGETDEIVREHERIVEKLEEIVKKHTKIVEELAEIVYKQ |
| | Q (SEQ ID NO: 20497) |
| DHD100 | SDDDSVRVLDEIVKILDESVKLLKESLKLLDDFLRTKPDDHLKEVVKESKKVVEQSKKVLDRIKKIIYESK (SEQ |
| | ID NO: 20498) |
| DHD100 | GSDLLYLSKELLKLVRELLKLSRELVELSRRLVNSTHKSPELVKKYDKLVKKYQDLLKKLADVADEYLRQRS (SEQ |
| | ID NO: 20499) |
| DHD101 | DEKDYHRRLIEHLEDLVRRHEELIKRQKKVVEELERRGLDERLRRVVDRFRRSSERWEEVIERFRQVVDKLRKSVE |
| | (SEQ ID NO: 20500) |
| DHD101 | GSDAYDLDRIVKEHRRLVEEQRELVEELEKLVRRQEDHRVDKKESHEILERLERIIRRSTRILTELEKLTDEFERRT |
| | R (SEQ ID NO: 20501) |
| DHD102 | DERYRAREHIRRVEEHTKRLRHILKRLREHEEKLRRELKPGDEITESVDRFKKIVDQFEESIKKFETVSEELRKSDS |
| | (SEQ ID NO: 20502) |
| DHD102 | GSDRQRILDRLDKILEKLDDILKKLKDILETLSKDDVSDRRHKDLVEKFRELVDTHHKLVERYRELVYQNR (SEQ |
| | ID NO: 20503) |
| DHD102_1: | GSDEITESVDRFKKIVDQFEESIKKFETVSEELRKSIS (SEQ ID NO: 20504) |
| 243 | |
| DHD102_1: | GSDPQRAADRLDKILEKLDDILKKLKDILETLSKDDVKDRRAKDLVEKFRELVDTHHKLVERYRELVYTATAGSDLA |
| 243 | RELIRRVEEHTKRLRHILKRLREHEEKLRR (SEQ ID NO: 20505) |
| DHD103 | NADDQLATSIKKLEDSIDQLIKIVRKFEESVKKLQKHGVDQHHVEILRKIVEIFRQHIEKLKKHLEKLRYTSS |
| | (SEQ ID NO: 20506) |
| DHD103 | GSDKEYLVTEHEKLVREHEKIVSEIEKLVKKHEAGVDESELEEILKKVEKLLRKLDEILEQLTQLLRKTE (SEQ |
| | ID NO: 20507) |
| DHD103_1: | GSDQHVVEILRKIVEIFRQHIEKLKKHLEKLRYTSS (SEQ ID NO: 20508) |
| 423 | |
| DHD103_1: | GSDAEYLVTEHEKLVREHEKIVSEIEKLVKKHEKGVDESELEEILKKVEKLLRKLDEILEQLTQLLRKAEKHIDKHS |
| 423 | KAADQLATSIKKLEDSIDQLIKIVRKFEESVKKLQKH (SEQ ID NO: 20509) |
| DHD104 | DEDDDIRRVLDESRRVLEHSRRVLKRSEEVLEKASRKKEKDTEEIEKHLKRLREHAKKLEKHRRELDDFLYKEI |
| | (SEQ ID NO: 20510) |
| DHD104 | GSRDKYLLERLNDILKKLDEIVDKLSDILKRLKDVRHDDRLQELVERYKEIVKEYKRIVEEYEKLVREFEEQQR |
| | (SEQ ID NO: 20511) |
| DHD105 | DRDYEDKEFKKIIKELEDVQEELKKLQEKIKRFSSELEEPNELLKEQLKVNEEQLEVNKKILKILRDQLKQNE |
| | (SEQ ID NO: 20512) |
| DHD105 | GSDAEYKVRESVKRSKESVKHSEDVVDKLNKSVKLSESGHSDAEKASRELVKLVREVVELSREVIKLSEKVLRVIS |
| | (SEQ ID NO: 20513) |
| DHD106 | DLQYKQEKLIRHFDRVVREWDKLVRKFSKVLEKQKHESKDKELEEASRRVDELIKRLREQLKRSKEILRRLKELSRK |
| | SS (SEQ ID NO: 20514) |
| DHD106 | GSDWEELLRRLEKVLQEYEEIVKELIDLIERLIKVSEDKSKDASEYKKLVTELEKLISKLEEISKKLEELVKEYEYK |
| | TE (SEQ ID NO: 20515) |
| DHD107 | DAKDELEKSLQEIEESLKELKKLLEELDKSLRELTSQGRNKKLEEHIKKVQKFIELVKKYIKAVQDYLKEVRYDNS |
| | (SEQ ID NO: 20516) |
| DHD107 | GSDKERAARATEEMVKLIKKLLKAVEDLVRDVRRLLKEGLISEKHARIAETILEVFKKHAKIIKKHVDIVKYDES |
| | (SEQ ID NO: 20517) |
| DHD108 | GSPLKERLLEIQRDLDRVLEEVVERLLRIQERLDSVVERKPPDVHEEYKYIVDEIREIVERVVREYEEIVKRIDEEV |
| | R (SEQ ID NO: 20518) |
| DHD108 | GSEEDERIRYDLDRIRKDVRRKLEEIRQRVRELEKKLRDAGHRRDEKELLRELIETSKDILRLVEELLKKIIDKSED |
| | LLRKTE (SEQ ID NO: 20519) |
| DHD109 | GSDEEDYINENVEKDVRDIEDDVRRINERIRELLEKIRTEEVLQRVLEEHHELVERVLRKLVEILRKHEEENR |
| | (SEQ ID NO: 20520) |
| DHD109 | GSDEEEYYKEKLHKLLREIEELLKHYRELVRRLEELVKRGELDKDTAAHILERLSELLERIIRRVAHTLRRLSEERR |
| | (SEQ ID NO: 20521) |
| DHD110 | GSDEDEISYDSKRRVEEIVRQAREKSEKSRKDIEDVAEVLRKGDVSEKEVVDELVKVLEEQVKVLREAVERLREVLK |
| | KQVDDVR (SEQ ID NO: 20522) |
| DHD110 | GSDIVELVDHLLKRSLKLLEELAELVRRLLEKSTELLKRRTEEHKEEVVEESEYMVRELEERLRRVVDESEKLVRDA |
| | DKHIR (SEQ ID NO: 20523) |
| DHD111 | GSKEKDIVKTLVDLLRENLETLERLIEEVVRLLKENVDVRDEGRDDKDSERILRDIKRRIDEAAKESREIIERIEKE |
| | VEYRSR (SEQ ID NO: 20524) |
| DHD111 | GSPEVDVLRRIVREILKASEELLRLLRKLIDEALKLSERKRDSQEYREVVDRVKKELERLLDEYRKLVEELKEKLRY |
| | DTR (SEQ ID NO: 20525) |
| DHD112 | GSDKRYESEKLKRRLDEAVEKVREVVERVERESDRVLEEVRRRRESKEVVDKVIEDNDKALEDVLRVVDEVAKVVRD |
| | VVRENTR (SEQ ID NO: 20526) |
| DHD112 | GSPREYHSKDILRKVDEILERIRRHADRVKKKSERLKRENVDVNEHSKDVKRVIRELLELVKELLRLAKKHSDDQQE |
| | (SEQ ID NO: 20527) |
| DHD113 | GSDEDEILYHSERLLQKLKKELDDLKEKSRELLEELKKEDPDDRLIERIIRLHDEVLKDLDEVLKNILEVHREVLER |
| | LR (SEQ ID NO: 20528) |
| DHD113 | DKLDRLLKIHEEALRRAEELIKRLLDIHRRALDLARRGELDDYLLKESERELREIIRRAREELKESRDRLEEISR |
| | (SEQ ID NO: 20529) |
| DHD114 | GSPKEELIRRVLEEVKRLNEKLLEIIRRAAELVKRANDELPETEKLREIDRELEKKLKEIEDELRRIDKELDDALYE |
| | IED (SEQ ID NO: 20530) |
| DHD114 | GSPKLDKLRELLERNLEKLREILEEVLKILRINLERVREDIRDEDVLQEYERLIRKAEEDLRRVLKEYDDLLKKLVY |
| | ELR (SEQ ID NO: 20531) |
| DHD115 | GSKEDESVKRAEEIVRTLLKLLEDSLREAERSLRDIKNGEDEHNLRRISEKLEELSKRITETIERLLRELQYTSR |
| | (SEQ ID NO: 20532) |
| DHD115 | GSPNQELLDRVRKILEDLLRLNEELVRLNKELLKRALEMRRKNRDSEEVLERLAEEYRKRLEEYRRELEKLLEELEE |
| | TIYRYKR (SEQ ID NO: 20533) |
| DHD116 | GSDESEEAQHEVEKVLDDIRRLSEHLQKRLEEVLEEVYELRREGSDRTEVVELLKEVIREIVRVNREALERLLRVVE |
| | EAVKRNE (SEQ ID NO: 20534) |
| DHD116 | GSDEEELVETVKRIQKEILDRLTELAKLLVEIQREIKKLKDEGEDDKELKRLSDELEEKVRQVVEEIKRLSDELEET |
| | VEYVSR (SEQ ID NO: 20535) |
| DHD117 | GSDEEEEVVRRAEELVKEHEELIERVIRTHEELVYKLEDQGADKKLVDVLKRVVEESERVAREIVKVSRELIRLLEE |
| | ASR (SEQ ID NO: 20536) |
| DHD117 | GSSKEEILKELEDLQRRLIEELKKLQERVVELLEELIKRLRDRGRDDKHLKRLVKEVRRLSEEVLRSIKEVSDRVRY |
| | QLR (SEQ ID NO: 20537) |
| DHD118 | GSDKEEESEYLLRDLVRLLEKVKEKIEEVNREVEKLLKKVKDGRLDRREVLREILRLNRELAEIIKEVVDRIRHVVE |
| | RSER (SEQ ID NO: 20538) |
| DHD118 | GSDLHEVVYETKELLKRIEEVVEELRKKSEDIIRKAERGEISEDELKRLQEEIAREAKKLLDEIKRVLERHLEQTL |
| | (SEQ ID NO: 20539) |
| DHD119 | GSPVEEIIKEVVKRVIEVQEKVLRIISHAVKRVVEVQKKYDPGSEESNRVVEEVKKTIEDAIRESDEVVDEVVKRIQ |
| | YTVR (SEQ ID NO: 20540) |
| DHD119 | GSPEQEIADRILTEIRESQKELERLARKILKLLDESQEKAKRGRLSEEESDELLERIKKELDELLERSKELLKKIEY |
| | ELR (SEQ ID NO: 20541) |
| DHD120 | GSDEDKEANRVLDEVLKTVRDLLETANEVLKEVLYRLKRTDDQEKVVRTLTEVLKEHLKLVEEIVRILDKVLKEHLE |
| | TEK (SEQ ID NO: 20542) |
| DHD120 | GSPEDDVLRRLEEVSEKILRVAEDVARQLREVSEKITQGKVDRKEWEEDIKRLKRELEELLREWKEEIERLTYELR |
| | (SEQ ID NO: 20543) |
| DHD121 | GSRREEVVKRIRELLKRNKELIDRIRELLEENEYLDKDARDKDVLRRSVELLEELVRILEESVELAKEIIKLLREVV |
| | E (SEQ ID NO: 20544) |
| DHD121 | GSDEKEDNRRLQHKIERILEKNEDLQRKLEEILELLERGEADEEKIDRLRKAVEDYRRVVEEIKEDVKRHKYTVR |
| | (SEQ ID NO: 20545) |
| DHD122 | GSDEKEEAKKASEESVRTVERILEELLKASEESVELLRRGEDAKDVVERSKEALKRVKELLDEVVKRSDEILKYIHN |
| | (SEQ ID NO: 20546) |
| DHD122 | GSDEKKLINEVVETQKRLIKEAAKRLSEVVRHQTELIRELREKNVDDKDVEKLLKESLDLAEEIVRRIKELLDESKK |
| | LVEYVSN (SEQ ID NO: 20547) |
| DHD123 | GSPDMDEVKRVLDELIEIQEEILREIKRVLEKLIKIQEDNGSEYESREVVREIVEIARKLVERSRRVVKKITETLQ |
| | (SEQ ID NO: 20548) |
| DHD123 | GSDERYATREIVERIERIAREILKRTEEIVREVREVLSRDVDQEEVVRRLADLLRESVELVQHLVRRVEELLQESVE |
| | RKK (SEQ ID NO: 20549) |
| DHD124 | GSPEREALREVLEDLKRVTDRLRELVERVLEELKKVTDHVDSERILRESRRVLKELKDIIEEILRESEKVLEKLKYT |
| | ED (SEQ ID NO: 20550) |
| DHD124 | GSPAREILEEVVKKHLEVVEDAARILEEIIREHEKAVREDRDKKELEEISRDLLRKAREALKKVKDISDDLSREIEY |
| | VAS (SEQ ID NO: 20551) |
| DHD125 | GSPVEEAIKKVIDDLRDVQRKIRELVEELIRLLEEVQRDNDKRESEYVVERVEEILRRITETSREVVRKAVEDLS |
| | (SEQ ID NO: 20552) |
| DHD125 | GSDSDEKAEYLLKEMERVVRESDEVVKKILRDLEEVLERLRRGEISEDDVTEILKELAERHIRAIEELVRRLRELLE |
| | RHKR (SEQ ID NO: 20553) |
| DHD126 | GSPVEEVLKELSEVNERVRDIAREIIERLSEVNEEVKETDDEDELKKISKKVVDEVEDLLRKILEVSEEVVRRVEYH |
| | DR (SEQ ID NO: 20554) |
| DHD126 | GSPKEDILREVLRRHKEIVREIVRLVREAVETHLELVKRNSDDRDAQDVIRKLEEDLERLVRHAQEVIEEIFYRLH |
| | (SEQ ID NO: 20555) |
| DHD127 | GSPRSYLLKELADLSQHLVRLLERLVRESERVVEVLERGEVDEEELKRLEDLHRELEKAVREVRETHREIRERSR |
| | (SEQ ID NO: 20556) |
| DHD127 | GSDREYIIKDILDSQEHLLRLIEELLETQKELLEILKRRPDSVERVRELVRRSKEIADEIRRQSDRNVRLLEEVSK |
| | (SEQ ID NO: 20557) |
| DHD128 | GSDEKDEIRHVIESVERLIEDIKRLLKTLRELAHDDSDKKTVKEVLDRVKEMIERHRRELEEHRKELERAEYEVR |
| | (SEQ ID NO: 20558) |
| DHD128 | GSESEDRIKELLKRHIELVERHEELLHEIKKLIDLEEKDDKDREEAVKRIDDAIKESEEMLEESKEILEEIEYLNR |
| | (SEQ ID NO: 20559) |
| DHD129 | GSSLEDSVRLNDEVVKVVERVVRLNQEVVRLIKHATDVEDEETVKYVLERVREVLDESREVLKRVHELLEESERRLE |
| | (SEQ ID NO: 20560) |
| DHD129 | GSHEKDIVYKVEDLVRKSDRIAERAREIVKRSRDIMREIRKDKDNKKLSDDLLKVTRDLQRVVDELEELSRELLRVA |
| | EESRK (SEQ ID NO: 20561) |
| DHD130 | GSPELDEVKKLIDELKKSVERLEESIREVKESIKKLRKGDIDAEENIKLLKENIKIVRENIKIIKEIIDVVQYVLR |
| | (SEQ ID NO: 20562) |
| DHD130 | GSDEEEIEELLRELEKLLKKSEEALEESKKLIDESEELLRRDRLDKEKHVRASEEHVKLSEEHLRISREIVKILEKA |
| | VYSTR (SEQ ID NO: 20563) |
| DHD131 | GSDESDRIRKIVEESDEIVKESRKLAERARELIKESEDKRVSEERNERLLEELLRILDENAELLKRNLELLKEVLYR |
| | TR (SEQ ID NO: 20564) |
| DHD131 | GSDEDDELERLLREYHRVLREYEKLLEELRRLYEEYKRGEVSEEESDRILREIKEILDKSERLWDLSEEVWRILLYQ |
| | AE (SEQ ID NO: 20565) |
| DHD132 | GSDKKDASRRAIRVLHEFVRVSEEVLEVLRKSVESLKRLDVDEKIKRTHDRIEEELRRWKRELEELIERLREWEYHQ |
| | D (SEQ ID NO: 20566) |
| DHD132 | GSDDEEEDKRLLEEVKRSLDTDERILEKLRHSLERQLEDVDKDEDSRRVLRELDEITKRSREVVKRLRKLAYESK |
| | (SEQ ID NO: 20567) |
| DHD133 | GSDKEYKLDRILRRLDELIKQLSRILEEIERLVDELEREPLDDKEVQDVIERIVELIDEHLELLKEYIKLLEEYIKT |
| | TK (SEQ ID NO: 20568) |
| DHD133 | GSP SKEYQEKSAERQKELLHEYEKLVRHLRELVEKLQRRELDKEEVLRRLVEILERLKDLHKKIEDAHRKNEEAHKE |
| | NK (SEQ ID NO: 20569) |
| DHD134 | GSRDRKISEELIKALEDHIRMLEELIRAIEEHIKLAERGVDEKELRESLEELKKIVDELEKSLEELRKLAERYKYET |
| | R (SEQ ID NO: 20570) |
| DHD134 | GSPKEESVEELKRVIDKHEEILRELKRVLEEHERVSHDEDENELRRSLERLKHILDRLHESLKELHELLKKNEYTER |
| | (SEQ ID NO: 20571) |
| DHD135 | GSDHEYWVKIVERILRVMEKHAEIVKKHLEIVERVVREGPSEDLRRKLKESLREIEESLRELKELLDELDELSEKTR |
| | (SEQ ID NO: 20572) |
| DHD135 | GSDEEYVTRSQRRLKRLLEEYIKVVEEHARLVERNERDDKELKRSIDELDKLTKELLELVKRYKELVDKTET (SEQ |
| | ID NO: 20573) |
| DHD136 | GSDKEEIVKLQDEVIKTLERHLDILRKHIDLLEKLKDHLSEELKERVDRSIKKLEESIKRLERIIEELQELAEYSL |
| | (SEQ ID NO: 20574) |
| DHD136 | GSREEELKESAEELERSVRELKKEADKYKEEVDRLHYRGKVDKDWVRVVEKLIKLVEEHLELIREHLELLKEERR |
| | (SEQ ID NO: 20575) |
| DHD137 | GSDMEYELKKSAEELRKSLEELKRILDELHKSLRELRRHGDDEEYVQTVEELRKELEEHAKKLEEHLKELERVAT |
| | (SEQ ID NO: 20576) |
| DHD137 | PEYELKKSVDDLKRDVDRLVEEVEEVFELSKERLREDRKHLELVEEMVRLIEKHLELIKEHLKLADDHVR (SEQ |
| | ID NO: 20577) |
| DHD138 | GSREKDESKELNDEYKKLLEEYERLLRRSEELVKRAKGPRDEKELKRILEENEDILRRTKEILERTKEISEEQKYRR |
| | R (SEQ ID NO: 20578) |
| DHD138 | GSDKDERQERLNEESDKSNEESERSNRESEELNRRARGPNDEKELQEILDRHLELLERNQRLLDENKEILRESQYLN |
| | D (SEQ ID NO: 20579) |
| DHD139 | GSENKYILKEILKLLRENLKLLHDILRLLDENLEELEKHGAKDLDDYRRKIEEIRKKVEDYREKIEEIEKKVERDR |
| | (SEQ ID NO: 20580) |
| DHD139 | GSESEYTQEEILELLKESIKLLREILRLLEESEELWRRENTKSERSEEIKERAKEAIKRSEEILERVKRLSDHSR |
| | (SEQ ID NO: 20581) |
| DHD140 | GSDEEEANYVSDKAVKIAEDVQELLKELLELSEVVRRGEVDEDEYDRVLRKLQEVMKEYEEVLKEYEEVSRKHE |
| | (SEQ ID NO: 20582) |
| DHD140 | GSPEKYLIKTQEELLRRHAEILEDLIRKVERQVDLRRKVDERDEDLKRELERSLRELERLVRESSRLVEEIRELSKE |
| | IKR (SEQ ID NO: 20583) |
| DHD141 | GSDEEYELERISRESKELLERYKRLLREYQELLKELRHVKDLDRAVKIIHELMRVSKELVEISHRLLELHERLVRRR |
| | K (SEQ ID NO: 20584) |
| DHD141 | GSEKEYIEKLSRKIEEDIRRSEERAKDSERLVRRLEELAKRKRLDLDDVLRVAEENLEILEDNLRILEEILKEQDKS |
| | NR (SEQ ID NO: 20585) |
| DHD142 | GSPHEEVVELHERVMEISERAVELIQRIIDIIRRIREDDKDIEKLVKTIRDLVREYEELHRELEEIDEEIYKKSE |
| | (SEQ ID NO: 20586) |
| DHD142 | GSDHEDVVRLHEDLVRKQEDARRVLEEIVRLAEEIVEVIKKDEKDKDRVTRLVEEIEKLVEEYKKKVDEMRKISDEI |
| | KYRSR (SEQ ID NO: 20587) |
| DHD143 | GSRAREVVKRAKRIIEEWQKILEEWRRILEEWRRLLEDERVDDRDNERIIRENERVIRENEKIIRDVIRLLEELLYE |
| | RR (SEQ ID NO: 20588) |
| DHD143 | GSREDEELEEEIDRIRQMVEEYEELVKEYEELTEKYKQGKVDKEESKKIIEKSERLLDLSQDAVRKVKEIIRRILYT |
| | NR (SEQ ID NO: 20589) |
| DHD144 | GSPKEEIVKLHDESAELHRRSVEVADEILKMHERSKDVDDERESRELSKEIERLIREVEEVSKRIKRLSEEVEYLVR |
| | (SEQ ID NO: 20590) |
| DHD144 | GSPLEEILKIQRRINKIQDDINKILHEILRMQEKLNRSSDKDEVEESLRRIRELIKRIKDLSKEIEDLSREVKYRTT |
| | (SEQ ID NO: 20591) |
| DHD145 | GSPEDEHVYVVREIYEVLREHAEVLEENREVIERLLEAKKRGDKSEELVKELKKSIDKLKEISRKLEEIVKELEKVS |
| | EKLK (SEQ ID NO: 20592) |
| DHD145 | GSDEDETSYRILELLREIVRASRELIRLSEELLEVARRDDKDETVLETLIREYKELLDRYRRLIEELTRLVEEYEER |
| | SR (SEQ ID NO: 20593) |
| DHD146 | GSTQEEINRIQHEVLRIQEEIDEILRDIVEKLKAISRGELDHEVVKDVEDKVREALEKSEELLDKSRKVEYKSE |
| | (SEQ ID NO: 20594) |
| DHD146 | GSDEEELNRELLEKSKRLVDINRDIIRTAQELIEMLKDSKDGRVDEDTKRELRDKLRKLEEKLERVREELRKYEELL |
| | RYVQR (SEQ ID NO: 20595) |
| DHD147 | GSDEKDRVYEILKEVQRLVKEYRDISKEIEDLVKHYEHITDDEAQEVSKELIDKSLRASEIVRELIRLIKELLDELE |
| | (SEQ ID NO: 20596) |
| DHD147 | GSDEEDVLYHLRELLEELKRVSDDYERLVREIKETSERKDRDTKENKDMLDELVKAHREQEKLLERLVRLLEELFER |
| | KR (SEQ ID NO: 20597) |
| DHD1 | PREQAIRISEEIIRISKKIIEILERTRSSTAREAMKWAKDSIRLAEESKYLLDK (SEQ ID NO: 20598) |
| DHD1 | IEDDVKKIQDSTKKAQKETIEALERSTSSTARKQMEEQKEQIRLQKEAMYLLKK (SEQ ID NO: 20599) |
| DHD2 | SREEIAKLQEEVIKLQRRVIELQKEVIELQRRAKELTSSYTKEILEIQRRIEEIQREIEEIQKRIEEIQEEIQRRT |
| | (SEQ ID NO: 20600) |
| DHD2 | SDEEIKRLSEEVIQLSRRVIKMSREAIKLSREVQKLTPSYQKRIKEIADRSIELARESIEIAKRSEKIAEESQRRT |
| | (SEQ ID NO: 20601) |
| DHD3 | PAKDEALKMANESLELAKKSARLIQESSSKEILERIEKIQRRIAELQDRIAYLIKK (SEQ ID NO: 20602) |
| DHD3 | PAKDEALRMIDESRELIKKSNELIQRSSSKEILERILEIQRKIAELQKRIQYLLKS (SEQ ID NO: 20603) |
| DHD4 | TDEARYRSERIVKEAKRLLDEARRRSEKIVREAKQRSNSEDAKRIMEENLRESEEAARRLREIIRRNLEESRETG |
| | (SEQ ID NO: 20604) |
| DHD4 | TREALEYQRKMAEEIEDLLREALRRQEEMVREAKQRSLSEEFKRIMERILEEQERVMRLAKEALERILEEQKRTG |
| | (SEQ ID NO: 20605) |
| DHD5 | SERTKREAKRSQEEILREAKEAMRRAKESQDHRQNRDGSNSEDLERLSQEQKRELEEVERRLKELAREQKYKLEDS |
| | (SEQ ID NO: 20606) |
| DHD5 | SEDLKRILKEITERELKLMQDLMEILKKITEDENNLDSNNSEDLKRSIEKARRILDEALRKLEESARRAKYIQEDN |
| | (SEQ ID NO: 20607) |
| DHD6 | TEDEIRESLKWLDEVLQELREIARESNEVLERNRQKSRSDKLREDIERYKKRMEEARKKLDDQLNKYKKRMDENRS |
| | (SEQ ID NO: 20608) |
| DHD6 | TEEELKESKKFAEDLARSARRALKESKRVLEEISQASRSKKLEEIVRRYKEQVKRWQDEWDERAREYRKRMKENRS |
| | (SEQ ID NO: 20609) |
| DHD7 | TKTEEIERLAREIKKLSEKVERLAQEIEELSRRVKEENSTDRELKEANREIERAIREIEKANKRMEEALRRMKYNG |
| | (SEQ ID NO: 20610) |
| DHD7 | TKTEEHERLAREISKLADEHRKLAKIIEELARRIKEENLTDDELREAIRKIEDALRKNKEALKIMKEAAERNRYNT |
| | (SEQ ID NO: 20611) |
| DHD8 | TKKEESRELARESEELARESEKLARKSLELARRAESSGSEEEKRRIIDENRKIIERNREIIERNKEIIEYNKELIS |
| | (SEQ ID NO: 20612) |
| DHD8 | TKDEESLELNRESEELNRKSEELNRKSKELNDRAESSNSEEEEKEILREHKEILREHLEILRRHKEILRRHKYLTS |
| | (SEQ ID NO: 20613) |
| DHD16 | TREELLRENIELAKEHIEIMREILELLQKMEELLERQSSEDILEELRKIIERIRELLDRSRKIHERSEEIAYKEE |
| | (SEQ ID NO: 20614) |
| DHD16 | SEDIAREIKELLRRLKEIIERNQRIAKEHEYIARERKKLDPSNEKERKLLERSRRLQEESKRLLDEMAEIMRRIKKL |
| | LD (SEQ ID NO: 20615) |
| DHD18 | DRQKLIEENIKLLDKHIKILEEILRLLKKDIDLLKKSSSEEVLEELKKIHRRIDKLLDESKKIHKRSSEIVKKRS |
| | (SEQ ID NO: 20616) |
| DHD18 | DEQKLIETSQRLQEKSERLLEKFEQILREASDLYRKPDSEELLRRVEKLLRELEKLIRENQDLARKHEKILRDQS |
| | (SEQ ID NO: 20617) |
| DHD19 | DRQELIRENIELLKKHIKIVKEIQKLIETFIELLKKSSSEEILRRLKKILKRIEKLYRESQEIHKRSEEIAKKRQ |
| | (SEQ ID NO: 20618) |
| DHD19 | DEERLIDKSRELQKESEELLKELLKIFKRIEELLEKPDSEELIREIKKLLETLSEIHKRNEKLARTHEEILRQQS |
| | (SEQ ID NO: 20619) |
| DHD22 | STRDVQREIAKAFKKMADVQKKLAEEIKRHVKNVEKKNKDNDEYRKIATELLKKATESQKKLKELLDRIRKSDS |
| | (SEQ ID NO: 20620) |
| DHD22 | DKDDRSTSLLKRVEKLIDESDRIIDKFTTLIELSRNGKIDDDQYKKELKEILELLKKYDKHVKEVEELLKRLNS |
| | (SEQ ID NO: 20621) |
| DHD23 | SKRKALEVSERVVRISEKVVRVLDESSDLLKKSYDDSDKFAELIDRHEEKIKKWKKLIKEWLEIIQRHKS (SEQ |
| | ID NO: 20622) |
| DHD23 | SAEEFVKLSEEAVKRSKEILDIVRKQVKLVKAGVDKHEITDSLRKSEKLIEEHKELIKTHRDLLRREN (SEQ ID |
| | NO: 20623) |
| DHD24 | SSTEILKRFKRALRESEKIVKHSRRVLKIIREVLKQKPTQAVHDLVRIIETQVKALEEQLKVLKRIVEALERQS |
| | (SEQ ID NO: 20624) |
| DHD24 | DKQKEIKDI LEKTRRIAEESRKIAEKFDEIIKRSTEGKIDESLTKELEELVKEVIKLSEDDARTSDDLVRKES |
| | (SEQ ID NO: 20625) |
| DHD26 | DEDESIKLTRKSIEETRKSLKIIKEVVELIREVLKHIKDLDKEIFERIDKILDKYKKQVDTYDEILKEYEKKQR |
| | (SEQ ID NO: 20626) |
| DHD26 | SELDEQKELIKKQEKLIEEQQRLLSKIRRMFKERVKDQELLREIQKVLKRSQEIVETSKKILDRSDKITE (SEQ |
| | ID NO: 20627) |
| DHD28 | DQKEINTRIVEKLERIFKKSKEIVRQSERVISTIEKKTEDERELDLLRRHVKIVREHLKLLEELLKIIKEVQKESE |
| | (SEQ ID NO: 20628) |
| DHD28 | DTEELVKRLNELLKELSKLVKEFIKILETYRKDQTKDTSKISERVDRILKTYEDLLQKYKEILEKIEKQLS (SEQ |
| | ID NO: 20629) |
| DHD29 | DYARLIDQAVEVTRKVVEVNVTVARVNDKFAKHLGDEELRRVSEHLKEVSKDLQEVAKKSKDAARQVK (SEQ ID |
| | NO: 20630) |
| DHD29 | DVSKVAEEYLQISKTLVDISRTLLEISERLVRLVRTVADDRSEVKKAIEDSIEVLKTSEEVVRQIKRASDKLVKAIS |
| | (SEQ ID NO: 20631) |
| DHD31 | DAKEI QRRVVEIQTEVVKLQKKAVDIIRKIIEAFNNSNIDQSLLEAAKEIVKEIDKLEKLTESLLEESKKLLKRSS |
| | (SEQ ID NO: 20632) |
| DHD31 | SAEEVVKLAKIFLELLRESIKLLKRSVDLLRKSSDPSLDKSEAEKVSREIEKVSDTSLKLSKKALDVVKRALKVAS |
| | (SEQ ID NO: 20633) |
| DHD32 | DEKDAARKARKVSEEAKEASKKIEKALEESKRILNTLKQKKDEQEVKVIKEHEDVLRQIEKIQKQVLEIQKEVAKLL |
| | ESLD (SEQ ID NO: 20634) |
| DHD32 | SADDVARASEKVLRVARESAKAADKSLEVFKEVVKRGDKEAFLQVVKINEEVVKINITVIRILIEVSKIAT (SEQ |
| | ID NO: 20635) |
| DHD38 | DEYVKETLKQLREALASLREADKRITELVKEARKKPLSEAARKFAEAIVTHVKVVVEHVEVVLRHVEVLVEAKKNGV |
| | IDKSILDNALRIIENVIRLLSNVIRVVDEVLQDLD (SEQ ID NO: 20636) |
| DHD38 | DASDVIRRIHELFEEVHRLIEAVHRAIEDVAKAAQKKGLDESAVEILAELSKELAKLSRRLAEISREIQKVVTDPDD |
| | KEAVERLKEIIKEIKKQLDELRDRLRKLQDLLYKLK (SEQ ID NO: 20637) |
| DHD60 | SEDKAHHDIVRVLEELIKIHDELMKISEEILKATSDSTATDETKEELKRRSKEAQKKSDTLVKIVKELEKESRKAQS |
| | (SEQ ID NO: 20638) |
| DHD60 | DDEEKYRQIIREAQEISKTAKRILRDAQEISKRIRHQGVDRSEHQRLVDLLRELIKEHHKLLRRQQEADTRND |
| | (SEQ ID NO: 20639) |
| DHD63 | DRKDKARKASEKLEEVIQRWKTVADKWKKMVDLVSNGKLSQEEVARVTEELLKIQTELAKLLEEHAKVLQESAS |
| | (SEQ ID NO: 20640) |
| DHD63 | SDEESIKTQSELIKTSEELLKDVKRIDEELQKLRDDPTLDESELKKRVKEWSDRVRKAKEISRKIQEIVKESKKRSS |
| | (SEQ ID NO: 20641) |
| DHD66 | DKDEELRKVIEKYREMVKEYRKVIREYEEVIKSSKTIDKSSLISLSRKMVELSQRVIDVSDEVAKVLSRKQS (SEQ |
| | ID NO: 20642) |
| DHD66 | TDEERLKKQTKELKEQTKQLEKQKDLLEKISNGEISKDEIQEIIKESKKIAKESQKALDSSRKALEEVS (SEQ ID |
| | NO: 20643) |
| DHD67 | DEKEVSKEI IKVLKDIAKVQQKVIEVSQRLASVLRADDDNVVKRALEEYEKILEELRELNKEIEKLTDKYRKVTS |
| | (SEQ ID NO: 20644) |
| DHD67 | DSDEQTKELEKLTELHKRHVEKLKKQTKESREVDSNKLWKSKDVKDKLSESEKELQKLSDQDKKAKDALESSRRKND |
| | (SEQ ID NO: 20645) |
| DHD69 | DAEEQLKLLTKLLRHQQRLLQLIKESLKLIEKIDQSSQENQDEIRKWREVTKKLRELIKTSEKLVRELEKSYKKSS |
| | (SEQ ID NO: 20646) |
| DHD69 | SLRDVVRRYQELVRRYDELIKTLTEILKKYQKKGAEDKDASTELVKAVRTSLKLSKELLKLNSELLKEDS (SEQ |
| | ID NO: 20647) |
| DHD71 | SKEELKRKLDELKKRSDTLKELSKKLKEISERNPDDKSVHRTIIRIHREFVKNHKEIVRVIEEIVSDKS (SEQ ID |
| | NO: 20648) |
| DHD71 | SKQDEHDRLLKIHDKLVKQHDELLKLLTKLSRAGDSVTKKKLEEILRKLQEVSKQLEESLKDADKVSKDIN (SEQ |
| | ID NO: 20649) |
| DHD72 | TVQSLLEQHVKIVKRSIEILERHTQILQDIARSQGVSKELEDVERQVKEYRKEVKKLEEDLRQLSRNSK (SEQ ID |
| | NO: 20650) |
| DHD72 | SDSDRIEKLIRESTELLKEQQKLAKRSRELAETVESLPLTEEYLKQQREHQKKIEKLLKDSEKHLEELKRLVKSEK |
| | (SEQ ID NO: 20651) |
| DHD73 | DSEKRIEDILRTDLELAKRDAELVKEHIKLVKRIDLSEELKKQVEDVEKESKKLEDSSEKLVQKVRKRSS (SEQ |
| | ID NO: 20652) |
| DHD73 | DEEERAKDLRKYLEEQTQYYRTVTEHLRNLEKVVEELERRGKPSSELQQILERSQRIYKETTEIYDTSKKLIEELDK |
| | HHR (SEQ ID NO: 20653) |
| DHD148 | PLEDILKRHLDKVRELVRLSEEVNKLAKEVLDILKDKRVDEKELDKVLKELEKVVEEYERAVKESRDLLRELRETTR |
| | (SEQ ID NO: 20654) |
| DHD148 | DKERLLEIHERIQKLLDRNLEIIERLLRLLREARDIKDDDKLDKVIKRLKELSEESKDILDKIKELLKESEKELT |
| | (SEQ ID NO: 20655) |
| DHD149 | PEDEVIRVIEELLRIAAEVDEVHRRNVEVQEEASRVTDRERLERLNRESEELIKRSRELIEEQRKLIERLERLAT |
| | (SEQ ID NO: 20656) |
| DHD149 | DLEELIKEYAEVVRRHHKAVRDLERLVRELANAKHASEEELKRIATEILRIVKELIRVQERLIKLSEDSNEESR |
| | (SEQ ID NO: 20657) |
| DHD150 | PTDEVIEVLKELLRIHRENLRVNEEIVEVNERASRVTDREELERLLRRSNELIKRSRELNEESKKLIEKLERLAT |
| | (SEQ ID NO: 20658) |
| DHD150 | DNEEIIKEARRVVEEYKKAVDRLEELVRRAENAKHASEKELKDIVREILRISKELNKVSERLIELWERSQERAR |
| | (SEQ ID NO: 20659) |
| DHD151 | PKEDIDRVSRELVRVHKELLEVLRKSTEIVEAVARNEKDERTIEEVLEEQERAVRKLEEVSKKHKEAVKRLK (SEQ |
| | ID NO: 20660) |
| DHD151 | ELERLSEEIQKLSDRLIELIRRHSKVLEEIVRLLKHKDNDEREVRRLLKLLRDLTRRYEEVLRKVEEIVKRQEDESR |
| | (SEQ ID NO: 20661) |
| DHD152 | PEEDILRLLRKLVEVDKELLEVVRESTEVVRLVARNEKDVETVERVLRKQEEVVRKYERVSRELEEAVRRLK (SEQ |
| | ID NO: 20662) |
| DHD152 | ELKDLVEEIVKLSKENLKLWEDHSRVLEEIVRLLKHKDNDEREVRRLLKLLEDLTRRAEETSRRIEEIVKEAEDRAR |
| | (SEQ ID NO: 20663) |
| DHD153 | DEERELREVLRKHHRVVREWTKVVEELKRVVELLKRGETSEEDLLRVLKKLLEMDKRILEVNREVLRVLEKRLT |
| | (SEQ ID NO: 20664) |
| DHD153 | SLEEIIEELVELVRRSVEIAKESDEVARRIVESEDKKKELIDTLRDLHREWQEVTKRAEELVREAEKEVR (SEQ |
| | ID NO: 20665) |
| DHD154 | TAEELLEVHKKSDRVTKEHLRVSEEILKVVEVLTRGEVSSEVLKRVLRKLEELTDKLRRVTEEQRRVVEKLN (SEQ |
| | ID NO: 20666) |
| DHD154 | DLEDLLRRLRRLVDEQRRLVEELERVSRRLEKAVRDNEDERELARLSREHSDIQDKHDKLAREILEVLKRLLERTE |
| | (SEQ ID NO: 20667) |
| DHD155 | PEDDVVRIIKEDLESNREVLREQKEIHRILELVTRGEVSEEAIDRVLKRQEDLLKKQKESTDKARKVVEERR (SEQ |
| | ID NO: 20668) |
| DHD155 | DEVRLITEWLKLSEESTRLLKELVELTRLLRNNVPNVEEILREHERISRELERLSRRLKDLADKLERTRR (SEQ |
| | ID NO: 20669) |
| DHD156 | DEDEVVKVHEEHVKSHEEIHRSHEEVVRAAEEDKRDSRELRTLMEEHRKLLEENEKSIEEVKKIHERVKR (SEQ |
| | ID NO: 20670) |
| DHD156 | KKEELIDISKEVLDLDDEINKISKEILELIKKLLRLKEEGREDKDKAREVKRRIRELHRRIQELNKRLRELHKRVQE |
| | TKR (SEQ ID NO: 20671) |
| DHD157 | PEEDIARRVEDLLRKSEELIKESEKILKESKRLLDRNDSDKRVLETNLRLIDKHTKLLERNLELLEELLKLAEDVAK |
| | (SEQ ID NO: 20672) |
| DHD157 | RFKDLSREYIEVVKRLLELSREALEVLREIKDTDKTDKKRIKELIDRLRKLIEEYKRIIDRLRKLSKDLEEEHR |
| | (SEQ ID NO: 20673) |
| DHD158 | DEEELVKILKELQRLSEESLEINKRLVEILRLLRRGEVPKEEVEKKLREIKKEQEKLDREHEKIKKRIEEITK |
| | (SEQ ID NO: 20674) |
| DHD158 | SLKEKILEIIERNMKLVELSNRSVEIVARILKGEKDDEETLERLLREWDKITRDYEEIIKESRKLVKELEEEAK |
| | (SEQ ID NO: 20675) |
| DHD159 | SKTEILRKALEIHKEQIDIVRKLIELSEEVLKLVEESKEKNLEKLKRIDEETDRLLERLDELHKRLTELAERLK |
| | (SEQ ID NO: 20676) |
| DHD159 | SDDEARKQLEEMKRRLREVEKKSKRVEERVRELERLVRENREDEDRVLKTLEDLLRENEKLVRTIERHVREQRELSK |
| | EVK (SEQ ID NO: 20677) |
| DHD160 | SEEELEKKADELRKLSEEWRKLQEEDKRLSEMVEKGELDLQEVDEHSLRVLERATEVHRTVDKVIEEILRTTN |
| | (SEQ ID NO: 20678) |
| DHD160 | SEKERHRESQETQEEIRRTHEEIIRKLEEILRRAKAGELPEETLDRLRRIMERLKELSERLDDLVRKLRDDHRREQK |
| | (SEQ ID NO: 20679) |
| DHD161 | SEKEILEELKRILKRVKDISDRLEELDKRTEEIARREPTKELVDELVKIHRDWLRLHEEILKLVDDALKKVEDATK |
| | (SEQ ID NO: 20680) |
| DHD161 | DLRELLELQREASRLHRELVKLLTELVKKLELIAKGEDIREEDLKRIKERLEEIKKRSKRIKEESDEIDKKTK |
| | (SEQ ID NO: 20681) |
| DHD162 | SERELQRELNKIVRRILEIHREVSELHQRAVKLIRENDNSEELEEISRRIEELSKELEKLVREHDEIVKTIE (SEQ |
| | ID NO: 20682) |
| DHD162 | SEREKLDRNDEELKEINKRVEEIKERSDRITEAIEKNERSEEEIRRLSREQNEALQRLLELHKKLVKLHRELLEDTR |
| | (SEQ ID NO: 20683) |
| DHD163 | DKEDVIRVHDEQHKLIEEQLELTRRIAELVREIAKNTASEEEIKEMLKEIKRLDDRSREIQDRLQKLLEEIRRKTK |
| | (SEQ ID NO: 20684) |
| DHD163 | TEEEIVELNKDI QRKSKEHIDLQNELVKKIERAIRENNITEELLEELERLLRESEKIVEEIRRITDKIRKDAK |
| | (SEQ ID NO: 20685) |
| DHD164 | SEKEILERLLRLSKEQNEISEEIHRLTERLVELKRRKDDDERLKRILDRQKRLVERAREISKEYEDLLRKLE ( SEQ |
| | ID NO: 20686) |
| DHD164 | SMEELLRKNARLSRKQLKIIDEHLELSTKLTRGEAGDETLEEIERRSREMLEEQRRVDEESKRIREKLK (SEQ ID |
| | NO: 20687) |
| DHD165 | SEEEIRDIVEKLLRTHEEVLKEIKKLLDDSERVRRRELDKKDLDRIQKEQRDIQEENKEKAKRFDELVKELKKAAK |
| | (SEQ ID NO: 20688) |
| DHD165 | SEEEHRRTMEKVEKEVRDIKRRSEEVKKKVKANTLSEEDLVRLLERLVEDHKRLQDLSQEIIERDEKATK (SEQ |
| | ID NO: 20689) |
| DHD166 | DEDELAKEIEDVQRRNKESQEEHDKSVKKLEAAERGEIDEDSLLRVLEEDIKVLEKDIEVLERSIEVIEKAE (SEQ |
| | ID NO: 20690) |
| DHD166 | SEKELIRRLLEQQRQHLRLSERLIELSRRLVEVVRKGKDNRDLLRELKKLSEEHKKHSKDDHEKVREIREREK |
| | (SEQ ID NO: 20691) |
| SYNZIP1 | NLVAQLENEVASLENENETLKKKNLHKKDLIAYLEKEIANLRKKIEE (SEQ ID NO: 20692) |
| SYNZIP2 | ARNAYLRKKIARLKKDNLQLERDEQNLEKIIANLRDEIARLENEVASHEQ (SEQ ID NO: 20693) |
| SYNZIP3 | NEVTTLENDAAFIENENAYLEKEIARLRKEKAALRNRLAHKK (SEQ ID NO: 20694) |
| SYNZIP4 | QKVAELKNRVAVKLNRNEQLKNKVEELKNRNAYLKNELATLENEVARLENDVAE (SEQ ID NO: 20695) |
| SYNZIP5 | NTVKELKNYIQELEERNAELKNLKEHLKFAKAELEFELAAHKFE (SEQ ID NO: 20696) |
| SYNZIP6 | QKVAQLKNRVAYKLKENAKLENIVARLENDNANLEKDIANLEKDIANLERDVAR (SEQ ID NO: 20697) |
| SYNZIP7 | KEIEYLEKEIERLKDLREHLKQDNAAHRQELNALRLEEAKLEFILAHLLST (SEQ ID NO: 20698) |
| SYNZIP8 | KEIANLEKEIASLEKKVAVLKQRNAAHKQEVAALRKEIAYVEDEIQYVEDE (SEQ ID NO: 20699) |
| SYNZIP9 | QKVESLKQKIEELKQRKAQLKNDIANLEKEIAYAET (SEQ ID NO: 20700) |
| SYNZIP10 | NLLATLRSTAAVLENENHVLEKEKEKLRKEKEQLLNKLEAYK (SEQ ID NO: 20701) |
| SYNZIP11 | ELTDELKNKKEALRKDNAALLNELASLENEIANLEKEIAYFK (SEQ ID NO: 20702) |
| SYNZIP12 | NEDLVLENRLAALRNENAALENDLARLEKEIAYLEKEIEREK (SEQ ID NO: 20703) |
| SYNZIP13 | QKVEELKNKIAELENRNAVKKNRVAHLKQEIAYLKDELAAHEFE (SEQ ID NO: 20704) |
| SYNZIP14 | NDLDAYEREAEKLEKKNEVLRNRLAALENELATLRQEVASMKQELQS (SEQ ID NO: 20705) |
| SYNZIP15 | FENVTHEFILATLENENAKLRRLEAKLERELARLRNEVAWL (SEQ ID NO: 20706) |
| SYNZIP16 | NILASLENKKEELKKLNAHLLKEIENLEKEIANLEKEIAYFK (SEQ ID NO: 20707) |
| SYNZIP17 | NEKEELKSKKAELRNRIEQLKQKREQLKQKIANLRKEIEAYK (SEQ ID NO: 20708) |
| SYNZIP18 | SIAATLENDLARLENENARLEKDIANLERDLAKLEREEAYF (SEQ ID NO: 20709) |
| SYNZIP19 | NELESLENKKEELKNRNEELKQKREQLKQKLAALRNKLDAYKNRL (SEQ ID NO: 20710) |
| SYNZIP20 | STVEELLRAIQELEKRNAELKNRKEELKNLVAHLRQELAAHKYE (SEQ ID NO: 20711) |
| SYNZIP21 | NEVAQLENDVAVIENENAYLEKEIARLRKEIAALRDRLAHKK (SEQ ID NO: 20712) |
| SYNZIP22 | KRIAYLRKKIAALKKDNANLEKDIANLENEIERLIKEIKTLENEVASHEQ (SEQ ID NO: 20713) |

[0400] In some embodiments, a pair of dimerization domains as described herein bind noncovalently to each other.

[0401] In some embodiments, a pair of dimerization domains as described herein bind covalently, e.g., to form a fusion (e.g., an intein mediated fusion, e.g., as described herein). In embodiments, a pair of intein dimerization domains comprise a Chain A sequence (or a sequence having at least 75%, 80%, 85%, 90%, 95%, 96%, 97%, 98%, or 99% identity thereto) and a Chain B sequence (or a sequence having at least 75%, 80%, 85%, 90%, 95%, 96%, 97%, 98%, or 99% identity thereto), as listed in a single row of Table 33.

### Localization Sequences for Gene Modifying Systems

[0402] In certain embodiments, a gene editor system RNA further comprises an intracellular localization sequence, e.g., a nuclear localization sequence (NLS). In some embodiments, a gene modifying polypeptide comprises an NLS as comprised in SEQ ID NO: 4000 and/or SEQ ID NO: 4001, or an NLS having an amino acid sequence having at least 75%, 80%, 85%, 90%, 95%, 96%, 97%, 98%, or 99% identity thereto.

[0403] The nuclear localization sequence may be an RNA sequence that promotes the import of the RNA into the nucleus. In certain embodiments the nuclear localization signal is located on the template RNA. In certain embodiments, the gene modifying polypeptide is encoded on a first RNA, and the template RNA is a second, separate, RNA, and the nuclear localization signal is located on the template RNA and not on an RNA encoding the gene modifying polypeptide. While not wishing to be bound by theory, in some embodiments, the RNA encoding the gene modifying polypeptide is targeted primarily to the cytoplasm to promote its translation, while the template RNA is targeted primarily to the nucleus to promote insertion into the genome. In some embodiments the nuclear localization signal is at the 3′ end, 5′ end, or in an internal region of the template RNA. In some embodiments the nuclear localization signal is 3′ of the heterologous sequence (e.g., is directly 3′ of the heterologous sequence) or is 5′ of the heterologous sequence (e.g., is directly 5′ of the heterologous sequence). In some embodiments the nuclear localization signal is placed outside of the 5′ UTR or outside of the 3′ UTR of the template RNA. In some embodiments the nuclear localization signal is placed between the 5′ UTR and the 3′ UTR, wherein optionally the nuclear localization signal is not transcribed with the transgene (e.g., the nuclear localization signal is an anti-sense orientation or is downstream of a transcriptional termination signal or polyadenylation signal). In some embodiments the nuclear localization sequence is situated inside of an intron. In some embodiments a plurality of the same or different nuclear localization signals are in the RNA, e.g., in the template RNA. In some embodiments the nuclear localization signal is less than 5, 10, 25, 50, 75, 100, 150, 200, 250, 300, 350, 400, 450, 500, 600, 700, 800, 900 or 1000 bp in length. Various RNA nuclear localization sequences can be used. For example, Lubelsky and Ulitsky, Nature 555 (107-111), 2018 describe RNA sequences which drive RNA localization into the nucleus. In some embodiments, the nuclear localization signal is a SINE-derived nuclear RNA localization (SIRLOIN) signal. In some embodiments the nuclear localization signal binds a nuclear-enriched protein. In some embodiments the nuclear localization signal binds the HNRNPK protein. In some embodiments the nuclear localization signal is rich in pyrimidines, e.g., is a C/T rich, C/U rich, C rich, T rich, or U rich region. In some embodiments the nuclear localization signal is derived from a long non-coding RNA. In some embodiments the nuclear localization signal is derived from MALATI long non-coding RNA or is the 600 nucleotide M region of MALATI (described in Miyagawa et al., RNA 18, (738-751), 2012). In some embodiments the nuclear localization signal is derived from BORG long non-coding RNA or is a AGCCC motif (described in Zhang et al., Molecular and Cellular Biology 34, 2318-2329 (2014). In some embodiments the nuclear localization sequence is described in Shukla et al., The EMBO Journal e98452 (2018). In some embodiments the nuclear localization signal is derived from a retrovirus.

[0404] In some embodiments, a polypeptide described herein comprises one or more (e.g., 2, 3, 4, 5) nuclear targeting sequences, for example a nuclear localization sequence (NLS). In some embodiments, the NLS is a bipartite NLS. In some embodiments, an NLS facilitates the import of a protein comprising an NLS into the cell nucleus. In some embodiments, the NLS is fused to the N-terminus of a gene modifying polypeptide as described herein. In some embodiments, the NLS is fused to the C-terminus of the gene modifying polypeptide. In some embodiments, the NLS is fused to the N-terminus or the C-terminus of a Cas domain. In some embodiments, a linker sequence is disposed between the NLS and the neighboring domain of the gene modifying polypeptide.

[0405] In some embodiments, an NLS comprises the amino acid sequence MDSLLMNRRKFLYQFKNVRWAKGRRETYLC (SEQ ID NO: 9), PKKRKVEGADKRTADGSEFESPKKKRKV (SEQ ID NO: 10), RKSGKIAAIWKRPRKPKKKRKV (SEQ ID NO: 11) KRTADGSEFESPKKKRKV (SEQ ID NO: 12), KKTELQTTNAENKTKKL (SEQ ID NO: 13), or KRGINDRNFWRGENGRKTR (SEQ ID NO: 14), KRPAATKKAGQAKKKK (SEQ ID NO: 15), or a functional fragment or variant thereof. Exemplary NLS sequences are also described in PCT/EP2000/011690, the contents of which are incorporated herein by reference for their disclosure of exemplary nuclear localization sequences. In some embodiments, an NLS comprises an amino acid sequence as disclosed in Table 11. An NLS of this table may be utilized with one or more copies in a polypeptide in one or more locations in a polypeptide, e.g., 1, 2, 3 or more copies of an NLS in an N-terminal domain, between peptide domains, in a C-terminal domain, or in a combination of locations, in order to improve subcellular localization to the nucleus. Multiple unique sequences may be used within a single polypeptide. Sequences may be naturally monopartite or bipartite, e.g., having one or two stretches of basic amino acids, or may be used as chimeric bipartite sequences. Sequence references correspond to UniProt accession numbers, except where indicated as SeqNLS for sequences mined using a subcellular localization prediction algorithm (Lin et al BMC Bioinformat 13:157 (2012), incorporated herein by reference in its entirety).

TABLE 11
Exemplary nuclear localization signals for use in gene modifying systems

| Sequence | Sequence References | SEQ ID No. |
|---|---|---|
| AHFKISGEKRPSTDPGKKAK | Q76IQ7 | 223 |
| NPKKKKKKDP | | |
| AHRAKKMSKTHA | P21827 | 224 |
| ASPEYVNLPINGNG | SeqNLS | 225 |
| CTKRPRW | O88622, Q86W56, Q9QYM2, O02776 | 226 |
| DKAKRVSRNKSEKKRR | O15516, Q5RAK8, Q91YB2, Q91YB0, | 227 |
| | Q8QGQ6, O08785, Q9WVS9, Q6YGZ4 | |
| EELRLKEELLKGIYA | Q9QY16, Q9UHL0, Q2TBP1, Q9QY15 | 228 |
| EEQLRRRKNSRLNNTG | G5EFF5 | 229 |
| EVLKVIRTGKRKKKAWKR | SeqNLS | 230 |
| MVTKVC | | |
| HHHHHHHHHHHHQPH | Q63934, G3V7L5, Q12837 | 231 |
| HKKKHPDASVNFSEFSK | P10103, Q4R844, P12682, BOCM99, | 232 |
| | A9RA84, Q6YKA4, P09429, P63159, | |
| | Q08IE6, P63158, Q9YH06, B1MTB0 | |
| HKRTKK | Q2R2D5 | 233 |
| IINGRKLKLKKSRRRSSQTS | SeqNLS | 234 |
| NNSFTSRRS | | |
| KAEQERRK | Q8LH59 | 235 |
| KEKRKRREELFIEQKKRK | SeqNLS | 236 |
| KKGKDEWFSRGKKP | P30999 | 237 |
| KKGPSVQKRKKT | Q6ZN17 | 238 |
| KKKTVINDLLHYKKEK | SeqNLS, P32354 | 239 |
| KKNGGKGKNKPSAKIKK | SeqNLS | 240 |
| KKPKWDDFKKKKK | Q15397, Q8BKS9, Q562C7 | 241 |
| KKRKKD | SeqNLS, Q91Z62, Q1A730, Q969P5, | 242 |
| | Q2KHT6, Q9CPU7 | |
| KKRRKRRRK | SeqNLS | 243 |
| KKRRRRARK | Q9UMS6, D4A702, Q91YE8 | 244 |
| KKSKRGR | Q9UBS0 | 245 |
| KKSRKRGS | B4FG96 | 246 |
| KKSTALSRELGKIMRRR | SeqNLS, P32354 | 247 |
| KKSYQDPEIIAHSRPRK | Q9U7C9 | 248 |
| KKTGKNRKLKSKRVKTR | Q9Z301, O54943, Q8K3T2 | 249 |
| KKVSIAGQSGKLWRWKR | Q6YUL8 | 250 |
| KKYENVVIKRSPRKRGRPR | SeqNLS | 251 |
| K | | |
| KNKKRK | SeqNLS | 252 |
| KPKKKR | SeqNLS | 253 |
| KRAMKDDSHGNSTSPKRRK | Q0E671 | 254 |
| KRANSNLVAAYEKAKKK | P23508 | 255 |
| KRASEDTTSGSPPKKSSAGP | Q9BZZ5, Q5R644 | 256 |
| KR | | |
| KRFKRRWMVRKMKTKK | SeqNLS | 257 |
| KRGLNSSFETSPKKVK | Q8IV63 | 258 |
| KRGNSSIGPNDLSKRKQRK | SeqNLS | 259 |
| K | | |
| KRIHSVSLSQSQIDPSKKVK | SeqNLS | 260 |
| RAK | | |
| KRKGKLKNKGSKRKK | O15381 | 26 |
| KRRRRRRREKRKR | Q96GM8 | 262 |
| KRSNDRTYSPEEEKQRRA | Q91ZF2 | 263 |
| KRTVATNGDASGAHRAKK | SeqNLS | 264 |
| MSK | | |
| KRVYNKGEDEQEHLPKGKK | SeqNLS | 265 |
| R | | |
| KSGKAPRRRAVSMDNSNK | Q9WVH4, O43524 | 266 |
| KVNFLDMSLDDIIIYKELE | Q9P127 | 267 |
| KVQHRIAKKTTRRRR | Q9DXE6 | 268 |
| LSPSLSPL | Q9Y261, P32182, P35583 | 269 |
| MDSLLMNRRKFLYQFKNVR | Q9GZX7 | 270 |
| WAKGRRETYLC | | |
| MPQNEYIELHRKRYGYRLD | SeqNLS | 271 |
| YHEKKRKKESREAHERSKK | | |
| AKKMIGLKAKLYHK | | |
| MVQLRPRASR | SeqNLS | 272 |
| NNKLLAKRRKGGASPKDDP | Q965G5 | 273 |
| MDDIK | | |
| NYKRPMDGTYGPPAKRHEG | O14497, A2BH40 | 274 |
| E | | |
| PDTKRAKLDSSETTMVKKK | SeqNLS | 275 |
| PEKRTKI | SeqNLS | 276 |
| PGGRGKKK | Q719N1, Q9UBP0, A2VDN5 | 277 |
| PGKMDKGEHRQERRDRPY | Q01844, Q61545 | 278 |
| PKKGDKYDKTD | Q45FA5 | 279 |
| PKKKSRK | O35914, Q01954 | 280 |
| PKKNKPE | Q22663 | 281 |
| PKKRAKV | P04295, P89438 | 282 |
| PKPKKLKVE | P55263, P55262, P55264, Q64640 | 283 |
| PKRGRGR | Q9FYS5, Q43386 | 284 |
| PKRRLVDDA | P0C797 | 285 |
| PKRRRTY | SeqNLS | 286 |
| PLFKRR | A8X6H4, Q9TXJ0 | 287 |
| PLRKAKR | Q86WB0, Q5R8V9 | 288 |
| PPAKRKCIF | Q6AZ28, O75928, Q8C5D8 | 289 |
| PPARRRRL | Q8NAG6 | 290 |
| PPKKKRKV | Q3L6L5, P03070, P14999, P03071 | 291 |
| PPNKRMKVKH | Q8BN78 | 292 |
| PPRIYPQLPSAPT | P0C799 | 293 |
| PQRSPFPKSSVKR | SeqNLS | 294 |
| PRPRKVPR | P0C799 | 295 |
| PRRRVQRKR | SeqNLS, Q5R448, Q5TAQ9 | 296 |
| PRRVRLK | Q58DJ0, P56477, Q13568 | 297 |
| PSRKRPR | Q62315, Q5F363, Q92833 | 298 |
| PSSKKRKV | SeqNLS | 299 |
| PTKKRVK | P07664 | 300 |
| QRPGPYDRP | SeqNLS | 301 |
| RGKGGKGLGKGGAKRHRK | SeqNLS | 302 |
| RKAGKGGGGHKTTKKRSA | B4FG96 | 303 |
| KDEKVP | | |
| RKIKLKRAK | A1L3G9 | 304 |
| RKIKRKRAK | B9X187 | 305 |
| RKKEAPGPREELRSRGR | O35126, P54258, Q5IS70, P54259 | 306 |
| RKKRKGK | SeqNLS, Q29243, Q62165, Q28685, | 307 |
| | O18738, Q9TSZ6, Q14118 | |
| RKKRRQRRR | P04326, P69697, P69698, P05907, | 308 |
| | P20879, P04613, P19553, P0C1J9, | |
| | P20893, P12506, P04612, Q73370, | |
| | P0C1K0, P05906, P35965, P04609, | |
| | P04610, P04614, P04608, P05905 | |
| RKKSIPLSIKNLKRKHKRKK | Q9C0C9 | 309 |
| NKITR | | |
| RKLVKPKNTKMKTKLRTNP | Q14190 | 310 |
| Y | | |
| RKRLILSDKGQLDWKK | SeqNLS, Q91Z62, Q1A730, Q2KHT6, | 311 |
| | Q9CPU7 | |
| RKRLKSK | Q13309 | 312 |
| RKRRVRDNM | Q8QPH4, Q809M7, A8C8X1, Q2VNC5, | 313 |
| | Q38SQ0, 089749, Q6DNQ9, Q809L9, | |
| | Q0A429, Q20NV3, P16509, P16505, | |
| | Q6DNQ5, P16506, Q6XT06, P26118, | |
| | Q2ICQ2, Q2RCG8, Q0A2DO, Q0A2H9, | |
| | Q9IQ46, Q809M3, Q6J847, Q6J856, | |
| | B4URE4, A4GCM7, Q0A440, P26120, | |
| | P16511, | |
| RKRSPKDKKEKDLDGAGKR | Q7RTP6 | 314 |
| RKT | | |
| RKRTPRVDGQTGENDMNK | O94851 | 315 |
| RRRK | | |
| RLPVRRRRRR | P04499, P12541, P03269, P48313, | 316 |
| | P03270 | |
| RLRFRKPKSK | P69469 | 317 |
| RQQRKR | Q14980 | 318 |
| RRDLNSSFETSPKKVK | Q8K3G5 | 319 |
| RRDRAKLR | Q9SLB8 | 320 |
| RRGDGRRR | Q80WE1, Q5R9B4, Q06787, P35922 | 321 |
| RRGRKRKAEKQ | Q812D1, Q5XXA9, Q99JF8, Q8MJG1, | 322 |
| | Q66T72, O75475 | |
| RRKKRR | QOVD86, Q58DS6, Q5R6G2, Q9ERI5, | 323 |
| | Q6AYK2, Q6NYC1 | |
| RRKRSKSEDMDSVESKRRR | Q7TT18 | 324 |
| RRKRSR | Q99PU7, D3ZHS6, Q92560, A2VDM8 | 325 |
| RRPKGKTLQKRKPK | Q6ZN17 | 326 |
| RRRGFERFGPDNMGRKRK | Q63014, Q9DBRO | 327 |
| RRRGKNKVAAQNCRK | SeqNLS | 328 |
| RRRKRR | Q5FVH8, Q6MZT1, Q08DH5, Q8BQP9 | 329 |
| RRRQKQKGGASRRR | SeqNLS | 330 |
| RRRREGPRARRRR | P08313, P10231 | 331 |
| RRTIRLKLVYDKCDRSCKIQ | SeqNLS | 332 |
| KKNRNKCQYCRFHKCLSVG | | |
| MSHNAIRFGRMPRSEKAKL | | |
| KAE | | |
| RRVPQRKEVSRCRKCRK | Q5RJN4, Q32L09, Q8CAK3, Q9NUL5 | 333 |
| RVGGRRQAVECIEDLLNEP | P03255 | 334 |
| GQPLDLSCKRPRP | | |
| RVVKLRIAP | P52639, Q8JMNO | 335 |
| RVVRRR | P70278 | 336 |
| SKRKTKISRKTR | Q5RAY1, O00443 | 337 |
| SYVKTVPNRTRTYIKL | P21935 | 338 |
| TGKNEAKKRKIA | P52739, Q8K3J5, Q5RAU9 | 339 |
| TLSPASSPSSVSCPVIPASTD | SeqNLS | 340 |
| ESPGSALNI | | |
| VSKKQRTGKKIH | P52739, Q8K3J5, Q5RAU9 | 341 |
| SPKKKRKVE | | 342 |
| KRTADGSEFESPKKKRKVE | | 343 |
| PAAKRVKLD | | 344 |
| PKKKRKV | | 345 |
| MDSLLMNRRKFLYQFKNVR | | 346 |
| WAKGRRETYLC | | |
| SPKKKRKVEAS | | 347 |
| MAPKKKRKVGIHRGVP | | 348 |

[0406] In some embodiments, the NLS is a bipartite NLS. A bipartite NLS typically comprises two basic amino acid clusters separated by a spacer sequence (which may be, e.g., about 10 amino acids in length). A monopartite NLS typically lacks a spacer. An example of a bipartite NLS is the nucleoplasmin NLS, having the sequence KR[IPAATKKAGQA]KKKK (SEQ ID NO: 15), wherein the spacer is bracketed. Another exemplary bipartite NLS has the sequence PKKKRKVEGADKRTADGSEFESPKKKRKV (SEQ ID NO: 16). Exemplary NLSs are described in International Application WO2020051561, which is herein incorporated by reference in its entirety, including for its disclosures regarding nuclear localization sequences.

[0407] In certain embodiments, a gene editor system polypeptide (e.g., a gene modifying polypeptide as described herein) further comprises an intracellular localization sequence, e.g., a nuclear localization sequence and/or a nucleolar localization sequence. The nuclear localization sequence and/or nucleolar localization sequence may be amino acid sequences that promote the import of the protein into the nucleus and/or nucleolus, where it can promote integration of heterologous sequence into the genome. In certain embodiments, a gene editor system polypeptide (e.g., (e.g., a gene modifying polypeptide as described herein) further comprises a nucleolar localization sequence. In certain embodiments, the gene modifying polypeptide is encoded on a first RNA, and the template RNA is a second, separate, RNA, and the nucleolar localization signal is encoded on the RNA encoding the gene modifying polypeptide and not on the template RNA. In some embodiments, the nucleolar localization signal is located at the N-terminus, C-terminus, or in an internal region of the polypeptide. In some embodiments, a plurality of the same or different nucleolar localization signals are used. In some embodiments, the nuclear localization signal is less than 5, 10, 25, 50, 75, or 100 amino acids in length. Various polypeptide nucleolar localization signals can be used. For example, Yang et al., Journal of Biomedical Science 22, 33 (2015), describe a nuclear localization signal that also functions as a nucleolar localization signal. In some embodiments, the nucleolar localization signal may also be a nuclear localization signal. In some embodiments, the nucleolar localization signal may overlap with a nuclear localization signal. In some embodiments, the nucleolar localization signal may comprise a stretch of basic residues. In some embodiments, the nucleolar localization signal may be rich in arginine and lysine residues. In some embodiments, the nucleolar localization signal may be derived from a protein that is enriched in the nucleolus. In some embodiments, the nucleolar localization signal may be derived from a protein enriched at ribosomal RNA loci. In some embodiments, the nucleolar localization signal may be derived from a protein that binds rRNA. In some embodiments, the nucleolar localization signal may be derived from MSP58. In some embodiments, the nucleolar localization signal may be a monopartite motif. In some embodiments, the nucleolar localization signal may be a bipartite motif. In some embodiments, the nucleolar localization signal may consist of a multiple monopartite or bipartite motifs. In some embodiments, the nucleolar localization signal may consist of a mix of monopartite and bipartite motifs. In some embodiments, the nucleolar localization signal may be a dual bipartite motif. In some embodiments, the nucleolar localization motif may be a KRASSQALGTIPKRRSSSRFIKRKK (SEQ ID NO: 17). In some embodiments, the nucleolar localization signal may be derived from nuclear factor-KB-inducing kinase. In some embodiments, the nucleolar localization signal may be an RKKRKKK motif (SEQ ID NO: 18) (described in Birbach et al., Journal of Cell Science, 117 (3615-3624), 2004).

### Evolved Variants of Gene Modifying Polypeptides and Systems

[0408] In some embodiments, the invention provides evolved variants of gene modifying polypeptides as described herein. Evolved variants can, in some embodiments, be produced by mutagenizing a reference gene modifying polypeptide, or one of the fragments or domains comprised therein. In some embodiments, one or more of the domains (e.g., the reverse transcriptase domain) is evolved. One or more of such evolved variant domains can, in some embodiments, be evolved alone or together with other domains. An evolved variant domain or domains may, in some embodiments, be combined with unevolved cognate component(s) or evolved variants of the cognate component(s), e.g., which may have been evolved in either a parallel or serial manner.

[0409] In some embodiments, the process of mutagenizing a reference gene modifying polypeptide, or fragment or domain thereof, comprises mutagenizing the reference gene modifying polypeptide or fragment or domain thereof. In embodiments, the mutagenesis comprises a continuous evolution method (e.g., PACE) or non-continuous evolution method (e.g., PANCE), e.g., as described herein. In some embodiments, the evolved gene modifying polypeptide, or a fragment or domain thereof, comprises one or more amino acid variations introduced into its amino acid sequence relative to the amino acid sequence of the reference gene modifying polypeptide, or fragment or domain thereof. In embodiments, amino acid sequence variations may include one or more mutated residues (e.g., conservative substitutions, non-conservative substitutions, or a combination thereof) within the amino acid sequence of a reference gene modifying polypeptide, e.g., as a result of a change in the nucleotide sequence encoding the gene modifying polypeptide that results in, e.g., a change in the codon at any particular position in the coding sequence, the deletion of one or more amino acids (e.g., a truncated protein), the insertion of one or more amino acids, or any combination of the foregoing. The evolved variant gene modifying polypeptide may include variants in one or more components or domains of the gene modifying polypeptide (e.g., variants introduced into a reverse transcriptase domain).

[0410] In some aspects, the disclosure provides gene modifying polypeptides, systems, kits, and methods using or comprising an evolved variant of a gene modifying polypeptide, e.g., employs an evolved variant of a gene modifying polypeptide or a gene modifying polypeptide produced or producible by PACE or PANCE. In embodiments, the unevolved reference gene modifying polypeptide is a gene modifying polypeptide as disclosed herein.

[0411] The term “phage-assisted continuous evolution (PACE),” as used herein, generally refers to continuous evolution that employs phage as viral vectors. Examples of PACE technology have been described, for example, in International PCT Application No. PCT/US 2009/056194, filed Sep. 8, 2009, published as WO 2010/028347 on Mar. 11, 2010; International PCT Application, PCT/US2011/066747, filed Dec. 22, 2011, published as WO 2012/088381 on Jun. 28, 2012; U.S. Pat. No. 9,023,594, issued May 5, 2015; U.S. Pat. No. 9,771,574, issued Sep. 26, 2017; U.S. Pat. No. 9,394,537, issued Jul. 19, 2016; International PCT Application, PCT/US2015/012022, filed Jan. 20, 2015, published as WO 2015/134121 on Sep. 11, 2015; U.S. Pat. No. 10,179,911, issued Jan. 15, 2019; and International PCT Application, PCT/US2016/027795, filed Apr. 15, 2016, published as WO 2016/168631 on Oct. 20, 2016, the entire contents of each of which are incorporated herein by reference.

[0412] The term “phage-assisted non-continuous evolution (PANCE),” as used herein, generally refers to non-continuous evolution that employs phage as viral vectors. Examples of PANCE technology have been described, for example, in Suzuki T. et al, Crystal structures reveal an elusive functional domain of pyrrolysyl-tRNA synthetase, Nat Chem Biol. 13(12): 1261-1266 (2017), incorporated herein by reference in its entirety. Briefly, PANCE is a technique for rapid in vivo directed evolution using serial flask transfers of evolving selection phage (SP), which contain a gene of interest to be evolved, across fresh host cells (e.g., E. coli cells). Genes inside the host cell may be held constant while genes contained in the SP continuously evolve. Following phage growth, an aliquot of infected cells may be used to transfect a subsequent flask containing host E. coli. This process can be repeated and/or continued until the desired phenotype is evolved, e.g., for as many transfers as desired.

[0413] Methods of applying PACE and PANCE to gene modifying polypeptides may be readily appreciated by the skilled artisan by reference to, inter alia, the foregoing references. Additional exemplary methods for directing continuous evolution of genome-modifying proteins or systems, e.g., in a population of host cells, e.g., using phage particles, can be applied to generate evolved variants of gene modifying polypeptides, or fragments or subdomains thereof. Non-limiting examples of such methods are described in International PCT Application, PCT/US2009/056194, filed Sep. 8, 2009, published as WO 2010/028347 on Mar. 11, 2010; International PCT Application, PCT/US2011/066747, filed Dec. 22, 2011, published as WO 2012/088381 on Jun. 28, 2012; U.S. Pat. No. 9,023,594, issued May 5, 2015; U.S. Pat. No. 9,771,574, issued Sep. 26, 2017; U.S. Pat. No. 9,394,537, issued Jul. 19, 2016; International PCT Application, PCT/US2015/012022, filed Jan. 20, 2015, published as WO 2015/134121 on Sep. 11, 2015; U.S. Pat. No. 10,179,911, issued Jan. 15, 2019; International Application No. PCT/US2019/37216, filed Jun. 14, 2019, International Patent Publication WO 2019/023680, published Jan. 31, 2019, International PCT Application, PCT/US2016/027795, filed Apr. 15, 2016, published as WO 2016/168631 on Oct. 20, 2016, and International Patent Publication No. PCT/US2019/47996, filed Aug. 23, 2019, each of which is incorporated herein by reference in its entirety.

[0414] In some non-limiting illustrative embodiments, a method of evolution of a evolved variant gene modifying polypeptide, of a fragment or domain thereof, comprises: (a) contacting a population of host cells with a population of viral vectors comprising the gene of interest (the starting gene modifying polypeptide or fragment or domain thereof), wherein: (1) the host cell is amenable to infection by the viral vector; (2) the host cell expresses viral genes required for the generation of viral particles; (3) the expression of at least one viral gene required for the production of an infectious viral particle is dependent on a function of the gene of interest; and/or (4) the viral vector allows for expression of the protein in the host cell, and can be replicated and packaged into a viral particle by the host cell. In some embodiments, the method comprises (b) contacting the host cells with a mutagen, using host cells with mutations that elevate mutation rate (e.g., either by carrying a mutation plasmid or some genome modification—e.g., proofing-impaired DNA polymerase, SOS genes, such as UmuC, UmuD′, and/or RecA, which mutations, if plasmid-bound, may be under control of an inducible promoter), or a combination thereof. In some embodiments, the method comprises (c) incubating the population of host cells under conditions allowing for viral replication and the production of viral particles, wherein host cells are removed from the host cell population, and fresh, uninfected host cells are introduced into the population of host cells, thus replenishing the population of host cells and creating a flow of host cells. In some embodiments, the cells are incubated under conditions allowing for the gene of interest to acquire a mutation. In some embodiments, the method further comprises (d) isolating a mutated version of the viral vector, encoding an evolved gene product (e.g., an evolved variant gene modifying polypeptide, or fragment or domain thereof), from the population of host cells.

[0415] The skilled artisan will appreciate a variety of features employable within the above-described framework. For example, in some embodiments, the viral vector or the phage is a filamentous phage, for example, an M13 phage, e.g., an M13 selection phage. In certain embodiments, the gene required for the production of infectious viral particles is the M13 gene III (gIII). In embodiments, the phage may lack a functional gIII, but otherwise comprise gI, gII, gIV, gV, gVI, gVII, gVIII, gIX, and a gX. In some embodiments, the generation of infectious VSV particles involves the envelope protein VSV-G. Various embodiments can use different retroviral vectors, for example, Murine Leukemia Virus vectors, or Lentiviral vectors. In embodiments, the retroviral vectors can efficiently be packaged with VSV-G envelope protein, e.g., as a substitute for the native envelope protein of the virus.

[0416] In some embodiments, host cells are incubated according to a suitable number of viral life cycles, e.g., at least 10, at least 20, at least 30, at least 40, at least 50, at least 100, at least 200, at least 300, at least 400, at least, 500, at least 600, at least 700, at least 800, at least 900, at least 1000, at least 1250, at least 1500, at least 1750, at least 2000, at least 2500, at least 3000, at least 4000, at least 5000, at least 7500, at least 10000, or more consecutive viral life cycles, which in on illustrative and non-limiting examples of M13 phage is 10-20 minutes per virus life cycle. Similarly, conditions can be modulated to adjust the time a host cell remains in a population of host cells, e.g., about 10, about 11, about 12, about 13, about 14, about 15, about 16, about 17, about 18, about 19, about 20, about 21, about 22, about 23, about 24, about 25, about 30, about 35, about 40, about 45, about 50, about 55, about 60, about 70, about 80, about 90, about 100, about 120, about 150, or about 180 minutes. Host cell populations can be controlled in part by density of the host cells, or, in some embodiments, the host cell density in an inflow, e.g., 10³ cells/ml, about 10⁴ cells/ml, about 10⁵ cells/ml, about 5-10⁵ cells/ml, about 10⁶ cells/ml, about 5-10⁶ cells/ml, about 10⁷ cells/ml, about 5-10⁷ cells/ml, about 10⁸ cells/ml, about 5-10⁸ cells/ml, about 10⁹ cells/ml, about 5·10⁹ cells/ml, about 10¹⁰ cells/ml, or about 5·10¹⁰ cells/ml.

### Inteins

[0417] In some embodiments, as described in more detail below, an intein-N (intN) domain may be fused to the N-terminal portion of a first domain of a gene modifying polypeptide described herein, and an intein-C (intC) domain may be fused to the C-terminal portion of a second domain of a gene modifying polypeptide described herein for the joining of the N-terminal portion to the C-terminal portion, thereby joining the first and second domains. In some embodiments, the first and second domains are each independently chosen from a DNA binding domain, an RNA binding domain, an RT domain, and an endonuclease domain.

[0418] Inteins can occur as self-splicing protein intron (e.g., peptide), e.g., which ligates flanking N-terminal and C-terminal exteins (e.g., fragments to be joined). An intein may, in some instances, comprise a fragment of a protein that is able to excise itself and join the remaining fragments (the exteins) with a peptide bond in a process known as protein splicing. Inteins are also referred to as “protein introns.” The process of an intein excising itself and joining the remaining portions of the protein is herein termed “protein splicing” or “intein-mediated protein splicing.”

[0419] In some embodiments, an intein of a precursor protein (an intein containing protein prior to intein-mediated protein splicing) comes from two genes. Such intein is referred to herein as a split intein (e.g., split intein-N and split intein-C). Accordingly, an intein-based approach may be used to join a first polypeptide sequence and a second polypeptide sequence together. For example, in cyanobacteria, DnaE, the catalytic subunit a of DNA polymerase III, is encoded by two separate genes, dnaE-n and dnaE-c. An intein-N domain, such as that encoded by the dnaE-n gene, when situated as part of a first polypeptide sequence, may join the first polypeptide sequence with a second polypeptide sequence, wherein the second polypeptide sequence comprises an intein-C domain, such as that encoded by the dnaE-c gene. Accordingly, in some embodiments, a protein can be made by providing nucleic acid encoding the first and second polypeptide sequences (e.g., wherein a first nucleic acid molecule encodes the first polypeptide sequence and a second nucleic acid molecule encodes the second polypeptide sequence), and the nucleic acid is introduced into the cell under conditions that allow for production of the first and second polypeptide sequences, and for joining of the first to the second polypeptide sequence via an intein-based mechanism.

[0420] Use of inteins for joining heterologous protein fragments is described, for example, in Wood et al., J. Biol. Chem. 289(21); 14512-9 (2014) (incorporated herein by reference in its entirety). For example, when fused to separate protein fragments, the inteins IntN and IntC may recognize each other, splice themselves out, and/or simultaneously ligate the flanking N- and C-terminal exteins of the protein fragments to which they were fused, thereby reconstituting a full-length protein from the two protein fragments.

[0421] In some embodiments, a synthetic intein based on the dnaE intein, the Cfa-N (e.g., split intein-N) and Cfa-C (e.g., split intein-C) intein pair, is used. Examples of such inteins have been described, e.g., in Stevens et al., J Am Chem Soc. 2016 Feb. 24; 138(7):2162-5 (incorporated herein by reference in its entirety). Non-limiting examples of intein pairs that may be used in accordance with the present disclosure include: Cfa DnaE intein, Ssp GyrB intein, Ssp DnaX intein, Ter DnaE3 intein, Ter ThyX intein, Rma DnaB intein and Cne Prp8 intein (e.g., as described in U.S. Pat. No. 8,394,604, incorporated herein by reference.

[0422] In some embodiments involving a split Cas9, an intein-N domain and an intein-C domain may be fused to the N-terminal portion of the split Cas9 and the C-terminal portion of a split Cas9, respectively, for the joining of the N-terminal portion of the split Cas9 and the C-terminal portion of the split Cas9. For example, in some embodiments, an intein-N is fused to the C-terminus of the N-terminal portion of the split Cas9, i.e., to form a structure of N-[N-terminal portion of the split Cas9]-[intein-N]˜C. In some embodiments, an intein-C is fused to the N-terminus of the C-terminal portion of the split Cas9, i.e., to form a structure of N-[intein-C]˜[C-terminal portion of the split Cas9]-C. The mechanism of intein-mediated protein splicing for joining the proteins the inteins are fused to (e.g., split Cas9) is described in Shah et al., Chem Sci. 2014; 5(1):446-461, incorporated herein by reference. Methods for designing and using inteins are known in the art and described, for example by WO2020051561, WO2014004336, WO2017132580, US20150344549, and US20180127780, each of which is incorporated herein by reference in their entirety.

[0423] In some embodiments, a split refers to a division into two or more fragments. In some embodiments, a split Cas9 protein or split Cas9 comprises a Cas9 protein that is provided as an N-terminal fragment and a C-terminal fragment encoded by two separate nucleotide sequences. The polypeptides corresponding to the N-terminal portion and the C-terminal portion of the Cas9 protein may be spliced to form a reconstituted Cas9 protein. In embodiments, the Cas9 protein is divided into two fragments within a disordered region of the protein, e.g., as described in Nishimasu et al., Cell, Volume 156, Issue 5, pp. 935-949, 2014, or as described in Jiang et al. (2016) Science 351: 867-871 and PDB file: 5F9R (each of which is incorporated herein by reference in its entirety). A disordered region may be determined by one or more protein structure determination techniques known in the art, including, without limitation, X-ray crystallography, NMR spectroscopy, electron microscopy (e.g., cryoEM), and/or in silico protein modeling. In some embodiments, the protein is divided into two fragments at any C, T, A, or S, e.g., within a region of SpCas9 between amino acids A292-G364, F445-K483, or E565-T637, or at corresponding positions in any other Cas9, Cas9 variant (e.g., nCas9, dCas9), or other napDNAbp. In some embodiments, protein is divided into two fragments at SpCas9 T310, T313, A456, S469, or C574. In some embodiments, the process of dividing the protein into two fragments is referred to as splitting the protein.

[0424] In some embodiments, a protein fragment ranges from about 2-1000 amino acids (e.g., between 2-10, 10-50, 50-100, 100-200, 200-300, 300-400, 400-500, 500-600, 600-700, 700-800, 800-900, or 900-1000 amino acids) in length. In some embodiments, a protein fragment ranges from about 5-500 amino acids (e.g., between 5-10, 10-50, 50-100, 100-200, 200-300, 300-400, or 400-500 amino acids) in length. In some embodiments, a protein fragment ranges from about 20-200 amino acids (e.g., between 20-30, 30-40, 40-50, 50-100, or 100-200 amino acids) in length.

[0425] In some embodiments, a portion or fragment of a gene modifying polypeptide is fused to an intein. The nuclease can be fused to the N-terminus or the C-terminus of the intein. In some embodiments, a portion or fragment of a fusion protein is fused to an intein and fused to an AAV capsid protein. The intein, nuclease and capsid protein can be fused together in any arrangement (e.g., nuclease-intein-capsid, intein-nuclease-capsid, capsid-intein-nuclease, etc.). In some embodiments, the N-terminus of an intein is fused to the C-terminus of a fusion protein and the C-terminus of the intein is fused to the N-terminus of an AAV capsid protein.

[0426] In some embodiments, an endonuclease domain (e.g., a nickase Cas9 domain) is fused to intein-N and a polypeptide comprising an RT domain is fused to an intein-C.

[0427] Exemplary nucleotide and amino acid sequences of intein-N domains and compatible intein-C domains are provided below:

DnaE Intein-N DNA:
(SEQ ID NO: 29)
TGCCTGTCATACGAAACCGAGATACTGACAGTAGAATATGGCCTT
CTGCCAATCGGGAAGATTGTGGAGAAACGGATAGAATGCACAGTT
TACTCTGTCGATAACAATGGTAACATTTATACTCAGCCAGTTGCC
CAGTGGCACGACCGGGGAGAGCAGGAAGTATTCGAATACTGTCTG
GAGGATGGAAGTCTCATTAGGGCCACTAAGGACCACAAATTTATG
ACAGTCGATGGCCAGATGCTGCCTATAGACGAAATCTTTGAGCGA
GAGTTGGACCTCATGCGAGTTGACAACCTTCCTAAT
DnaE Intein-N Protein:
(SEQ ID NO: 30)
CLSYETEILTVEYGLLPIGKIVEKRIECTVYSVDNNGNIYTQPVA
QWHDRGEQEVFEYCLEDGSLIRATKDHKFMTVDGQMLPIDEIFER
ELDLMRVDNLPN
DnaE Intein-C DNA:
(SEQ ID NO: 31)
ATGATCAAGATAGCTACAAGGAAGTATCTTGGCAAACAAAACGTT
TATGATATTGGAGTCGAAAGAGATCACAACTTTGCTCTGAAGAAC
GGATTCATAGCTTCTAAT
DnaE Intein-C Protein:
(SEQ ID NO: 32)
MIKIATRKYLGKQNVYDIGVERDHNFALKNGFIASN
Cfa-N DNA:
(SEQ ID NO: 33)
TGCCTGTCTTATGATACCGAGATACTTACCGTTGAATATGGCTTC
TTGCCTATTGGAAAGATTGTCGAAGAGAGAATTGAATGCACAGTA
TATACTGTAGACAAGAATGGTTTCGTTTACACACAGCCCATTGCT
CAATGGCACAATCGCGGCGAACAAGAAGTATTTGAGTACTGTCTC
GAGGATGGAAGCATCATACGAGCAACTAAAGATCATAAATTCATG
ACCACTGACGGGCAGATGTTGCCAATAGATGAGATATTCGAGCGG
GGCTTGGATCTCAAACAAGTGGATGGATTGCCA
Cfa-N Protein:
(SEQ ID NO: 34)
CLSYDTEILTVEYGFLPIGKIVEERIECTVYTVDKNGFVYTQPIA
QWHNRGEQEVFEYCLEDGSIIRATKDHKFMTTDGQMLPIDEIFER
GLDLKQVDGLP
Cfa-C DNA:
(SEQ ID NO: 35)
ATGAAGAGGACTGCCGATGGATCAGAGTTTGAATCTCCCAAGAAG
AAGAGGAAAGTAAAGATAATATCTCGAAAAAGTCTTGGTACCCAA
AATGTCTATGATATTGGAGTGGAGAAAGATCACAACTTCCTTCTC
AAGAACGGTCTCGTAGCCAGCAAC
Cfa-C Protein:
(SEQ ID NO: 36)
MKRTADGSEFESPKKKRKVKIISRKSLGTQNVYDIGVEKDHNFLL
KNGLVASN

[0428] In some embodiments, an RBD of a gene modifying polypeptide as described herein is attached to an RT domain via an intein-based fusion, e.g., via an intein dimerization sequence as listed in Table 33 below (or an intein dimerization sequence comprising an amino acid sequence having at least 75%, 80%, 85%, 90%, 95%, 96%, 97%, 98%, or 99% identity thereto). In some embodiments, an RBD of a gene modifying polypeptide as described herein is attached to a DBD (e.g., a Cas domain, e.g., a Cas9 domain, e.g., an nCas9 or dCas9 domain) via an intein-based fusion, e.g., via an intein dimerization sequence as listed in Table 33 below (or an intein dimerization sequence comprising an amino acid sequence having at least 75%, 80%, 85%, 90%, 95%, 96%, 97%, 98%, or 99% identity thereto). In some embodiments, an RT domain of a gene modifying polypeptide as described herein is attached to a DBD (e.g., a Cas domain, e.g., a Cas9 domain, e.g., an nCas9 or dCas9 domain) via an intein-based fusion, e.g., via an intein dimerization sequence as listed in Table 33 below (or an intein dimerization sequence comprising an amino acid sequence having at least 75%, 80%, 85%, 90%, 95%, 96%, 97%, 98%, or 99% identity thereto). In some embodiments, a DBD (e.g., a Cas domain, e.g., a Cas9 domain, e.g., an nCas9 or dCas9 domain) of a gene modifying polypeptide as described herein is attached to an RBD and to an RT domain via intein-based fusions. In embodiments, the DBD is attached to the RBD and the RT domain via different intein dimerization sequences, e.g., intein dimerization sequences as listed in Table 33 below (or sequences comprising an amino acid sequence having at least 75%, 80%, 85%, 90%, 95%, 96%, 97%, 98%, or 99% identity thereto). In embodiments, the DBD is attached to the RBD and the RT domain via the same intein dimerization sequence, e.g., an intein dimerization sequence as listed in Table 33 below (or a sequence comprising an amino acid sequence having at least 75%, 80%, 85%, 90%, 95%, 96%, 97%, 98%, or 99% identity thereto). In some embodiments, the intein dimerization sequences of an RBD and a DBD to be bound to each other comprise a Chain A sequence and a Chain B sequence, respectively, or a Chain B sequence and a Chain A sequence, respectively, as listed in a single row of Table 33 below (or sequences having at least 75%, 80%, 85%, 90%, 95%, 96%, 97%, 98%, or 99% identity thereto). In some embodiments, the intein dimerization sequences of an RBD and an RT domain to be bound to each other comprise a Chain A sequence and a Chain B sequence, respectively, or a Chain B sequence and a Chain A sequence, respectively, as listed in a single row of Table 33 below (or sequences having at least 75%, 80%, 85%, 90%, 95%, 96%, 97%, 98%, or 99% identity thereto). In some embodiments, the intein dimerization sequences of an RT domain and a DBD to be bound to each other comprise a Chain A sequence and a Chain B sequence, respectively, or a Chain B sequence and a Chain A sequence, respectively, as listed in a single row of Table 33 below (or sequences having at least 75%, 80%, 85%, 90%, 95%, 96%, 97%, 98%, or 99% identity thereto).

TABLE 33
Exemplary intein dimerization sequences

| | | | Ex- | | | | Ex- | |
|---|---|---|---|---|---|---|---|---|
| | Chain | | emplary | SEQ | Chain | | emplary | SEQ |
| | A | | Chain | ID | B | | Chain | ID |
| System | name | Chain A sequence | A source | NO: | name | Chain B sequence | B source | NO: |
| Sce- | Sce- | CFAKGTNVLMADGSIECIENI | snapgene | 20714 | Sce- | GHGGIRNNLNTENP | snapgene | 20722 |
| VMA | VMA- | EVGNKVMGKDGRPREVIKLP | | | VMA- | LWDAIVGLGFLKDG | common | |
| | 5′-v1 | RGRETMYSVVQKSQHRAHK | | | 3′-v1 | VKNIPSFLSTDNIGT | features | |
| | | SDSSREVPELLKFTCNATHEL | | | | RETFLAGLIDSDGYV | | |
| | | VVRTPRSVRRLSRTIKGVEYF | | | | TDEHGIKATIKTIHTS | | |
| | | EVITFEMGQKKAPDGRIVELV | | | | VRDGLVSLARSLGL | | |
| | | KEVSKSYPISEGPERANELVE | | | | VVSVNAEPAKVDMN | | |
| | | SYRKASNKAYFEWTIEARDL | | | | VTKHKISYAIYMSGG | | |
| | | SLLGSHVRKATYQTYAPILYE | | | | DVLLNVLSKCAGSK | | |
| | | NDHFFDYMQKSKFHLTIEGP | | | | KFRPAPAAAFAREC | | |
| | | KVLAYLLGLWIGDGLSDRATF | | | | RGFYFELQELKEDD | | |
| | | SVDSRDTSLMERVTEYAEKL | | | | YYGITLSDDSDHQFL | | |
| | | NLCAEYKDRKEPQVAKTVNL | | | | LGSQVVVQN | | |
| | | YSKVVRG | | | | | | |
| Sce- | Sce- | CFAKGTNVLMADGSIECIENI | snapgene | 20714 | Sce- | GHGGIRNNLNTENP | snapgene | 20723 |
| VMA | VMA- | EVGNKVMGKDGRPREVIKLP | | | VMA- | LWDAIVGLGFLKDG | common | |
| | 5′-v1 | RGRETMYSVVQKSQHRAHK | | | 3′-v2 | VKNIPSFLSTDNIGT | features | |
| | | SDSSREVPELLKFTCNATHEL | | | | RETFLAGLIDSDGYV | | |
| | | VVRTPRSVRRLSRTIKGVEYF | | | | TDEHGIKATIKTIHTS | | |
| | | EVITFEMGQKKAPDGRIVELV | | | | VRDGLVSLARSLGL | | |
| | | KEVSKSYPISEGPERANELVE | | | | VVSVNAEPAKVDMN | | |
| | | SYRKASNKAYFEWTIEARDL | | | | VTKHKISYAIYMSGG | | |
| | | SLLGSHVRKATYQTYAPILYE | | | | DVLLNVLSKCAGSK | | |
| | | NDHFFDYMQKSKFHLTIEGP | | | | KFRPAPAAAFAREC | | |
| | | KVLAYLLGLWIGDGLSDRATF | | | | RGFYFELQELKEDD | | |
| | | SVDSRDTSLMERVTEYAEKL | | | | YYGITLSDDSDHQFL | | |
| | | NLCAEYKDRKEPQVAKTVNL | | | | LGSQVVVQNCGER | | |
| | | YSKVVRG | | | | GNGSG | | |
| Sce- | Sce- | CFAKGTNVLMADGSIECIENI | snapgene | 20714 | Sce- | GHGGIRNNLNTENP | snapgene | 20724 |
| VMA | VMA- | EVGNKVMGKDGRPREVIKLP | | | VMA- | LWDAIVGLGFLKDG | common | |
| | 5′-v1 | RGRETMYSVVQKSQHRAHK | | | 31-v3 | VKNIPSFLSTDNIGT | features | |
| | | SDSSREVPELLKFTCNATHEL | | | | RETFLAGLIDSDGYV | | |
| | | VVRTPRSVRRLSRTIKGVEYF | | | | TDEHGIKATIKTIHTS | | |
| | | EVITFEMGQKKAPDGRIVELV | | | | VRDGLVSLARSLGL | | |
| | | KEVSKSYPISEGPERANELVE | | | | VVSVNAEPAKVDMN | | |
| | | SYRKASNKAYFEWTIEARDL | | | | VTKHKISYAIYMSGG | | |
| | | SLLGSHVRKATYQTYAPILYE | | | | DVLLNVLSKCAGSK | | |
| | | NDHFFDYMQKSKFHLTIEGP | | | | KFRPAPAAAFAREC | | |
| | | KVLAYLLGLWIGDGLSDRATF | | | | RGFYFELQELKEDD | | |
| | | SVDSRDTSLMERVTEYAEKL | | | | YYGITLSDDSDHQFL | | |
| | | NLCAEYKDRKEPQVAKTVNL | | | | LGSQVVVQNCTMTE | | |
| | | YSKVVRG | | | | KGSG | | |
| Sce- | Sce- | CFAKGTNVLMADGSIECIENI | snapgene | 20714 | Sce- | GHGGIRNNLNTENP | snapgene | 20725 |
| VMA | VMA- | EVGNKVMGKDGRPREVIKLP | | | VMA- | LWDAIVGLGFLKDG | common | |
| | 5′-v1 | RGRETMYSVVQKSQHRAHK | | | 3′-v4 | VKNIPSFLSTDNIGT | features | |
| | | SDSSREVPELLKFTCNATHEL | | | | RETFLAGLIDSDGYV | | |
| | | VVRTPRSVRRLSRTIKGVEYF | | | | TDEHGIKATIKTIHTS | | |
| | | EVITFEMGQKKAPDGRIVELV | | | | VRDGLVSLARSLGL | | |
| | | KEVSKSYPISEGPERANELVE | | | | VVSVNAEPAKVDMN | | |
| | | SYRKASNKAYFEWTIEARDL | | | | VTKHKISYAIYMSGG | | |
| | | SLLGSHVRKATYQTYAPILYE | | | | DVLLNVLSKCAGSK | | |
| | | NDHFFDYMQKSKFHLTIEGP | | | | KFRPAPAAAFAREC | | |
| | | KVLAYLLGLWIGDGLSDRATF | | | | RGFYFELQELKEDD | | |
| | | SVDSRDTSLMERVTEYAEKL | | | | YYGITLSDDSDHQFL | | |
| | | NLCAEYKDRKEPQVAKTVNL | | | | LGSQVVVQNCGEKS | | |
| | | YSKVVRG | | | | MGSG | | |
| Sce- | Sce- | CFAKGTNVLMADGSIECIENI | snapgene | 20714 | Sce- | VLLNVLSKCAGSKKF | https:// | 20726 |
| VMA | VMA- | EVGNKVMGKDGRPREVIKLP | | | VMA- | RPAPAAAFARECRG | www. | |
| | 5′-v1 | RGRETMYSVVQKSQHRAHK | | | 3′-v5 | FYFELQELKEDDYY | nature. | |
| | | SDSSREVPELLKFTCNATHEL | | | | GITLSDDSDHQFLLA | com/ | |
| | | VVRTPRSVRRLSRTIKGVEYF | | | | NQVVVHN | articles/ | |
| | | EVITFEMGQKKAPDGRIVELV | | | | | nmeth.3585 | |
| | | KEVSKSYPISEGPERANELVE | | | | | | |
| | | SYRKASNKAYFEWTIEARDL | | | | | | |
| | | SLLGSHVRKATYQTYAPILYE | | | | | | |
| | | NDHFFDYMQKSKFHLTIEGP | | | | | | |
| | | KVLAYLLGLWIGDGLSDRATF | | | | | | |
| | | SVDSRDTSLMERVTEYAEKL | | | | | | |
| | | NLCAEYKDRKEPQVAKTVNL | | | | | | |
| | | YSKVVRG | | | | | | |
| Sce- | Sce- | CFAKGTNVLMADGSIECIENI | snapgene | 20714 | Sce- | VLLNVLSKCAGSKKF | https:// | 20727 |
| VMA | VMA- | EVGNKVMGKDGRPREVIKLP | | | VMA- | RPAPAAAFARECRG | www. | |
| | 5′-v1 | RGRETMYSVVQKSQHRAHK | | | 3′-v6 | FYFELQELKEDDYY | nature. | |
| | | SDSSREVPELLKFTCNATHEL | | | | GITLSDDSDHQFLLA | com/ | |
| | | VVRTPRSVRRLSRTIKGVEYF | | | | NQVVVHNCGERGN | articles/ | |
| | | EVITFEMGQKKAPDGRIVELV | | | | GSG | nmeth.3585 | |
| | | KEVSKSYPISEGPERANELVE | | | | | | |
| | | SYRKASNKAYFEWTIEARDL | | | | | | |
| | | SLLGSHVRKATYQTYAPILYE | | | | | | |
| | | NDHFFDYMQKSKFHLTIEGP | | | | | | |
| | | KVLAYLLGLWIGDGLSDRATF | | | | | | |
| | | SVDSRDTSLMERVTEYAEKL | | | | | | |
| | | NLCAEYKDRKEPQVAKTVNL | | | | | | |
| | | YSKVVRG | | | | | | |
| Sce- | Sce- | CFAKGTNVLMADGSIECIENI | snapgene | 20714 | Sce- | VLLNVLSKCAGSKKF | https:// | 20728 |
| VMA | VMA- | EVGNKVMGKDGRPREVIKLP | | | VMA- | RPAPAAAFARECRG | www. | |
| | 5′-v1 | RGRETMYSVVQKSQHRAHK | | | 3′-v7 | FYFELQELKEDDYY | nature. | |
| | | SDSSREVPELLKFTCNATHEL | | | | GITLSDDSDHQFLLA | com/ | |
| | | VVRTPRSVRRLSRTIKGVEYF | | | | NQVVVHNCTMTEKG | articles/ | |
| | | EVITFEMGQKKAPDGRIVELV | | | | SG | nmeth.3585 | |
| | | KEVSKSYPISEGPERANELVE | | | | | | |
| | | SYRKASNKAYFEWTIEARDL | | | | | | |
| | | SLLGSHVRKATYQTYAPILYE | | | | | | |
| | | NDHFFDYMQKSKFHLTIEGP | | | | | | |
| | | KVLAYLLGLWIGDGLSDRATF | | | | | | |
| | | SVDSRDTSLMERVTEYAEKL | | | | | | |
| | | NLCAEYKDRKEPQVAKTVNL | | | | | | |
| | | YSKVVRG | | | | | | |
| Sce- | Sce- | CFAKGTNVLMADGSIECIENI | snapgene | 20714 | Sce- | VLLNVLSKCAGSKKF | https:// | 20729 |
| VMA | VMA- | EVGNKVMGKDGRPREVIKLP | | | VMA- | RPAPAAAFARECRG | www. | |
| | 5′-v1 | RGRETMYSVVQKSQHRAHK | | | 3′-v8 | FYFELQELKEDDYY | nature. | |
| | | SDSSREVPELLKFTCNATHEL | | | | GITLSDDSDHQFLLA | com/ | |
| | | VVRTPRSVRRLSRTIKGVEYF | | | | NQVVVHNCGEKSM | articles/ | |
| | | EVITFEMGQKKAPDGRIVELV | | | | GSG | nmeth.3585 | |
| | | KEVSKSYPISEGPERANELVE | | | | | | |
| | | SYRKASNKAYFEWTIEARDL | | | | | | |
| | | SLLGSHVRKATYQTYAPILYE | | | | | | |
| | | NDHFFDYMQKSKFHLTIEGP | | | | | | |
| | | KVLAYLLGLWIGDGLSDRATF | | | | | | |
| | | SVDSRDTSLMERVTEYAEKL | | | | | | |
| | | NLCAEYKDRKEPQVAKTVNL | | | | | | |
| | | YSKVVRG | | | | | | |
| Sce- | Sce- | GGIIYVGCFAKGTNVLMADG | snapgene | 20715 | Sce- | GHGGIRNNLNTENP | snapgene | 20722 |
| VMA | VMA- | SIECIENIEVGNKVMGKDGRP | | | VMA- | LWDAIVGLGFLKDG | common | |
| | 5′-v2 | REVIKLPRGRETMYSVVQKS | | | 3′-v1 | VKNIPSFLSTDNIGT | features | |
| | | QHRAHKSDSSREVPELLKFT | | | | RETFLAGLIDSDGYV | | |
| | | CNATHELVVRTPRSVRRLSR | | | | TDEHGIKATIKTIHTS | | |
| | | TIKGVEYFEVITFEMGQKKAP | | | | VRDGLVSLARSLGL | | |
| | | DGRIVELVKEVSKSYPISEGP | | | | VVSVNAEPAKVDMN | | |
| | | ERANELVESYRKASNKAYFE | | | | VTKHKISYAIYMSGG | | |
| | | WTIEARDLSLLGSHVRKATY | | | | DVLLNVLSKCAGSK | | |
| | | QTYAPILYENDHFFDYMQKS | | | | KFRPAPAAAFAREC | | |
| | | KFHLTIEGPKVLAYLLGLWIG | | | | RGFYFELQELKEDD | | |
| | | DGLSDRATFSVDSRDTSLME | | | | YYGITLSDDSDHQFL | | |
| | | RVTEYAEKLNLCAEYKDRKE | | | | LGSQVVVQN | | |
| | | PQVAKTVNLYSKVVRG | | | | | | |
| | | snapgene common | | | | | | |
| | | features | | | | | | |
| Sce- | Sce- | GGIIYVGCFAKGTNVLMADG | snapgene | 20715 | Sce- | GHGGIRNNLNTENP | snapgene | 20723 |
| VMA | VMA- | SIECIENIEVGNKVMGKDGRP | | | VMA- | LWDAIVGLGFLKDG | common | |
| | 5′-v2 | REVIKLPRGRETMYSVVQKS | | | 3′-v2 | VKNIPSFLSTDNIGT | features | |
| | | QHRAHKSDSSREVPELLKFT | | | | RETFLAGLIDSDGYV | | |
| | | CNATHELVVRTPRSVRRLSR | | | | TDEHGIKATIKTIHTS | | |
| | | TIKGVEYFEVITFEMGQKKAP | | | | VRDGLVSLARSLGL | | |
| | | DGRIVELVKEVSKSYPISEGP | | | | VVSVNAEPAKVDMN | | |
| | | ERANELVESYRKASNKAYFE | | | | VTKHKISYAIYMSGG | | |
| | | WTIEARDLSLLGSHVRKATY | | | | DVLLNVLSKCAGSK | | |
| | | QTYAPILYENDHFFDYMQKS | | | | KFRPAPAAAFAREC | | |
| | | KFHLTIEGPKVLAYLLGLWIG | | | | RGFYFELQELKEDD | | |
| | | DGLSDRATFSVDSRDTSLME | | | | YYGITLSDDSDHQFL | | |
| | | RVTEYAEKLNLCAEYKDRKE | | | | LGSQVVVQNCGER | | |
| | | PQVAKTVNLYSKVVRG | | | | GNGSG | | |
| | | snapgene common | | | | | | |
| | | features | | | | | | |
| Sce- | Sce- | GGIIYVGCFAKGTNVLMADG | snapgene | 20715 | Sce- | GHGGIRNNLNTENP | snapgene | 20724 |
| VMA | VMA- | SIECIENIEVGNKVMGKDGRP | | | VMA- | LWDAIVGLGFLKDG | common | |
| | 5′-v2 | REVIKLPRGRETMYSVVQKS | | | 3′-v3 | VKNIPSFLSTDNIGT | features | |
| | | QHRAHKSDSSREVPELLKFT | | | | RETFLAGLIDSDGYV | | |
| | | CNATHELVVRTPRSVRRLSR | | | | TDEHGIKATIKTIHTS | | |
| | | TIKGVEYFEVITFEMGQKKAP | | | | VRDGLVSLARSLGL | | |
| | | DGRIVELVKEVSKSYPISEGP | | | | VVSVNAEPAKVDMN | | |
| | | ERANELVESYRKASNKAYFE | | | | VTKHKISYAIYMSGG | | |
| | | WTIEARDLSLLGSHVRKATY | | | | DVLLNVLSKCAGSK | | |
| | | QTYAPILYENDHFFDYMQKS | | | | KFRPAPAAAFAREC | | |
| | | KFHLTIEGPKVLAYLLGLWIG | | | | RGFYFELQELKEDD | | |
| | | DGLSDRATFSVDSRDTSLME | | | | YYGITLSDDSDHQFL | | |
| | | RVTEYAEKLNLCAEYKDRKE | | | | LGSQVVVQNCTMTE | | |
| | | PQVAKTVNLYSKVVRG | | | | KGSG | | |
| | | snapgene common | | | | | | |
| | | features | | | | | | |
| Sce- | Sce- | GGIIYVGCFAKGTNVLMADG | snapgene | 20715 | Sce- | GHGGIRNNLNTENP | snapgene | 20725 |
| VMA | VMA- | SIECIENIEVGNKVMGKDGRP | | | VMA- | LWDAIVGLGFLKDG | common | |
| | 5′-v2 | REVIKLPRGRETMYSVVQKS | | | 3′-v4 | VKNIPSFLSTDNIGT | features | |
| | | QHRAHKSDSSREVPELLKFT | | | | RETFLAGLIDSDGYV | | |
| | | CNATHELVVRTPRSVRRLSR | | | | TDEHGIKATIKTIHTS | | |
| | | TIKGVEYFEVITFEMGQKKAP | | | | VRDGLVSLARSLGL | | |
| | | DGRIVELVKEVSKSYPISEGP | | | | VVSVNAEPAKVDMN | | |
| | | ERANELVESYRKASNKAYFE | | | | VTKHKISYAIYMSGG | | |
| | | WTIEARDLSLLGSHVRKATY | | | | DVLLNVLSKCAGSK | | |
| | | QTYAPILYENDHFFDYMQKS | | | | KFRPAPAAAFAREC | | |
| | | KFHLTIEGPKVLAYLLGLWIG | | | | RGFYFELQELKEDD | | |
| | | DGLSDRATFSVDSRDTSLME | | | | YYGITLSDDSDHQFL | | |
| | | RVTEYAEKLNLCAEYKDRKE | | | | LGSQVVVQNCGEKS | | |
| | | PQVAKTVNLYSKVVRG | | | | MGSG | | |
| | | snapgene common | | | | | | |
| | | features | | | | | | |
| Sce- | Sce- | GGIIYVGCFAKGTNVLMADG | snapgene | 20715 | Sce- | VLLNVLSKCAGSKKF | https:// | 20726 |
| VMA | VMA- | SIECIENIEVGNKVMGKDGRP | | | VMA- | RPAPAAAFARECRG | www. | |
| | 5′-v2 | REVIKLPRGRETMYSVVQKS | | | 3′-v5 | FYFELQELKEDDYY | nature. | |
| | | QHRAHKSDSSREVPELLKFT | | | | GITLSDDSDHQFLLA | com/ | |
| | | CNATHELVVRTPRSVRRLSR | | | | NQVVVHN | articles/ | |
| | | TIKGVEYFEVITFEMGQKKAP | | | | | nmeth.3585 | |
| | | DGRIVELVKEVSKSYPISEGP | | | | | | |
| | | ERANELVESYRKASNKAYFE | | | | | | |
| | | WTIEARDLSLLGSHVRKATY | | | | | | |
| | | QTYAPILYENDHFFDYMQKS | | | | | | |
| | | KFHLTIEGPKVLAYLLGLWIG | | | | | | |
| | | DGLSDRATFSVDSRDTSLME | | | | | | |
| | | RVTEYAEKLNLCAEYKDRKE | | | | | | |
| | | PQVAKTVNLYSKVVRG | | | | | | |
| | | snapgene common | | | | | | |
| | | features | | | | | | |
| Sce- | Sce- | GGIIYVGCFAKGTNVLMADG | snapgene | 20715 | Sce- | VLLNVLSKCAGSKKF | https:// | 20727 |
| VMA | VMA- | SIECIENIEVGNKVMGKDGRP | | | VMA- | RPAPAAAFARECRG | www. | |
| | 5′-v2 | REVIKLPRGRETMYSVVQKS | | | 3′-v6 | FYFELQELKEDDYY | nature. | |
| | | QHRAHKSDSSREVPELLKFT | | | | GITLSDDSDHQFLLA | com/ | |
| | | CNATHELVVRTPRSVRRLSR | | | | NQVVVHNCGERGN | articles/ | |
| | | TIKGVEYFEVITFEMGQKKAP | | | | GSG | nmeth.3585 | |
| | | DGRIVELVKEVSKSYPISEGP | | | | | | |
| | | ERANELVESYRKASNKAYFE | | | | | | |
| | | WTIEARDLSLLGSHVRKATY | | | | | | |
| | | QTYAPILYENDHFFDYMQKS | | | | | | |
| | | KFHLTIEGPKVLAYLLGLWIG | | | | | | |
| | | DGLSDRATFSVDSRDTSLME | | | | | | |
| | | RVTEYAEKLNLCAEYKDRKE | | | | | | |
| | | PQVAKTVNLYSKVVRG | | | | | | |
| | | snapgene common | | | | | | |
| | | features | | | | | | |
| Sce- | Sce- | GGIIYVGCFAKGTNVLMADG | snapgene | 20715 | Sce- | VLLNVLSKCAGSKKF | https:// | 20728 |
| VMA | VMA- | SIECIENIEVGNKVMGKDGRP | | | VMA- | RPAPAAAFARECRG | www. | |
| | 5′-v2 | REVIKLPRGRETMYSVVQKS | | | 3′-v7 | FYFELQELKEDDYY | nature. | |
| | | QHRAHKSDSSREVPELLKFT | | | | GITLSDDSDHQFLLA | com/ | |
| | | CNATHELVVRTPRSVRRLSR | | | | NQVVVHNCTMTEKG | articles/ | |
| | | TIKGVEYFEVITFEMGQKKAP | | | | SG | nmeth.3585 | |
| | | DGRIVELVKEVSKSYPISEGP | | | | | | |
| | | ERANELVESYRKASNKAYFE | | | | | | |
| | | WTIEARDLSLLGSHVRKATY | | | | | | |
| | | QTYAPILYENDHFFDYMQKS | | | | | | |
| | | KFHLTIEGPKVLAYLLGLWIG | | | | | | |
| | | DGLSDRATFSVDSRDTSLME | | | | | | |
| | | RVTEYAEKLNLCAEYKDRKE | | | | | | |
| | | PQVAKTVNLYSKVVRG | | | | | | |
| | | snapgene common | | | | | | |
| | | features | | | | | | |
| Sce- | Sce- | GGIIYVGCFAKGTNVLMADG | snapgene | 20715 | Sce- | VLLNVLSKCAGSKKF | https:// | 20729 |
| VMA | VMA- | SIECIENIEVGNKVMGKDGRP | | | VMA- | RPAPAAAFARECRG | www. | |
| | 5′-v2 | REVIKLPRGRETMYSVVQKS | | | 3′-v8 | FYFELQELKEDDYY | nature. | |
| | | QHRAHKSDSSREVPELLKFT | | | | GITLSDDSDHQFLLA | com/ | |
| | | CNATHELVVRTPRSVRRLSR | | | | NQVVVHNCGEKSM | articles/ | |
| | | TIKGVEYFEVITFEMGQKKAP | | | | GSG | nmeth.3585 | |
| | | DGRIVELVKEVSKSYPISEGP | | | | | | |
| | | ERANELVESYRKASNKAYFE | | | | | | |
| | | WTIEARDLSLLGSHVRKATY | | | | | | |
| | | QTYAPILYENDHFFDYMQKS | | | | | | |
| | | KFHLTIEGPKVLAYLLGLWIG | | | | | | |
| | | DGLSDRATFSVDSRDTSLME | | | | | | |
| | | RVTEYAEKLNLCAEYKDRKE | | | | | | |
| | | PQVAKTVNLYSKVVRG | | | | | | |
| | | snapgene common | | | | | | |
| | | features | | | | | | |
| Sce- | Sce- | GGVVLEKGCFAKGTNVLMAD | snapgene | 20716 | Sce- | GHGGIRNNLNTENP | snapgene | 20722 |
| VMA | VMA- | GSIECIENIEVGNKVMGKDGR | | | VMA- | LWDAIVGLGFLKDG | common | |
| | 5′-v3 | PREVIKLPRGRETMYSVVQK | | | 3′-v1 | VKNIPSFLSTDNIGT | features | |
| | | SQHRAHKSDSSREVPELLKF | | | | RETFLAGLIDSDGYV | | |
| | | TCNATHELVVRTPRSVRRLS | | | | TDEHGIKATIKTIHTS | | |
| | | RTIKGVEYFEVITFEMGQKKA | | | | VRDGLVSLARSLGL | | |
| | | PDGRIVELVKEVSKSYPISEG | | | | VVSVNAEPAKVDMN | | |
| | | PERANELVESYRKASNKAYF | | | | VTKHKISYAIYMSGG | | |
| | | EWTIEARDLSLLGSHVRKATY | | | | DVLLNVLSKCAGSK | | |
| | | QTYAPILYENDHFFDYMQKS | | | | KFRPAPAAAFAREC | | |
| | | KFHLTIEGPKVLAYLLGLWIG | | | | RGFYFELQELKEDD | | |
| | | DGLSDRATFSVDSRDTSLME | | | | YYGITLSDDSDHQFL | | |
| | | RVTEYAEKLNLCAEYKDRKE | | | | LGSQVVVQN | | |
| | | PQVAKTVNLYSKVVRG | | | | | | |
| Sce- | Sce- | GGVVLEKGCFAKGTNVLMAD | snapgene | 20716 | Sce- | GHGGIRNNLNTENP | snapgene | 20723 |
| VMA | VMA- | GSIECIENIEVGNKVMGKDGR | | | VMA- | LWDAIVGLGFLKDG | common | |
| | 5′-v3 | PREVIKLPRGRETMYSVVQK | | | 3′-v2 | VKNIPSFLSTDNIGT | features | |
| | | SQHRAHKSDSSREVPELLKF | | | | RETFLAGLIDSDGYV | | |
| | | TCNATHELVVRTPRSVRRLS | | | | TDEHGIKATIKTIHTS | | |
| | | RTIKGVEYFEVITFEMGQKKA | | | | VRDGLVSLARSLGL | | |
| | | PDGRIVELVKEVSKSYPISEG | | | | VVSVNAEPAKVDMN | | |
| | | PERANELVESYRKASNKAYF | | | | VTKHKISYAIYMSGG | | |
| | | EWTIEARDLSLLGSHVRKATY | | | | DVLLNVLSKCAGSK | | |
| | | QTYAPILYENDHFFDYMQKS | | | | KFRPAPAAAFAREC | | |
| | | KFHLTIEGPKVLAYLLGLWIG | | | | RGFYFELQELKEDD | | |
| | | DGLSDRATFSVDSRDTSLME | | | | YYGITLSDDSDHQFL | | |
| | | RVTEYAEKLNLCAEYKDRKE | | | | LGSQVVVQNCGER | | |
| | | PQVAKTVNLYSKVVRG | | | | GNGSG | | |
| Sce- | Sce- | GGVVLEKGCFAKGTNVLMAD | snapgene | 20716 | Sce- | GHGGIRNNLNTENP | snapgene | 20724 |
| VMA | VMA- | GSIECIENIEVGNKVMGKDGR | | | VMA- | LWDAIVGLGFLKDG | common | |
| | 5′-v3 | PREVIKLPRGRETMYSVVQK | | | 3′-v3 | VKNIPSFLSTDNIGT | features | |
| | | SQHRAHKSDSSREVPELLKF | | | | RETFLAGLIDSDGYV | | |
| | | TCNATHELVVRTPRSVRRLS | | | | TDEHGIKATIKTIHTS | | |
| | | RTIKGVEYFEVITFEMGQKKA | | | | VRDGLVSLARSLGL | | |
| | | PDGRIVELVKEVSKSYPISEG | | | | VVSVNAEPAKVDMN | | |
| | | PERANELVESYRKASNKAYF | | | | VTKHKISYAIYMSGG | | |
| | | EWTIEARDLSLLGSHVRKATY | | | | DVLLNVLSKCAGSK | | |
| | | QTYAPILYENDHFFDYMQKS | | | | KFRPAPAAAFAREC | | |
| | | KFHLTIEGPKVLAYLLGLWIG | | | | RGFYFELQELKEDD | | |
| | | DGLSDRATFSVDSRDTSLME | | | | YYGITLSDDSDHQFL | | |
| | | RVTEYAEKLNLCAEYKDRKE | | | | LGSQVVVQNCTMTE | | |
| | | PQVAKTVNLYSKVVRG | | | | KGSG | | |
| Sce- | Sce- | GGVVLEKGCFAKGTNVLMAD | snapgene | 20716 | Sce- | GHGGIRNNLNTENP | snapgene | 20725 |
| VMA | VMA- | GSIECIENIEVGNKVMGKDGR | | | VMA- | LWDAIVGLGFLKDG | common | |
| | 5′-v3 | PREVIKLPRGRETMYSVVQK | | | 3′-v4 | VKNIPSFLSTDNIGT | features | |
| | | SQHRAHKSDSSREVPELLKF | | | | RETFLAGLIDSDGYV | | |
| | | TCNATHELVVRTPRSVRRLS | | | | TDEHGIKATIKTIHTS | | |
| | | RTIKGVEYFEVITFEMGQKKA | | | | VRDGLVSLARSLGL | | |
| | | PDGRIVELVKEVSKSYPISEG | | | | VVSVNAEPAKVDMN | | |
| | | PERANELVESYRKASNKAYF | | | | VTKHKISYAIYMSGG | | |
| | | EWTIEARDLSLLGSHVRKATY | | | | DVLLNVLSKCAGSK | | |
| | | QTYAPILYENDHFFDYMQKS | | | | KFRPAPAAAFAREC | | |
| | | KFHLTIEGPKVLAYLLGLWIG | | | | RGFYFELQELKEDD | | |
| | | DGLSDRATFSVDSRDTSLME | | | | YYGITLSDDSDHQFL | | |
| | | RVTEYAEKLNLCAEYKDRKE | | | | LGSQVVVQNCGEKS | | |
| | | PQVAKTVNLYSKVVRG | | | | MGSG | | |
| Sce- | Sce- | GGVVLEKGCFAKGTNVLMAD | snapgene | 20716 | Sce- | VLLNVLSKCAGSKKF | https:// | 20726 |
| VMA | VMA- | GSIECIENIEVGNKVMGKDGR | | | VMA- | RPAPAAAFARECRG | www. | |
| | 5′-v3 | PREVIKLPRGRETMYSVVQK | | | 3′-v5 | FYFELQELKEDDYY | nature. | |
| | | SQHRAHKSDSSREVPELLKF | | | | GITLSDDSDHQFLLA | com/ | |
| | | TCNATHELVVRTPRSVRRLS | | | | NQVVVHN | articles/ | |
| | | RTIKGVEYFEVITFEMGQKKA | | | | | nmeth.3585 | |
| | | PDGRIVELVKEVSKSYPISEG | | | | | | |
| | | PERANELVESYRKASNKAYF | | | | | | |
| | | EWTIEARDLSLLGSHVRKATY | | | | | | |
| | | QTYAPILYENDHFFDYMQKS | | | | | | |
| | | KFHLTIEGPKVLAYLLGLWIG | | | | | | |
| | | DGLSDRATFSVDSRDTSLME | | | | | | |
| | | RVTEYAEKLNLCAEYKDRKE | | | | | | |
| | | PQVAKTVNLYSKVVRG | | | | | | |
| Sce- | Sce- | GGVVLEKGCFAKGTNVLMAD | snapgene | 20716 | Sce- | VLLNVLSKCAGSKKF | https:// | 20727 |
| VMA | VMA- | GSIECIENIEVGNKVMGKDGR | | | VMA- | RPAPAAAFARECRG | www. | |
| | 5′-v3 | PREVIKLPRGRETMYSVVQK | | | 3′-v6 | FYFELQELKEDDYY | nature. | |
| | | SQHRAHKSDSSREVPELLKF | | | | GITLSDDSDHQFLLA | com/ | |
| | | TCNATHELVVRTPRSVRRLS | | | | NQVVVHNCGERGN | articles/ | |
| | | RTIKGVEYFEVITFEMGQKKA | | | | GSG | nmeth.3585 | |
| | | PDGRIVELVKEVSKSYPISEG | | | | | | |
| | | PERANELVESYRKASNKAYF | | | | | | |
| | | EWTIEARDLSLLGSHVRKATY | | | | | | |
| | | QTYAPILYENDHFFDYMQKS | | | | | | |
| | | KFHLTIEGPKVLAYLLGLWIG | | | | | | |
| | | DGLSDRATFSVDSRDTSLME | | | | | | |
| | | RVTEYAEKLNLCAEYKDRKE | | | | | | |
| | | PQVAKTVNLYSKVVRG | | | | | | |
| Sce- | Sce- | GGVVLEKGCFAKGTNVLMAD | snapgene | 20716 | Sce- | VLLNVLSKCAGSKKF | https:// | 20728 |
| VMA | VMA- | GSIECIENIEVGNKVMGKDGR | | | VMA- | RPAPAAAFARECRG | www. | |
| | 5′-v3 | PREVIKLPRGRETMYSVVQK | | | 3′-v7 | FYFELQELKEDDYY | nature. | |
| | | SQHRAHKSDSSREVPELLKF | | | | GITLSDDSDHQFLLA | com/ | |
| | | TCNATHELVVRTPRSVRRLS | | | | NQVVVHNCTMTEKG | articles/ | |
| | | RTIKGVEYFEVITFEMGQKKA | | | | SG | nmeth.3585 | |
| | | PDGRIVELVKEVSKSYPISEG | | | | | | |
| | | PERANELVESYRKASNKAYF | | | | | | |
| | | EWTIEARDLSLLGSHVRKATY | | | | | | |
| | | QTYAPILYENDHFFDYMQKS | | | | | | |
| | | KFHLTIEGPKVLAYLLGLWIG | | | | | | |
| | | DGLSDRATFSVDSRDTSLME | | | | | | |
| | | RVTEYAEKLNLCAEYKDRKE | | | | | | |
| | | PQVAKTVNLYSKVVRG | | | | | | |
| Sce- | Sce- | GGVVLEKGCFAKGTNVLMAD | snapgene | 20716 | Sce- | VLLNVLSKCAGSKKF | https:// | 20729 |
| VMA | VMA- | GSIECIENIEVGNKVMGKDGR | | | VMA- | RPAPAAAFARECRG | www. | |
| | 5′-v3 | PREVIKLPRGRETMYSVVQK | | | 3′-v8 | FYFELQELKEDDYY | nature. | |
| | | SQHRAHKSDSSREVPELLKF | | | | GITLSDDSDHQFLLA | com/ | |
| | | TCNATHELVVRTPRSVRRLS | | | | NQVVVHNCGEKSM | articles/ | |
| | | RTIKGVEYFEVITFEMGQKKA | | | | GSG | nmeth.3585 | |
| | | PDGRIVELVKEVSKSYPISEG | | | | | | |
| | | PERANELVESYRKASNKAYF | | | | | | |
| | | EWTIEARDLSLLGSHVRKATY | | | | | | |
| | | QTYAPILYENDHFFDYMQKS | | | | | | |
| | | KFHLTIEGPKVLAYLLGLWIG | | | | | | |
| | | DGLSDRATFSVDSRDTSLME | | | | | | |
| | | RVTEYAEKLNLCAEYKDRKE | | | | | | |
| | | PQVAKTVNLYSKVVRG | | | | | | |
| Sce- | Sce- | GGFQTVGCFAKGTNVLMAD | snapgene | 20717 | Sce- | GHGGIRNNLNTENP | snapgene | 20722 |
| VMA | VMA- | GSIECIENIEVGNKVMGKDGR | | | VMA- | LWDAIVGLGFLKDG | common | |
| | 5′-v4 | PREVIKLPRGRETMYSVVQK | | | 3′-v1 | VKNIPSFLSTDNIGT | features | |
| | | SQHRAHKSDSSREVPELLKF | | | | RETFLAGLIDSDGYV | | |
| | | TCNATHELVVRTPRSVRRLS | | | | TDEHGIKATIKTIHTS | | |
| | | RTIKGVEYFEVITFEMGQKKA | | | | VRDGLVSLARSLGL | | |
| | | PDGRIVELVKEVSKSYPISEG | | | | VVSVNAEPAKVDMN | | |
| | | PERANELVESYRKASNKAYF | | | | VTKHKISYAIYMSGG | | |
| | | EWTIEARDLSLLGSHVRKATY | | | | DVLLNVLSKCAGSK | | |
| | | QTYAPILYENDHFFDYMQKS | | | | KFRPAPAAAFAREC | | |
| | | KFHLTIEGPKVLAYLLGLWIG | | | | RGFYFELQELKEDD | | |
| | | DGLSDRATFSVDSRDTSLME | | | | YYGITLSDDSDHQFL | | |
| | | RVTEYAEKLNLCAEYKDRKE | | | | LGSQVVVQN | | |
| | | PQVAKTVNLYSKVVRG | | | | | | |
| Sce- | Sce- | GGFQTVGCFAKGTNVLMAD | snapgene | 20717 | Sce- | GHGGIRNNLNTENP | snapgene | 20723 |
| VMA | VMA- | GSIECIENIEVGNKVMGKDGR | | | VMA- | LWDAIVGLGFLKDG | common | |
| | 5′-v4 | PREVIKLPRGRETMYSVVQK | | | 3′-v2 | VKNIPSFLSTDNIGT | features | |
| | | SQHRAHKSDSSREVPELLKF | | | | RETFLAGLIDSDGYV | | |
| | | TCNATHELVVRTPRSVRRLS | | | | TDEHGIKATIKTIHTS | | |
| | | RTIKGVEYFEVITFEMGQKKA | | | | VRDGLVSLARSLGL | | |
| | | PDGRIVELVKEVSKSYPISEG | | | | VVSVNAEPAKVDMN | | |
| | | PERANELVESYRKASNKAYF | | | | VTKHKISYAIYMSGG | | |
| | | EWTIEARDLSLLGSHVRKATY | | | | DVLLNVLSKCAGSK | | |
| | | QTYAPILYENDHFFDYMQKS | | | | KFRPAPAAAFAREC | | |
| | | KFHLTIEGPKVLAYLLGLWIG | | | | RGFYFELQELKEDD | | |
| | | DGLSDRATFSVDSRDTSLME | | | | YYGITLSDDSDHQFL | | |
| | | RVTEYAEKLNLCAEYKDRKE | | | | LGSQVVVQNCGER | | |
| | | PQVAKTVNLYSKVVRG | | | | GNGSG | | |
| Sce- | Sce- | GGFQTVGCFAKGTNVLMAD | snapgene | 20717 | Sce- | GHGGIRNNLNTENP | snapgene | 20724 |
| VMA | VMA- | GSIECIENIEVGNKVMGKDGR | | | VMA- | LWDAIVGLGFLKDG | common | |
| | 5′-v4 | PREVIKLPRGRETMYSVVQK | | | 3′-v3 | VKNIPSFLSTDNIGT | features | |
| | | SQHRAHKSDSSREVPELLKF | | | | RETFLAGLIDSDGYV | | |
| | | TCNATHELVVRTPRSVRRLS | | | | TDEHGIKATIKTIHTS | | |
| | | RTIKGVEYFEVITFEMGQKKA | | | | VRDGLVSLARSLGL | | |
| | | PDGRIVELVKEVSKSYPISEG | | | | VVSVNAEPAKVDMN | | |
| | | PERANELVESYRKASNKAYF | | | | VTKHKISYAIYMSGG | | |
| | | EWTIEARDLSLLGSHVRKATY | | | | DVLLNVLSKCAGSK | | |
| | | QTYAPILYENDHFFDYMQKS | | | | KFRPAPAAAFAREC | | |
| | | KFHLTIEGPKVLAYLLGLWIG | | | | RGFYFELQELKEDD | | |
| | | DGLSDRATFSVDSRDTSLME | | | | YYGITLSDDSDHQFL | | |
| | | RVTEYAEKLNLCAEYKDRKE | | | | LGSQVVVQNCTMTE | | |
| | | PQVAKTVNLYSKVVRG | | | | KGSG | | |
| Sce- | Sce- | GGFQTVGCFAKGTNVLMAD | snapgene | 20717 | Sce- | GHGGIRNNLNTENP | snapgene | 20725 |
| VMA | VMA- | GSIECIENIEVGNKVMGKDGR | | | VMA- | LWDAIVGLGFLKDG | common | |
| | 5′-v4 | PREVIKLPRGRETMYSVVQK | | | 3′-v4 | VKNIPSFLSTDNIGT | features | |
| | | SQHRAHKSDSSREVPELLKF | | | | RETFLAGLIDSDGYV | | |
| | | TCNATHELVVRTPRSVRRLS | | | | TDEHGIKATIKTIHTS | | |
| | | RTIKGVEYFEVITFEMGQKKA | | | | VRDGLVSLARSLGL | | |
| | | PDGRIVELVKEVSKSYPISEG | | | | VVSVNAEPAKVDMN | | |
| | | PERANELVESYRKASNKAYF | | | | VTKHKISYAIYMSGG | | |
| | | EWTIEARDLSLLGSHVRKATY | | | | DVLLNVLSKCAGSK | | |
| | | QTYAPILYENDHFFDYMQKS | | | | KFRPAPAAAFAREC | | |
| | | KFHLTIEGPKVLAYLLGLWIG | | | | RGFYFELQELKEDD | | |
| | | DGLSDRATFSVDSRDTSLME | | | | YYGITLSDDSDHQFL | | |
| | | RVTEYAEKLNLCAEYKDRKE | | | | LGSQVVVQNCGEKS | | |
| | | PQVAKTVNLYSKVVRG | | | | MGSG | | |
| Sce- | Sce- | GGFQTVGCFAKGTNVLMAD | snapgene | 20717 | Sce- | VLLNVLSKCAGSKKF | https:// | 20726 |
| VMA | VMA- | GSIECIENIEVGNKVMGKDGR | | | VMA- | RPAPAAAFARECRG | www. | |
| | 5′-v4 | PREVIKLPRGRETMYSVVQK | | | 3′-v5 | FYFELQELKEDDYY | nature. | |
| | | SQHRAHKSDSSREVPELLKF | | | | GITLSDDSDHQFLLA | com/ | |
| | | TCNATHELVVRTPRSVRRLS | | | | NQVVVHN | articles/ | |
| | | RTIKGVEYFEVITFEMGQKKA | | | | | nmeth.3585 | |
| | | PDGRIVELVKEVSKSYPISEG | | | | | | |
| | | PERANELVESYRKASNKAYF | | | | | | |
| | | EWTIEARDLSLLGSHVRKATY | | | | | | |
| | | QTYAPILYENDHFFDYMQKS | | | | | | |
| | | KFHLTIEGPKVLAYLLGLWIG | | | | | | |
| | | DGLSDRATFSVDSRDTSLME | | | | | | |
| | | RVTEYAEKLNLCAEYKDRKE | | | | | | |
| | | PQVAKTVNLYSKVVRG | | | | | | |
| Sce- | Sce- | GGFQTVGCFAKGTNVLMAD | snapgene | 20717 | Sce- | VLLNVLSKCAGSKKF | https:// | 20727 |
| VMA | VMA- | GSIECIENIEVGNKVMGKDGR | | | VMA- | RPAPAAAFARECRG | www. | |
| | 5′-v4 | PREVIKLPRGRETMYSVVQK | | | 3′-v6 | FYFELQELKEDDYY | nature. | |
| | | SQHRAHKSDSSREVPELLKF | | | | GITLSDDSDHQFLLA | com/ | |
| | | TCNATHELVVRTPRSVRRLS | | | | NQVVVHNCGERGN | articles/ | |
| | | RTIKGVEYFEVITFEMGQKKA | | | | GSG | nmeth.3585 | |
| | | PDGRIVELVKEVSKSYPISEG | | | | | | |
| | | PERANELVESYRKASNKAYF | | | | | | |
| | | EWTIEARDLSLLGSHVRKATY | | | | | | |
| | | QTYAPILYENDHFFDYMQKS | | | | | | |
| | | KFHLTIEGPKVLAYLLGLWIG | | | | | | |
| | | DGLSDRATFSVDSRDTSLME | | | | | | |
| | | RVTEYAEKLNLCAEYKDRKE | | | | | | |
| | | PQVAKTVNLYSKVVRG | | | | | | |
| Sce- | Sce- | GGFQTVGCFAKGTNVLMAD | snapgene | 20717 | Sce- | VLLNVLSKCAGSKKF | https:// | 20728 |
| VMA | VMA- | GSIECIENIEVGNKVMGKDGR | | | VMA- | RPAPAAAFARECRG | www. | |
| | 5′-v4 | PREVIKLPRGRETMYSVVQK | | | 3′-v7 | FYFELQELKEDDYY | nature. | |
| | | SQHRAHKSDSSREVPELLKF | | | | GITLSDDSDHQFLLA | com/ | |
| | | TCNATHELVVRTPRSVRRLS | | | | NQVVVHNCTMTEKG | articles/ | |
| | | RTIKGVEYFEVITFEMGQKKA | | | | SG | nmeth.3585 | |
| | | PDGRIVELVKEVSKSYPISEG | | | | | | |
| | | PERANELVESYRKASNKAYF | | | | | | |
| | | EWTIEARDLSLLGSHVRKATY | | | | | | |
| | | QTYAPILYENDHFFDYMQKS | | | | | | |
| | | KFHLTIEGPKVLAYLLGLWIG | | | | | | |
| | | DGLSDRATFSVDSRDTSLME | | | | | | |
| | | RVTEYAEKLNLCAEYKDRKE | | | | | | |
| | | PQVAKTVNLYSKVVRG | | | | | | |
| Sce- | Sce- | GGFQTVGCFAKGTNVLMAD | snapgene | 20717 | Sce- | VLLNVLSKCAGSKKF | https:// | 20729 |
| VMA | VMA- | GSIECIENIEVGNKVMGKDGR | | | VMA- | RPAPAAAFARECRG | www. | |
| | 5′-v4 | PREVIKLPRGRETMYSVVQK | | | 3′-v8 | FYFELQELKEDDYY | nature. | |
| | | SQHRAHKSDSSREVPELLKF | | | | GITLSDDSDHQFLLA | com/ | |
| | | TCNATHELVVRTPRSVRRLS | | | | NQVVVHNCGEKSM | articles/ | |
| | | RTIKGVEYFEVITFEMGQKKA | | | | GSG | nmeth.3585 | |
| | | PDGRIVELVKEVSKSYPISEG | | | | | | |
| | | PERANELVESYRKASNKAYF | | | | | | |
| | | EWTIEARDLSLLGSHVRKATY | | | | | | |
| | | QTYAPILYENDHFFDYMQKS | | | | | | |
| | | KFHLTIEGPKVLAYLLGLWIG | | | | | | |
| | | DGLSDRATFSVDSRDTSLME | | | | | | |
| | | RVTEYAEKLNLCAEYKDRKE | | | | | | |
| | | PQVAKTVNLYSKVVRG | | | | | | |
| Sce- | Sce- | CFAKGTNVLMADGSIECIENI | https:// | 20718 | Sce- | GHGGIRNNLNTENP | snapgene | 20722 |
| VMA | VMA- | EVGNKVMGKDGRPREVIKLP | www. | | VMA- | LWDAIVGLGFLKDG | common | |
| | 5′-v5 | RGRETMYSVVQKSQHRAHK | nature. | | 3′-v1 | VKNIPSFLSTDNIGT | features | |
| | | SDSSREVPELLKFTCNATHEL | com/ | | | RETFLAGLIDSDGYV | | |
| | | VVRTPRSVRRLSRTIKGVEYF | articles/ | | | TDEHGIKATIKTIHTS | | |
| | | EVITFEMGQKKAPDGRIVELV | nmeth. | | | VRDGLVSLARSLGL | | |
| | | KEVSKSYPISEGPERANELVE | 3585 | | | VVSVNAEPAKVDMN | | |
| | | SYRKASNKAYFEWTIEARDL | | | | VTKHKISYAIYMSGG | | |
| | | SLLGSHVRKATYQTYAPI | | | | DVLLNVLSKCAGSK | | |
| | | | | | | KFRPAPAAAFAREC | | |
| | | | | | | RGFYFELQELKEDD | | |
| | | | | | | YYGITLSDDSDHQFL | | |
| | | | | | | LGSQVVVQN | | |
| Sce- | Sce- | CFAKGTNVLMADGSIECIENI | https:// | 20718 | Sce- | GHGGIRNNLNTENP | snapgene | 20723 |
| VMA | VMA- | EVGNKVMGKDGRPREVIKLP | www. | | VMA- | LWDAIVGLGFLKDG | common | |
| | 5′-v5 | RGRETMYSVVQKSQHRAHK | nature. | | 3′-v2 | VKNIPSFLSTDNIGT | features | |
| | | SDSSREVPELLKFTCNATHEL | com/ | | | RETFLAGLIDSDGYV | | |
| | | VVRTPRSVRRLSRTIKGVEYF | articles/ | | | TDEHGIKATIKTIHTS | | |
| | | EVITFEMGQKKAPDGRIVELV | nmeth. | | | VRDGLVSLARSLGL | | |
| | | KEVSKSYPISEGPERANELVE | 3585 | | | VVSVNAEPAKVDMN | | |
| | | SYRKASNKAYFEWTIEARDL | | | | VTKHKISYAIYMSGG | | |
| | | SLLGSHVRKATYQTYAPI | | | | DVLLNVLSKCAGSK | | |
| | | | | | | KFRPAPAAAFAREC | | |
| | | | | | | RGFYFELQELKEDD | | |
| | | | | | | YYGITLSDDSDHQFL | | |
| | | | | | | LGSQVVVQNCGER | | |
| | | | | | | GNGSG | | |
| Sce- | Sce- | CFAKGTNVLMADGSIECIENI | https:// | 20718 | Sce- | GHGGIRNNLNTENP | snapgene | 20724 |
| VMA | VMA- | EVGNKVMGKDGRPREVIKLP | www. | | VMA- | LWDAIVGLGFLKDG | common | |
| | 5′-v5 | RGRETMYSVVQKSQHRAHK | nature. | | 3′-v3 | VKNIPSFLSTDNIGT | features | |
| | | SDSSREVPELLKFTCNATHEL | com/ | | | RETFLAGLIDSDGYV | | |
| | | VVRTPRSVRRLSRTIKGVEYF | articles/ | | | TDEHGIKATIKTIHTS | | |
| | | EVITFEMGQKKAPDGRIVELV | nmeth. | | | VRDGLVSLARSLGL | | |
| | | KEVSKSYPISEGPERANELVE | 3585 | | | VVSVNAEPAKVDMN | | |
| | | SYRKASNKAYFEWTIEARDL | | | | VTKHKISYAIYMSGG | | |
| | | SLLGSHVRKATYQTYAPI | | | | DVLLNVLSKCAGSK | | |
| | | | | | | KFRPAPAAAFAREC | | |
| | | | | | | RGFYFELQELKEDD | | |
| | | | | | | YYGITLSDDSDHQFL | | |
| | | | | | | LGSQVVVQNCTMTE | | |
| | | | | | | KGSG | | |
| Sce- | Sce- | CFAKGTNVLMADGSIECIENI | https:// | 20718 | Sce- | GHGGIRNNLNTENP | snapgene | 20725 |
| VMA | VMA- | EVGNKVMGKDGRPREVIKLP | www. | | VMA- | LWDAIVGLGFLKDG | common | |
| | 5′-v5 | RGRETMYSVVQKSQHRAHK | nature. | | 31-v4 | VKNIPSFLSTDNIGT | features | |
| | | SDSSREVPELLKFTCNATHEL | com/ | | | RETFLAGLIDSDGYV | | |
| | | VVRTPRSVRRLSRTIKGVEYF | articles/ | | | TDEHGIKATIKTIHTS | | |
| | | EVITFEMGQKKAPDGRIVELV | nmeth. | | | VRDGLVSLARSLGL | | |
| | | KEVSKSYPISEGPERANELVE | 3585 | | | VVSVNAEPAKVDMN | | |
| | | SYRKASNKAYFEWTIEARDL | | | | VTKHKISYAIYMSGG | | |
| | | SLLGSHVRKATYQTYAPI | | | | DVLLNVLSKCAGSK | | |
| | | | | | | KFRPAPAAAFAREC | | |
| | | | | | | RGFYFELQELKEDD | | |
| | | | | | | YYGITLSDDSDHQFL | | |
| | | | | | | LGSQVVVQNCGEKS | | |
| | | | | | | MGSG | | |
| Sce- | Sce- | CFAKGTNVLMADGSIECIENI | https:// | 20718 | Sce- | VLLNVLSKCAGSKKF | https:// | 20726 |
| VMA | VMA- | EVGNKVMGKDGRPREVIKLP | www. | | VMA- | RPAPAAAFARECRG | www. | |
| | 5′-v5 | RGRETMYSVVQKSQHRAHK | nature. | | 3′-v5 | FYFELQELKEDDYY | nature. | |
| | | SDSSREVPELLKFTCNATHEL | com/ | | | GITLSDDSDHQFLLA | com/ | |
| | | VVRTPRSVRRLSRTIKGVEYF | articles/ | | | NQVVVHN | articles/ | |
| | | EVITFEMGQKKAPDGRIVELV | nmeth. | | | | nmeth.3585 | |
| | | KEVSKSYPISEGPERANELVE | 3585 | | | | | |
| | | SYRKASNKAYFEWTIEARDL | | | | | | |
| | | SLLGSHVRKATYQTYAPI | | | | | | |
| Sce- | Sce- | CFAKGTNVLMADGSIECIENI | https:// | 20718 | Sce- | VLLNVLSKCAGSKKF | https:// | 20727 |
| VMA | VMA- | EVGNKVMGKDGRPREVIKLP | www. | | VMA- | RPAPAAAFARECRG | www. | |
| | 5′-v5 | RGRETMYSVVQKSQHRAHK | nature. | | 3′-v6 | FYFELQELKEDDYY | nature. | |
| | | SDSSREVPELLKFTCNATHEL | com/ | | | GITLSDDSDHQFLLA | com/ | |
| | | VVRTPRSVRRLSRTIKGVEYF | articles/ | | | NQVVVHNCGERGN | articles/ | |
| | | EVITFEMGQKKAPDGRIVELV | nmeth. | | | GSG | nmeth.3585 | |
| | | KEVSKSYPISEGPERANELVE | 3585 | | | | | |
| | | SYRKASNKAYFEWTIEARDL | | | | | | |
| | | SLLGSHVRKATYQTYAPI | | | | | | |
| Sce- | Sce- | CFAKGTNVLMADGSIECIENI | https:// | 20718 | Sce- | VLLNVLSKCAGSKKF | https:// | 20728 |
| VMA | VMA- | EVGNKVMGKDGRPREVIKLP | www. | | VMA- | RPAPAAAFARECRG | www. | |
| | 5′-v5 | RGRETMYSVVQKSQHRAHK | nature. | | 3′-v7 | FYFELQELKEDDYY | nature. | |
| | | SDSSREVPELLKFTCNATHEL | com/ | | | GITLSDDSDHQFLLA | com/ | |
| | | VVRTPRSVRRLSRTIKGVEYF | articles/ | | | NQVVVHNCTMTEKG | articles/ | |
| | | EVITFEMGQKKAPDGRIVELV | nmeth. | | | SG | nmeth.3585 | |
| | | KEVSKSYPISEGPERANELVE | 3585 | | | | | |
| | | SYRKASNKAYFEWTIEARDL | | | | | | |
| | | SLLGSHVRKATYQTYAPI | | | | | | |
| Sce- | Sce- | CFAKGTNVLMADGSIECIENI | https:// | 20718 | Sce- | VLLNVLSKCAGSKKF | https:// | 20729 |
| VMA | VMA- | EVGNKVMGKDGRPREVIKLP | www. | | VMA- | RPAPAAAFARECRG | www. | |
| | 5′-v5 | RGRETMYSVVQKSQHRAHK | nature. | | 3′-v8 | FYFELQELKEDDYY | nature. | |
| | | SDSSREVPELLKFTCNATHEL | com/ | | | GITLSDDSDHQFLLA | com/ | |
| | | VVRTPRSVRRLSRTIKGVEYF | articles/ | | | NQVVVHNCGEKSM | articles/ | |
| | | EVITFEMGQKKAPDGRIVELV | nmeth. | | | GSG | nmeth.3585 | |
| | | KEVSKSYPISEGPERANELVE | 3585 | | | | | |
| | | SYRKASNKAYFEWTIEARDL | | | | | | |
| | | SLLGSHVRKATYQTYAPI | | | | | | |
| Sce- | Sce- | GGIIYVGCFAKGTNVLMADG | https:// | 20719 | Sce- | GHGGIRNNLNTENP | snapgene | 20722 |
| VMA | VMA- | SIECIENIEVGNKVMGKDGRP | www. | | VMA- | LWDAIVGLGFLKDG | common | |
| | 5′-v6 | REVIKLPRGRETMYSVVQKS | nature. | | 3′-v1 | VKNIPSFLSTDNIGT | features | |
| | | QHRAHKSDSSREVPELLKFT | com/ | | | RETFLAGLIDSDGYV | | |
| | | CNATHELVVRTPRSVRRLSR | articles/ | | | TDEHGIKATIKTIHTS | | |
| | | TIKGVEYFEVITFEMGQKKAP | nmeth. | | | VRDGLVSLARSLGL | | |
| | | DGRIVELVKEVSKSYPISEGP | 3585 | | | VVSVNAEPAKVDMN | | |
| | | ERANELVESYRKASNKAYFE | | | | VTKHKISYAIYMSGG | | |
| | | WTIEARDLSLLGSHVRKATY | | | | DVLLNVLSKCAGSK | | |
| | | QTYAPI | | | | KFRPAPAAAFAREC | | |
| | | | | | | RGFYFELQELKEDD | | |
| | | | | | | YYGITLSDDSDHQFL | | |
| | | | | | | LGSQVVVQN | | |
| Sce- | Sce- | GGIIYVGCFAKGTNVLMADG | https:// | 20719 | Sce- | GHGGIRNNLNTENP | snapgene | 20723 |
| VMA | VMA- | SIECIENIEVGNKVMGKDGRP | www. | | VMA- | LWDAIVGLGFLKDG | common | |
| | 5′-v6 | REVIKLPRGRETMYSVVQKS | nature. | | 3′-v2 | VKNIPSFLSTDNIGT | features | |
| | | QHRAHKSDSSREVPELLKFT | com/ | | | RETFLAGLIDSDGYV | | |
| | | CNATHELVVRTPRSVRRLSR | articles/ | | | TDEHGIKATIKTIHTS | | |
| | | TIKGVEYFEVITFEMGQKKAP | nmeth. | | | VRDGLVSLARSLGL | | |
| | | DGRIVELVKEVSKSYPISEGP | 3585 | | | VVSVNAEPAKVDMN | | |
| | | ERANELVESYRKASNKAYFE | | | | VTKHKISYAIYMSGG | | |
| | | WTIEARDLSLLGSHVRKATY | | | | DVLLNVLSKCAGSK | | |
| | | QTYAPI | | | | KFRPAPAAAFAREC | | |
| | | | | | | RGFYFELQELKEDD | | |
| | | | | | | YYGITLSDDSDHQFL | | |
| | | | | | | LGSQVVVQNCGER | | |
| | | | | | | GNGSG | | |
| Sce- | Sce- | GGIIYVGCFAKGTNVLMADG | https:// | 20719 | Sce- | GHGGIRNNLNTENP | snapgene | 20724 |
| VMA | VMA- | SIECIENIEVGNKVMGKDGRP | www. | | VMA- | LWDAIVGLGFLKDG | common | |
| | 5′-v6 | REVIKLPRGRETMYSVVQKS | nature. | | 3′-v3 | VKNIPSFLSTDNIGT | features | |
| | | QHRAHKSDSSREVPELLKFT | com/ | | | RETFLAGLIDSDGYV | | |
| | | CNATHELVVRTPRSVRRLSR | articles/ | | | TDEHGIKATIKTIHTS | | |
| | | TIKGVEYFEVITFEMGQKKAP | nmeth. | | | VRDGLVSLARSLGL | | |
| | | DGRIVELVKEVSKSYPISEGP | 3585 | | | VVSVNAEPAKVDMN | | |
| | | ERANELVESYRKASNKAYFE | | | | VTKHKISYAIYMSGG | | |
| | | WTIEARDLSLLGSHVRKATY | | | | DVLLNVLSKCAGSK | | |
| | | QTYAPI | | | | KFRPAPAAAFAREC | | |
| | | | | | | RGFYFELQELKEDD | | |
| | | | | | | YYGITLSDDSDHQFL | | |
| | | | | | | LGSQVVVQNCTMTE | | |
| | | | | | | KGSG | | |
| Sce- | Sce- | GGIIYVGCFAKGTNVLMADG | https:// | 20719 | Sce- | GHGGIRNNLNTENP | snapgene | 20725 |
| VMA | VMA- | SIECIENIEVGNKVMGKDGRP | www. | | VMA- | LWDAIVGLGFLKDG | common | |
| | 5′-v6 | REVIKLPRGRETMYSVVQKS | nature. | | 3′-v4 | VKNIPSFLSTDNIGT | features | |
| | | QHRAHKSDSSREVPELLKFT | com/ | | | RETFLAGLIDSDGYV | | |
| | | CNATHELVVRTPRSVRRLSR | articles/ | | | TDEHGIKATIKTIHTS | | |
| | | TIKGVEYFEVITFEMGQKKAP | nmeth. | | | VRDGLVSLARSLGL | | |
| | | DGRIVELVKEVSKSYPISEGP | 3585 | | | VVSVNAEPAKVDMN | | |
| | | ERANELVESYRKASNKAYFE | | | | VTKHKISYAIYMSGG | | |
| | | WTIEARDLSLLGSHVRKATY | | | | DVLLNVLSKCAGSK | | |
| | | QTYAPI | | | | KFRPAPAAAFAREC | | |
| | | | | | | RGFYFELQELKEDD | | |
| | | | | | | YYGITLSDDSDHQFL | | |
| | | | | | | LGSQVVVQNCGEKS | | |
| | | | | | | MGSG | | |
| Sce- | Sce- | GGIIYVGCFAKGTNVLMADG | https:// | 20719 | Sce- | VLLNVLSKCAGSKKF | https:// | 20726 |
| VMA | VMA- | SIECIENIEVGNKVMGKDGRP | www. | | VMA- | RPAPAAAFARECRG | www. | |
| | 5′-v6 | REVIKLPRGRETMYSVVQKS | nature. | | 3′-v5 | FYFELQELKEDDYY | nature. | |
| | | QHRAHKSDSSREVPELLKFT | com/ | | | GITLSDDSDHQFLLA | com/ | |
| | | CNATHELVVRTPRSVRRLSR | articles/ | | | NQVVVHN | articles/ | |
| | | TIKGVEYFEVITFEMGQKKAP | nmeth. | | | | nmeth.3585 | |
| | | DGRIVELVKEVSKSYPISEGP | 3585 | | | | | |
| | | ERANELVESYRKASNKAYFE | | | | | | |
| | | WTIEARDLSLLGSHVRKATY | | | | | | |
| | | QTYAPI | | | | | | |
| Sce- | Sce- | GGIIYVGCFAKGTNVLMADG | https:// | 20719 | Sce- | VLLNVLSKCAGSKKF | https:// | 20727 |
| VMA | VMA- | SIECIENIEVGNKVMGKDGRP | www. | | VMA- | RPAPAAAFARECRG | www. | |
| | 5′-v6 | REVIKLPRGRETMYSVVQKS | nature. | | 3′-v6 | FYFELQELKEDDYY | nature. | |
| | | QHRAHKSDSSREVPELLKFT | com/ | | | GITLSDDSDHQFLLA | com/ | |
| | | CNATHELVVRTPRSVRRLSR | articles/ | | | NQVVVHNCGERGN | articles/ | |
| | | TIKGVEYFEVITFEMGQKKAP | nmeth. | | | GSG | nmeth.3585 | |
| | | DGRIVELVKEVSKSYPISEGP | 3585 | | | | | |
| | | ERANELVESYRKASNKAYFE | | | | | | |
| | | WTIEARDLSLLGSHVRKATY | | | | | | |
| | | QTYAPI | | | | | | |
| Sce- | Sce- | GGIIYVGCFAKGTNVLMADG | https:// | 20719 | Sce- | VLLNVLSKCAGSKKF | https:// | 20728 |
| VMA | VMA- | SIECIENIEVGNKVMGKDGRP | www. | | VMA- | RPAPAAAFARECRG | www. | |
| | 5′-v6 | REVIKLPRGRETMYSVVQKS | nature. | | 3′-v7 | FYFELQELKEDDYY | nature. | |
| | | QHRAHKSDSSREVPELLKFT | com/ | | | GITLSDDSDHQFLLA | com/ | |
| | | CNATHELVVRTPRSVRRLSR | articles/ | | | NQVVVHNCTMTEKG | articles/ | |
| | | TIKGVEYFEVITFEMGQKKAP | nmeth. | | | SG | nmeth.3585 | |
| | | DGRIVELVKEVSKSYPISEGP | 3585 | | | | | |
| | | ERANELVESYRKASNKAYFE | | | | | | |
| | | WTIEARDLSLLGSHVRKATY | | | | | | |
| | | QTYAPI | | | | | | |
| Sce- | Sce- | GGIIYVGCFAKGTNVLMADG | https:// | 20719 | Sce- | VLLNVLSKCAGSKKF | https:// | 20729 |
| VMA | VMA- | SIECIENIEVGNKVMGKDGRP | www. | | VMA- | RPAPAAAFARECRG | www. | |
| | 5′-v6 | REVIKLPRGRETMYSVVQKS | nature. | | 3′-v8 | FYFELQELKEDDYY | nature. | |
| | | QHRAHKSDSSREVPELLKFT | com/ | | | GITLSDDSDHQFLLA | com/ | |
| | | CNATHELVVRTPRSVRRLSR | articles/ | | | NQVVVHNCGEKSM | articles/ | |
| | | TIKGVEYFEVITFEMGQKKAP | nmeth. | | | GSG | nmeth.3585 | |
| | | DGRIVELVKEVSKSYPISEGP | 3585 | | | | | |
| | | ERANELVESYRKASNKAYFE | | | | | | |
| | | WTIEARDLSLLGSHVRKATY | | | | | | |
| | | QTYAPI | | | | | | |
| Sce- | Sce- | GGVVLEKGCFAKGTNVLMAD | https:// | 20720 | Sce- | GHGGIRNNLNTENP | snapgene | 20722 |
| VMA | VMA- | GSIECIENIEVGNKVMGKDGR | www. | | VMA- | LWDAIVGLGFLKDG | common | |
| | 5′-v7 | PREVIKLPRGRETMYSVVQK | nature. | | 3′-v1 | VKNIPSFLSTDNIGT | features | |
| | | SQHRAHKSDSSREVPELLKF | com/ | | | RETFLAGLIDSDGYV | | |
| | | TCNATHELVVRTPRSVRRLS | articles/ | | | TDEHGIKATIKTIHTS | | |
| | | RTIKGVEYFEVITFEMGQKKA | nmeth. | | | VRDGLVSLARSLGL | | |
| | | PDGRIVELVKEVSKSYPISEG | 3585 | | | VVSVNAEPAKVDMN | | |
| | | PERANELVESYRKASNKAYF | | | | VTKHKISYAIYMSGG | | |
| | | EWTIEARDLSLLGSHVRKATY | | | | DVLLNVLSKCAGSK | | |
| | | QTYAPI | | | | KFRPAPAAAFAREC | | |
| | | | | | | RGFYFELQELKEDD | | |
| | | | | | | YYGITLSDDSDHQFL | | |
| | | | | | | LGSQVVVQN | | |
| Sce- | Sce- | GGVVLEKGCFAKGTNVLMAD | https:// | 20720 | Sce- | GHGGIRNNLNTENP | snapgene | 20723 |
| VMA | VMA- | GSIECIENIEVGNKVMGKDGR | www. | | VMA- | LWDAIVGLGFLKDG | common | |
| | 5′-v7 | PREVIKLPRGRETMYSVVQK | nature. | | 3′-v2 | VKNIPSFLSTDNIGT | features | |
| | | SQHRAHKSDSSREVPELLKF | com/ | | | RETFLAGLIDSDGYV | | |
| | | TCNATHELVVRTPRSVRRLS | articles/ | | | TDEHGIKATIKTIHTS | | |
| | | RTIKGVEYFEVITFEMGQKKA | nmeth. | | | VRDGLVSLARSLGL | | |
| | | PDGRIVELVKEVSKSYPISEG | 3585 | | | VVSVNAEPAKVDMN | | |
| | | PERANELVESYRKASNKAYF | | | | VTKHKISYAIYMSGG | | |
| | | EWTIEARDLSLLGSHVRKATY | | | | DVLLNVLSKCAGSK | | |
| | | QTYAPI | | | | KFRPAPAAAFAREC | | |
| | | | | | | RGFYFELQELKEDD | | |
| | | | | | | YYGITLSDDSDHQFL | | |
| | | | | | | LGSQVVVQNCGER | | |
| | | | | | | GNGSG | | |
| Sce- | Sce- | GGVVLEKGCFAKGTNVLMAD | https:// | 20720 | Sce- | GHGGIRNNLNTENP | snapgene | 20724 |
| VMA | VMA- | GSIECIENIEVGNKVMGKDGR | www. | | VMA- | LWDAIVGLGFLKDG | common | |
| | 5′-v7 | PREVIKLPRGRETMYSVVQK | nature. | | 3′-v3 | VKNIPSFLSTDNIGT | features | |
| | | SQHRAHKSDSSREVPELLKF | com/ | | | RETFLAGLIDSDGYV | | |
| | | TCNATHELVVRTPRSVRRLS | articles/ | | | TDEHGIKATIKTIHTS | | |
| | | RTIKGVEYFEVITFEMGQKKA | nmeth. | | | VRDGLVSLARSLGL | | |
| | | PDGRIVELVKEVSKSYPISEG | 3585 | | | VVSVNAEPAKVDMN | | |
| | | PERANELVESYRKASNKAYF | | | | VTKHKISYAIYMSGG | | |
| | | EWTIEARDLSLLGSHVRKATY | | | | DVLLNVLSKCAGSK | | |
| | | QTYAPI | | | | KFRPAPAAAFAREC | | |
| | | | | | | RGFYFELQELKEDD | | |
| | | | | | | YYGITLSDDSDHQFL | | |
| | | | | | | LGSQVVVQNCTMTE | | |
| | | | | | | KGSG | | |
| Sce- | Sce- | GGVVLEKGCFAKGTNVLMAD | https:// | 20720 | Sce- | GHGGIRNNLNTENP | snapgene | 20725 |
| VMA | VMA- | GSIECIENIEVGNKVMGKDGR | www. | | VMA- | LWDAIVGLGFLKDG | common | |
| | 5′-v7 | PREVIKLPRGRETMYSVVQK | nature. | | 3′-v4 | VKNIPSFLSTDNIGT | features | |
| | | SQHRAHKSDSSREVPELLKF | com/ | | | RETFLAGLIDSDGYV | | |
| | | TCNATHELVVRTPRSVRRLS | articles/ | | | TDEHGIKATIKTIHTS | | |
| | | RTIKGVEYFEVITFEMGQKKA | nmeth. | | | VRDGLVSLARSLGL | | |
| | | PDGRIVELVKEVSKSYPISEG | 3585 | | | VVSVNAEPAKVDMN | | |
| | | PERANELVESYRKASNKAYF | | | | VTKHKISYAIYMSGG | | |
| | | EWTIEARDLSLLGSHVRKATY | | | | DVLLNVLSKCAGSK | | |
| | | QTYAPI | | | | KFRPAPAAAFAREC | | |
| | | | | | | RGFYFELQELKEDD | | |
| | | | | | | YYGITLSDDSDHQFL | | |
| | | | | | | LGSQVVVQNCGEKS | | |
| | | | | | | MGSG | | |
| Sce- | Sce- | GGVVLEKGCFAKGTNVLMAD | https:// | 20720 | Sce- | VLLNVLSKCAGSKKF | https:// | 20726 |
| VMA | VMA- | GSIECIENIEVGNKVMGKDGR | www. | | VMA- | RPAPAAAFARECRG | www. | |
| | 5′-v7 | PREVIKLPRGRETMYSVVQK | nature. | | 3′-v5 | FYFELQELKEDDYY | nature. | |
| | | SQHRAHKSDSSREVPELLKF | com/ | | | GITLSDDSDHQFLLA | com/ | |
| | | TCNATHELVVRTPRSVRRLS | articles/ | | | NQVVVHN | articles/ | |
| | | RTIKGVEYFEVITFEMGQKKA | nmeth. | | | | nmeth.3585 | |
| | | PDGRIVELVKEVSKSYPISEG | 3585 | | | | | |
| | | PERANELVESYRKASNKAYF | | | | | | |
| | | EWTIEARDLSLLGSHVRKATY | | | | | | |
| | | QTYAPI | | | | | | |
| Sce- | Sce- | GGVVLEKGCFAKGTNVLMAD | https:// | 20720 | Sce- | VLLNVLSKCAGSKKF | https:// | 20727 |
| VMA | VMA- | GSIECIENIEVGNKVMGKDGR | www. | | VMA- | RPAPAAAFARECRG | www. | |
| | 5′-v7 | PREVIKLPRGRETMYSVVQK | nature. | | 3′-v6 | FYFELQELKEDDYY | nature. | |
| | | SQHRAHKSDSSREVPELLKF | com/ | | | GITLSDDSDHQFLLA | com/ | |
| | | TCNATHELVVRTPRSVRRLS | articles/ | | | NQVVVHNCGERGN | articles/ | |
| | | RTIKGVEYFEVITFEMGQKKA | nmeth. | | | GSG | nmeth.3585 | |
| | | PDGRIVELVKEVSKSYPISEG | 3585 | | | | | |
| | | PERANELVESYRKASNKAYF | | | | | | |
| | | EWTIEARDLSLLGSHVRKATY | | | | | | |
| | | QTYAPI | | | | | | |
| Sce- | Sce- | GGVVLEKGCFAKGTNVLMAD | https:// | 20720 | Sce- | VLLNVLSKCAGSKKF | https:// | 20728 |
| VMA | VMA- | GSIECIENIEVGNKVMGKDGR | www. | | VMA- | RPAPAAAFARECRG | www. | |
| | 5′-v7 | PREVIKLPRGRETMYSVVQK | nature. | | 3′-v7 | FYFELQELKEDDYY | nature. | |
| | | SQHRAHKSDSSREVPELLKF | com/ | | | GITLSDDSDHQFLLA | com/ | |
| | | TCNATHELVVRTPRSVRRLS | articles/ | | | NQVVVHNCTMTEKG | articles/ | |
| | | RTIKGVEYFEVITFEMGQKKA | nmeth. | | | SG | nmeth.3585 | |
| | | PDGRIVELVKEVSKSYPISEG | 3585 | | | | | |
| | | PERANELVESYRKASNKAYF | | | | | | |
| | | EWTIEARDLSLLGSHVRKATY | | | | | | |
| | | QTYAPI | | | | | | |
| Sce- | Sce- | GGVVLEKGCFAKGTNVLMAD | https:// | 20720 | Sce- | VLLNVLSKCAGSKKF | https:// | 20729 |
| VMA | VMA- | GSIECIENIEVGNKVMGKDGR | www. | | VMA- | RPAPAAAFARECRG | www. | |
| | 5′-v7 | PREVIKLPRGRETMYSVVQK | nature. | | 3′-v8 | FYFELQELKEDDYY | nature. | |
| | | SQHRAHKSDSSREVPELLKF | com/ | | | GITLSDDSDHQFLLA | com/ | |
| | | TCNATHELVVRTPRSVRRLS | articles/ | | | NQVVVHNCGEKSM | articles/ | |
| | | RTIKGVEYFEVITFEMGQKKA | nmeth. | | | GSG | nmeth.3585 | |
| | | PDGRIVELVKEVSKSYPISEG | 3585 | | | | | |
| | | PERANELVESYRKASNKAYF | | | | | | |
| | | EWTIEARDLSLLGSHVRKATY | | | | | | |
| | | QTYAPI | | | | | | |
| Sce- | Sce- | GGFQTVGCFAKGTNVLMAD | https:// | 20721 | Sce- | GHGGIRNNLNTENP | snapgene | 20722 |
| VMA | VMA- | GSIECIENIEVGNKVMGKDGR | www. | | VMA- | LWDAIVGLGFLKDG | common | |
| | 5′-v8 | PREVIKLPRGRETMYSVVQK | nature. | | 3′-v1 | VKNIPSFLSTDNIGT | features | |
| | | SQHRAHKSDSSREVPELLKF | com/ | | | RETFLAGLIDSDGYV | | |
| | | TCNATHELVVRTPRSVRRLS | articles/ | | | TDEHGIKATIKTIHTS | | |
| | | RTIKGVEYFEVITFEMGQKKA | nmeth. | | | VRDGLVSLARSLGL | | |
| | | PDGRIVELVKEVSKSYPISEG | 3585 | | | VVSVNAEPAKVDMN | | |
| | | PERANELVESYRKASNKAYF | | | | VTKHKISYAIYMSGG | | |
| | | EWTIEARDLSLLGSHVRKATY | | | | DVLLNVLSKCAGSK | | |
| | | QTYAPI | | | | KFRPAPAAAFAREC | | |
| | | | | | | RGFYFELQELKEDD | | |
| | | | | | | YYGITLSDDSDHQFL | | |
| | | | | | | LGSQVVVQN | | |
| Sce- | Sce- | GGFQTVGCFAKGTNVLMAD | https:// | 20721 | Sce- | GHGGIRNNLNTENP | snapgene | 20723 |
| VMA | VMA- | GSIECIENIEVGNKVMGKDGR | www. | | VMA- | LWDAIVGLGFLKDG | common | |
| | 51-v8 | PREVIKLPRGRETMYSVVQK | nature. | | 3′-v2 | VKNIPSFLSTDNIGT | features | |
| | | SQHRAHKSDSSREVPELLKF | com/ | | | RETFLAGLIDSDGYV | | |
| | | TCNATHELVVRTPRSVRRLS | articles/ | | | TDEHGIKATIKTIHTS | | |
| | | RTIKGVEYFEVITFEMGQKKA | nmeth. | | | VRDGLVSLARSLGL | | |
| | | PDGRIVELVKEVSKSYPISEG | 3585 | | | VVSVNAEPAKVDMN | | |
| | | PERANELVESYRKASNKAYF | | | | VTKHKISYAIYMSGG | | |
| | | EWTIEARDLSLLGSHVRKATY | | | | DVLLNVLSKCAGSK | | |
| | | QTYAPI | | | | KFRPAPAAAFAREC | | |
| | | | | | | RGFYFELQELKEDD | | |
| | | | | | | YYGITLSDDSDHQFL | | |
| | | | | | | LGSQVVVQNCGER | | |
| | | | | | | GNGSG | | |
| Sce- | Sce- | GGFQTVGCFAKGTNVLMAD | https:// | 20721 | Sce- | GHGGIRNNLNTENP | snapgene | 20724 |
| VMA | VMA- | GSIECIENIEVGNKVMGKDGR | www. | | VMA- | LWDAIVGLGFLKDG | common | |
| | 5′-v8 | PREVIKLPRGRETMYSVVQK | nature. | | 3′-v3 | VKNIPSFLSTDNIGT | features | |
| | | SQHRAHKSDSSREVPELLKF | com/ | | | RETFLAGLIDSDGYV | | |
| | | TCNATHELVVRTPRSVRRLS | articles/ | | | TDEHGIKATIKTIHTS | | |
| | | RTIKGVEYFEVITFEMGQKKA | nmeth. | | | VRDGLVSLARSLGL | | |
| | | PDGRIVELVKEVSKSYPISEG | 3585 | | | VVSVNAEPAKVDMN | | |
| | | PERANELVESYRKASNKAYF | | | | VTKHKISYAIYMSGG | | |
| | | EWTIEARDLSLLGSHVRKATY | | | | DVLLNVLSKCAGSK | | |
| | | QTYAPI | | | | KFRPAPAAAFAREC | | |
| | | | | | | RGFYFELQELKEDD | | |
| | | | | | | YYGITLSDDSDHQFL | | |
| | | | | | | LGSQVVVQNCTMTE | | |
| | | | | | | KGSG | | |
| Sce- | Sce- | GGFQTVGCFAKGTNVLMAD | https:// | 20721 | Sce- | GHGGIRNNLNTENP | snapgene | 20725 |
| VMA | VMA- | GSIECIENIEVGNKVMGKDGR | www. | | VMA- | LWDAIVGLGFLKDG | common | |
| | 5′-v8 | PREVIKLPRGRETMYSVVQK | nature. | | 3′-v4 | VKNIPSFLSTDNIGT | features | |
| | | SQHRAHKSDSSREVPELLKF | com/ | | | RETFLAGLIDSDGYV | | |
| | | TCNATHELVVRTPRSVRRLS | articles/ | | | TDEHGIKATIKTIHTS | | |
| | | RTIKGVEYFEVITFEMGQKKA | nmeth. | | | VRDGLVSLARSLGL | | |
| | | PDGRIVELVKEVSKSYPISEG | 3585 | | | VVSVNAEPAKVDMN | | |
| | | PERANELVESYRKASNKAYF | | | | VTKHKISYAIYMSGG | | |
| | | EWTIEARDLSLLGSHVRKATY | | | | DVLLNVLSKCAGSK | | |
| | | QTYAPI | | | | KFRPAPAAAFAREC | | |
| | | | | | | RGFYFELQELKEDD | | |
| | | | | | | YYGITLSDDSDHQFL | | |
| | | | | | | LGSQVVVQNCGEKS | | |
| | | | | | | MGSG | | |
| Sce- | Sce- | GGFQTVGCFAKGTNVLMAD | https:// | 20721 | Sce- | VLLNVLSKCAGSKKF | https:// | 20726 |
| VMA | VMA- | GSIECIENIEVGNKVMGKDGR | www. | | VMA- | RPAPAAAFARECRG | www. | |
| | 5′-v8 | PREVIKLPRGRETMYSVVQK | nature. | | 3′-v5 | FYFELQELKEDDYY | nature. | |
| | | SQHRAHKSDSSREVPELLKF | com/ | | | GITLSDDSDHQFLLA | com/ | |
| | | TCNATHELVVRTPRSVRRLS | articles/ | | | NQVVVHN | articles/ | |
| | | RTIKGVEYFEVITFEMGQKKA | nmeth. | | | | nmeth.3585 | |
| | | PDGRIVELVKEVSKSYPISEG | 3585 | | | | | |
| | | PERANELVESYRKASNKAYF | | | | | | |
| | | EWTIEARDLSLLGSHVRKATY | | | | | | |
| | | QTYAPI | | | | | | |
| Sce- | Sce- | GGFQTVGCFAKGTNVLMAD | https:// | 20721 | Sce- | VLLNVLSKCAGSKKF | https:// | 20727 |
| VMA | VMA- | GSIECIENIEVGNKVMGKDGR | www. | | VMA- | RPAPAAAFARECRG | www. | |
| | 5′-v8 | PREVIKLPRGRETMYSVVQK | nature. | | 3′-v6 | FYFELQELKEDDYY | nature. | |
| | | SQHRAHKSDSSREVPELLKF | com/ | | | GITLSDDSDHQFLLA | com/ | |
| | | TCNATHELVVRTPRSVRRLS | articles/ | | | NQVVVHNCGERGN | articles/ | |
| | | RTIKGVEYFEVITFEMGQKKA | nmeth. | | | GSG | nmeth.3585 | |
| | | PDGRIVELVKEVSKSYPISEG | 3585 | | | | | |
| | | PERANELVESYRKASNKAYF | | | | | | |
| | | EWTIEARDLSLLGSHVRKATY | | | | | | |
| | | QTYAPI | | | | | | |
| Sce- | Sce- | GGFQTVGCFAKGTNVLMAD | https:// | 20721 | Sce- | VLLNVLSKCAGSKKF | https:// | 20728 |
| VMA | VMA- | GSIECIENIEVGNKVMGKDGR | www. | | VMA- | RPAPAAAFARECRG | www. | |
| | 5′-v8 | PREVIKLPRGRETMYSVVQK | nature. | | 3′-v7 | FYFELQELKEDDYY | nature. | |
| | | SQHRAHKSDSSREVPELLKF | com/ | | | GITLSDDSDHQFLLA | com/ | |
| | | TCNATHELVVRTPRSVRRLS | articles/ | | | NQVVVHNCTMTEKG | articles/ | |
| | | RTIKGVEYFEVITFEMGQKKA | nmeth. | | | SG | nmeth.3585 | |
| | | PDGRIVELVKEVSKSYPISEG | 3585 | | | | | |
| | | PERANELVESYRKASNKAYF | | | | | | |
| | | EWTIEARDLSLLGSHVRKATY | | | | | | |
| | | QTYAPI | | | | | | |
| Sce- | Sce- | GGFQTVGCFAKGTNVLMAD | https:// | 20721 | Sce- | VLLNVLSKCAGSKKF | https:// | 20729 |
| VMA | VMA- | GSIECIENIEVGNKVMGKDGR | www. | | VMA- | RPAPAAAFARECRG | www. | |
| | 5′-v8 | PREVIKLPRGRETMYSVVQK | nature. | | 3′-v8 | FYFELQELKEDDYY | nature. | |
| | | SQHRAHKSDSSREVPELLKF | com/ | | | GITLSDDSDHQFLLA | com/ | |
| | | TCNATHELVVRTPRSVRRLS | articles/ | | | NQVVVHNCGEKSM | articles/ | |
| | | RTIKGVEYFEVITFEMGQKKA | nmeth. | | | GSG | nmeth.3585 | |
| | | PDGRIVELVKEVSKSYPISEG | 3585 | | | | | |
| | | PERANELVESYRKASNKAYF | | | | | | |
| | | EWTIEARDLSLLGSHVRKATY | | | | | | |
| | | QTYAPI | | | | | | |

### Additional Domains

[0429] The gene modifying polypeptide can bind a target DNA sequence and template nucleic acid (e.g., template RNA), nick the target site, and write (e.g., reverse transcribe) the template into DNA, resulting in a modification of the target site. In some embodiments, additional domains may be added to the polypeptide to enhance the efficiency of the process. In some embodiments, the gene modifying polypeptide may contain an additional DNA ligation domain to join reverse transcribed DNA to the DNA of the target site. In some embodiments, the polypeptide may comprise a heterologous RNA-binding domain. In some embodiments, the polypeptide may comprise a domain having 5′ to 3′ exonuclease activity (e.g., wherein the 5′ to 3′ exonuclease activity increases repair of the alteration of the target site, e.g., in favor of alteration over the original genomic sequence). In some embodiments, the polypeptide may comprise a domain having 3′ to 5′ exonuclease activity, e.g., proof-reading activity. In some embodiments, the writing domain, e.g., RT domain, has 3′ to 5′ exonuclease activity, e.g., proof-reading activity.

### Template Nucleic Acids

[0430] The gene modifying systems described herein can modify a host target DNA site using a template nucleic acid sequence. In some embodiments, the gene modifying systems described herein transcribe an RNA sequence template into host target DNA sites by target-primed reverse transcription (TPRT). By modifying DNA sequence(s) via reverse transcription of the RNA sequence template directly into the host genome, the gene modifying system can insert an object sequence into a target genome without the need for exogenous DNA sequences to be introduced into the host cell (unlike, for example, CRISPR systems), as well as eliminate an exogenous DNA insertion step. The gene modifying system can also delete a sequence from the target genome or introduce a substitution using an object sequence. Therefore, the gene modifying system provides a platform for the use of customized RNA sequence templates containing object sequences, e.g., sequences comprising heterologous gene coding and/or function information.

[0431] In some embodiments, the template nucleic acid comprises one or more sequence (e.g., 2 sequences) that binds the gene modifying polypeptide.

[0432] In some embodiments, the template RNA comprises a nucleic acid sequence as listed in Table S4, or a nucleic acid sequence having at least 70%, 75%, 80%, 85%, 90%, 95%, 96%, 97%, 98%, or 99% identity thereto. In some embodiments, the template RNA comprises a 5′ end block sequence of a template sequence as listed in Table S4, or a nucleic acid sequence having at least 70%, 75%, 80%, 85%, 90%, 95%, 96%, 97%, 98%, or 99% identity thereto. In some embodiments, the template RNA comprises a PBS sequence of a template sequence as listed in Table S4, or a nucleic acid sequence having at least 70%, 75%, 80%, 85%, 90%, 95%, 96%, 97%, 98%, or 99% identity thereto. In some embodiments, the template RNA comprises a linker sequence of a template sequence as listed in Table S4, or a nucleic acid sequence having at least 70%, 75%, 80%, 85%, 90%, 95%, 96%, 97%, 98%, or 99% identity thereto. In some embodiments, the template RNA comprises one or more (e.g., 1, 2, 3, or 4) RRS sequences of a template sequence as listed in Table S4, or nucleic acid sequences having at least 70%, 75%, 80%, 85%, 90%, 95%, 96%, 97%, 98%, or 99% identity thereto. In some embodiments, the template RNA comprises a 3′ end block sequence of a template sequence as listed in Table S4, or a nucleic acid sequence having at least 70%, 75%, 80%, 85%, 90%, 95%, 96%, 97%, 98%, or 99% identity thereto. In some embodiments, the template RNA comprises (e.g., in 5′ to 3′ order) a 5′ end block sequence, PBS sequence, one or more RRS sequences, and a 3′ end block sequence of a template sequence as listed in Table S4, or nucleic acid sequences having at least 70%, 75%, 80%, 85%, 90%, 95%, 96%, 97%, 98%, or 99% identity thereto.

[0433] In some embodiments a system or method described herein comprises a single template nucleic acid (e.g., template RNA). In some embodiments a system or method described herein comprises a plurality of template nucleic acids (e.g., template RNAs). For example, a system described herein comprises a first RNA comprising (e.g., from 5′ to 3′) a sequence that binds the gene modifying polypeptide (e.g., the DNA-binding domain and/or the endonuclease domain, e.g., a gRNA) and a sequence that binds a target site (e.g., a second strand of a site in a target genome), and a second RNA (e.g., a template RNA) comprising (e.g., from 5′ to 3′) optionally a sequence that binds the gene modifying polypeptide (e.g., that specifically binds the RT domain), a heterologous object sequence, and a PBS sequence. In some embodiments, when the system comprises a plurality of nucleic acids, each nucleic acid comprises a conjugating domain. In some embodiments, a conjugating domain enables association of nucleic acid molecules, e.g., by hybridization of complementary sequences. For example, in some embodiments a first RNA comprises a first conjugating domain and a second RNA comprises a second conjugating domain, and the first and second conjugating domains are capable of hybridizing to one another, e.g., under stringent conditions. In some embodiments, the stringent conditions for hybridization include hybridization in 4× sodium chloride/sodium citrate (SSC), at about 65 C, followed by a wash in 1×SSC, at about 65 C.

[0434] In some embodiments, the template nucleic acid comprises RNA. In some embodiments, the template nucleic acid comprises DNA (e.g., single stranded or double stranded DNA).

[0435] In some embodiments, the template nucleic acid comprises one or more (e.g., 2) homology domains that have homology to the target sequence. In some embodiments, the homology domains are about 10-20, 20-50, or 50-100 nucleotides in length.

[0436] In some embodiments, a template RNA can comprise a gRNA sequence, e.g., to direct the gene modifying polypeptide to a target site of interest. In some embodiments, a template RNA comprises (e.g., from 5′ to 3′) (i) optionally a gRNA spacer that binds a target site (e.g., a second strand of a site in a target genome), (ii) optionally a gRNA scaffold that binds a polypeptide described herein (e.g., a gene modifying polypeptide or a Cas polypeptide), (iii) a heterologous object sequence comprising a mutation region (optionally the heterologous object sequence comprises, from 5′ to 3′, a first homology region, a mutation region, and a second homology region), and (iv) a primer binding site (PBS) sequence comprising a 3′ target homology domain.

[0437] The template nucleic acid (e.g., template RNA) component of a genome editing system described herein typically is able to bind the gene modifying polypeptide of the system. In some embodiments the template nucleic acid (e.g., template RNA) has a 3′ region that is capable of binding a gene modifying polypeptide. The binding region, e.g., 3′ region, may be a structured RNA region, e.g., having at least 1, 2 or 3 hairpin loops, capable of binding the gene modifying polypeptide of the system. The binding region may associate the template nucleic acid (e.g., template RNA) with any of the polypeptide modules. In some embodiments, the binding region of the template nucleic acid (e.g., template RNA) may associate with an RNA-binding domain in the polypeptide. In some embodiments, the binding region of the template nucleic acid (e.g., template RNA) may associate with the reverse transcription domain of the gene modifying polypeptide (e.g., specifically bind to the RT domain). In some embodiments, the template nucleic acid (e.g., template RNA) may associate with the DNA binding domain of the polypeptide, e.g., a gRNA associating with a Cas9-derived DNA binding domain. In some embodiments, the binding region may also provide DNA target recognition, e.g., a gRNA hybridizing to the target DNA sequence and binding the polypeptide, e.g., a Cas9 domain. In some embodiments, the template nucleic acid (e.g., template RNA) may associate with multiple components of the polypeptide, e.g., DNA binding domain and reverse transcription domain.

[0438] In some embodiments the template RNA has a poly-A tail at the 3′ end. In some embodiments the template RNA does not have a poly-A tail at the 3′ end.

[0439] In some embodiments, a template RNA may be customized to correct a given mutation in the genomic DNA of a target cell (e.g., ex vivo or in vivo, e.g., in a target tissue or organ, e.g., in a subject). For example, the mutation may be a disease-associated mutation relative to the wild-type sequence. Without wishing to be bound by theory, any given target site and edit will have a large number of possible template RNA molecules for use in a gene modifying system that will result in a range of editing efficiencies and fidelities. To partially reduce this screening burden, sets of empirical parameters help ensure optimal initial in silico designs of template RNAs or portions thereof. As a non-limiting illustrative example, for a selected mutation, the following design parameters may be employed. In some embodiments, design is initiated by acquiring approximately 500 bp (e.g., up to 50, 100, 150, 200, 250, 300, 350, 400, 450, 500, 550, 600, 650, or 700 bp, and optionally at least 20, 30, 40, 50, 100, 150, 200, 250, 300, 350, 400, 450, 500, 550, 600, or 650 bp) flanking sequence on either side of the mutation to serve as the target region. In some embodiments, a template nucleic acid comprises a gRNA. In some embodiments, a gRNA comprises a sequence (e.g., a CRISPR spacer) that binds a target site. In some embodiments, the sequence (e.g., a CRISPR spacer) that binds a target site for use in targeting a template nucleic acid to a target region is selected by considering the particular gene modifying polypeptide (e.g., endonuclease domain or writing domain, e.g., comprising a CRISPR/Cas domain) being used (e.g., for Cas9, a protospacer-adjacent motif (PAM) of NGG immediately 3′ of a 20 nucleotide gRNA binding region). In some embodiments, the CRISPR spacer is selected by ranking first by whether the PAM will be disrupted by the gene modifying system induced edit. In some embodiments, disruption of the PAM may increase edit efficiency. In some embodiments, the PAM can be disrupted by also introducing (e.g., as part of or in addition to another modification to a target site in genomic DNA) a silent mutation (e.g., a mutation that does not alter an amino acid residue encoded by the target nucleic acid sequence, if any) in the target site during gene modification. In some embodiments, the CRISPR spacer is selected by ranking sequences by the proximity of their corresponding genomic site to the desired edit location. In some embodiments, the gRNA comprises a gRNA scaffold. In some embodiments, the gRNA scaffold used may be a standard scaffold (e.g., for Cas9, 5′-GTTTTAGAGCTAGAAATAGCAAGTTAAAATAAGGCTAGTCCGTTATCAACTTGAAAAAGTGG CACCGAGTCGGTGC-3′ (SEQ ID NO: 20730)), or may contain one or more nucleotide substitutions. In some embodiments, the heterologous object sequence has at least 90% identity, e.g., at least 90%, 95%, 98%, 99%, or 100% identity, or comprises no more than 1, 2, 3, 4, or 5 positions of non-identity to the target site 3′ of the first strand nick (e.g., immediately 3′ of the first strand nick or up to 1, 2, 3, 4, or 5 nucleotides 3′ of the first strand nick), with the exception of any insertion, substitution, or deletion that may be written into the target site by the gene modifying. In some embodiments, the 3′ target homology domain contains at least 90% identity, e.g., at least 90%, 95%, 98%, 99%, or 100% identity, or comprises no more than 1, 2, 3, 4, or 5 positions of non-identity to the target site 5′ of the first strand nick (e.g., immediately 5′ of the first strand nick or up to 1, 2, 3, 4, or 5 nucleotides 3′ of the first strand nick).

[0440] In some embodiments, the template nucleic acid is a template RNA. In some embodiments, the template RNA comprises one or more modified nucleotides. For example, in some embodiments, the template RNA comprises one or more deoxyribonucleotides. In some embodiments, regions of the template RNA are replaced by DNA nucleotides, e.g., to enhance stability of the molecule. For example, the 3′ end of the template may comprise DNA nucleotides, while the rest of the template comprises RNA nucleotides that can be reverse transcribed. For instance, in some embodiments, the heterologous object sequence is primarily or wholly made up of RNA nucleotides (e.g., at least 90%, 95%, 98%, or 99% RNA nucleotides). In some embodiments, the PBS sequence is primarily or wholly made up of DNA nucleotides (e.g., at least 90%, 95%, 98%, or 99% DNA nucleotides). In other embodiments, the heterologous object sequence for writing into the genome may comprise DNA nucleotides. In some embodiments, the DNA nucleotides in the template are copied into the genome by a domain capable of DNA-dependent DNA polymerase activity. In some embodiments, the DNA-dependent DNA polymerase activity is provided by a DNA polymerase domain in the polypeptide. In some embodiments, the DNA-dependent DNA polymerase activity is provided by a reverse transcriptase domain that is also capable of DNA-dependent DNA polymerization, e.g., second strand synthesis. In some embodiments, the template molecule is composed of only DNA nucleotides.

[0441] In some embodiments, a system described herein comprises two nucleic acids which together comprise the sequences of a template RNA described herein. In some embodiments, the two nucleic acids are associated with each other non-covalently, e.g., directly associated with each other (e.g., via base pairing), or indirectly associated as part of a complex comprising one or more additional molecule.

[0442] A template RNA described herein may comprise, from 5′ to 3′: (1) a gRNA spacer; (2) a gRNA scaffold; (3) heterologous object sequence (4) a primer binding site (PBS) sequence. Each of these components is now described in more detail.

gRNA Spacer and gRNA Scaffold

[0443] A template RNA described herein may comprise a gRNA spacer that directs the gene modifying system to a target nucleic acid, and a gRNA scaffold that promotes association of the template RNA with the Cas domain of the gene modifying polypeptide. The systems described herein can also comprise a gRNA that is not part of a template nucleic acid. For example, a gRNA that comprises a gRNA spacer and gRNA scaffold, but not a heterologous object sequence or a PBS sequence, can be used, e.g., to promote unwinding of the target nucleic acid or to reduce MMR reversal of a desired edit by the host cell (e.g., as described in the End Block Sequences and Additional Guide RNA sections herein), or to induce second strand nicking, e.g., as described in the section herein entitled “Second Strand Nicking”.

[0444] In some embodiments, the gRNA is a short synthetic RNA composed of a scaffold sequence that participates in CRISPR-associated protein binding and a user-defined ˜20 nucleotide targeting sequence for a genomic target. The structure of a complete gRNA was described by Nishimasu et al. Cell 156, P935-949 (2014). The gRNA (also referred to as sgRNA for single-guide RNA) consists of crRNA- and tracrRNA-derived sequences connected by an artificial tetraloop. The crRNA sequence can be divided into guide (20 nt) and repeat (12 nt) regions, whereas the tracrRNA sequence can be divided into anti-repeat (14 nt) and three tracrRNA stem loops (Nishimasu et al. Cell 156, P935-949 (2014)). In practice, guide RNA sequences are generally designed to have a length of between 17-24 nucleotides (e.g., 19, 20, or 21 nucleotides) and be complementary to a targeted nucleic acid sequence. Custom gRNA generators and algorithms are available commercially for use in the design of effective guide RNAs. In some embodiments, the gRNA comprises two RNA components from the native CRISPR system, e.g. crRNA and tracrRNA. As is well known in the art, the gRNA may also comprise a chimeric, single guide RNA (sgRNA) containing sequence from both a tracrRNA (for binding the nuclease) and at least one crRNA (to guide the nuclease to the sequence targeted for editing/binding). Chemically modified sgRNAs have also been demonstrated to be effective for use with CRISPR-associated proteins; see, for example, Hendel et al. (2015) Nature Biotechnol., 985-991. In some embodiments, a gRNA spacer comprises a nucleic acid sequence that is complementary to a DNA sequence associated with a target gene.

[0445] In some embodiments, the region of the template nucleic acid, e.g., template RNA, comprising the gRNA adopts an underwound ribbon-like structure of gRNA bound to target DNA (e.g., as described in Mulepati et al. Science 19 Sep. 2014:Vol. 345, Issue 6203, pp. 1479-1484). Without wishing to be bound by theory, this non-canonical structure is thought to be facilitated by rotation of every sixth nucleotide out of the RNA-DNA hybrid. Thus, in some embodiments, the region of the template nucleic acid, e.g., template RNA, comprising the gRNA may tolerate increased mismatching with the target site at some interval, e.g., every sixth base. In some embodiments, the region of the template nucleic acid, e.g., template RNA, comprising the gRNA comprising homology to the target site may possess wobble positions at a regular interval, e.g., every sixth base, that do not need to base pair with the target site.

[0446] In some embodiments, the template nucleic acid (e.g., template RNA) has at least 15, 16, 17, 18, 19, 20, 21, 22, 23, or 24 bases of at least 80%, 85%, 90%, 95%, 99%, or 100% homology to the target site, e.g., at the 5′ end, e.g., comprising a gRNA spacer sequence of length appropriate to the Cas9 domain of the gene modifying polypeptide (Table 8).

[0447] Table 12 provides parameters to define components for designing gRNA and/or Template RNAs to apply Cas variants listed in Table 8 for gene modifying. The cut site indicates the validated or predicted protospacer adjacent motif (PAM) requirements, validated or predicted location of cut site (relative to the most upstream base of the PAM site). The gRNA for a given enzyme can be assembled by concatenating the crRNA, Tetraloop, and tracrRNA sequences, and further adding a 5′ spacer of a length within Spacer (min) and Spacer (max) that matches a protospacer at a target site. Further, the predicted location of the ssDNA nick at the target is important for designing a PBS sequence of a Template RNA that can anneal to the sequence immediately 5′ of the nick in order to initiate target primed reverse transcription. In some embodiments, a gRNA scaffold described herein comprises a nucleic acid sequence comprising, in the 5′ to 3′ direction, a crRNA of Table 12, a tetraloop from the same row of Table 12, and a tracrRNA from the same row of Table 12, or a sequence having at least 70%, 80%, 85%, 90%, 95%, or 99% identity thereto. In some embodiments, the gRNA or template RNA comprising the scaffold further comprises a gRNA spacer having a length within the Spacer (min) and Spacer (max) indicated in the same row of Table 12. In some embodiments, the gRNA or template RNA having a sequence according to Table 12 is comprised by a system that further comprises a gene modifying polypeptide, wherein the gene modifying polypeptide comprises a Cas domain described in the same row of Table 12.

TABLE 12
Parameters to define components for designing gRNA and/or Template RNAs to apply
Cas variants listed in Table 8 in gene modifying systems

| | | | | Spacer | Spacer | | Tetra- | |
|---|---|---|---|---|---|---|---|---|
| Variant | PAM(s) | Cut | Tier | (min) | (max) | crRNA | loop | tracrRNA |
| Nme2Cas9 | NNNNCC | −3 | 1 | 22 | 24 | GTTGTAGCTCCCTTT | GAAA | CGAAATGAGAACCGT |
| | | | | | | CTCATTTCG | | TGCTACAATAAGGCC |
| | | | | | | (SEQ ID NO: | | GTCTGAAAAGATGTG |
| | | | | | | 20731) | | CCGCAACGCTCTGCC |
| | | | | | | | | CCTTAAAGCTTCTGC |
| | | | | | | | | TTTAAGGGGCATCGT |
| | | | | | | | | TTA |
| | | | | | | | | (SEQ ID NO: |
| | | | | | | | | 20742) |
| PpnCas9 | NNNNRTT | | 1 | 21 | 24 | GTTGTAGCTCCCTTT | GAAA | GCGAAATGAAAAACG |
| | | | | | | TTCATTTCGC | | TTGTTACAATAAGAG |
| | | | | | | (SEQ ID NO: | | ATGAATTTCTCGCAA |
| | | | | | | 20732) | | AGCTCTGCCTCTTGA |
| | | | | | | | | AATTTCGGTTTCAAG |
| | | | | | | | | AGGCATC |
| | | | | | | | | (SEQ ID NO: |
| | | | | | | | | 20743) |
| SauCas9 | NNGRR; | −3 | 1 | 21 | 23 | GTTTTAGTACTCTG | GAAA | CAGAATCTACTAAAA |
| | NNGRRT | | | | | (SEQ ID NO: | | CAAGGCAAAATGCCG |
| | | | | | | 20733) | | TGTTTATCTCGTCAA |
| | | | | | | | | CTTGTTGGCGAGA |
| | | | | | | | | (SEQ ID NO: |
| | | | | | | | | 20744) |
| SauCas9- | NNNRR; | −3 | 1 | 21 | 21 | GTTTTAGTACTCTG | GAAA | CAGAATCTACTAAAA |
| KKH | NNNRRT | | | | | (SEQ ID NO: | | CAAGGCAAAATGCCG |
| | | | | | | 20733) | | TGTTTATCTCGTCAA |
| | | | | | | | | CTTGTTGGCGAGA |
| | | | | | | | | (SEQ ID NO: |
| | | | | | | | | 20744) |
| SauriCas9 | NNGG | −3 | 1 | 21 | 21 | GTTTTAGTACTCTG | GAAA | CAGAATCTACTAAAA |
| | | | | | | (SEQ ID NO: | | CAAGGCAAAATGCCG |
| | | | | | | 20733) | | TGTTTATCTCGTCAA |
| | | | | | | | | CTTGTTGGCGAGA |
| | | | | | | | | (SEQ ID NO: |
| | | | | | | | | 20744) |
| SauriCas9- | NNRG | −3 | 1 | 21 | 21 | GTTTTAGTACTCTG | GAAA | CAGAATCTACTAAAA |
| KKH | | | | | | (SEQ ID NO: | | CAAGGCAAAATGCCG |
| | | | | | | 20733) | | TGTTTATCTCGTCAA |
| | | | | | | | | CTTGTTGGCGAGA |
| | | | | | | | | (SEQ ID NO: |
| | | | | | | | | 20744) |
| ScaCas9- | NNG | −3 | 1 | 20 | 20 | GTTTTAGAGCTA | GAAA | TAGCAAGTTAAAATA |
| Sc++ | | | | | | (SEQ ID NO: | | AGGCTAGTCCGTTAT |
| | | | | | | 20734) | | CAACTTGAAAAAGTG |
| | | | | | | | | GCACCGAGTCGGTGC |
| | | | | | | | | (SEQ ID NO: |
| | | | | | | | | 20745) |
| SpyCas9 | NGG | −3 | 1 | 20 | 20 | GTTTTAGAGCTA | GAAA | TAGCAAGTTAAAATA |
| | | | | | | (SEQ ID NO: | | AGGCTAGTCCGTTAT |
| | | | | | | 20734) | | CAACTTGAAAAAGTG |
| | | | | | | | | GCACCGAGTCGGTGC |
| | | | | | | | | (SEQ ID NO: |
| | | | | | | | | 20745) |
| SpyCas9-NG | NG(NGG = | −3 | 1 | 20 | 20 | GTTTTAGAGCTA | GAAA | TAGCAAGTTAAAATA |
| | NGA = | | | | | (SEQ ID NO: | | AGGCTAGTCCGTTAT |
| | NGT > | | | | | 20734) | | CAACTTGAAAAAGTG |
| | NGC) | | | | | | | GCACCGAGTCGGTGC |
| | | | | | | | | (SEQ ID NO: |
| | | | | | | | | 20745) |
| SpyCas9- | NRN > | −3 | 1 | 20 | 20 | GTTTTAGAGCTA | GAAA | TAGCAAGTTAAAATA |
| SpRY | NYN | | | | | (SEQ ID NO: | | AGGCTAGTCCGTTAT |
| | | | | | | 20734) | | CAACTTGAAAAAGTG |
| | | | | | | | | GCACCGAGTCGGTGC |
| | | | | | | | | (SEQ ID NO: |
| | | | | | | | | 20745) |
| St1Cas9 | NNAGAAW > | −3 | 1 | 20 | 20 | GTCTTTGTACTCTG | GTAC | CAGAAGCTACAAAGA |
| | NNAGGAW = | | | | | (SEQ ID NO: | | TAAGGCTTCATGCCG |
| | NNGGAAW | | | | | 20735) | | AAATCAACACCCTGT |
| | | | | | | | | CATTTTATGGCAGGG |
| | | | | | | | | TGTTTT |
| | | | | | | | | (SEQ ID NO: |
| | | | | | | | | 20746) |
| BlatCas9 | NNNNCNAA > | −3 | 1 | 19 | 23 | GCTATAGTTCCTTAC | GAAA | GGTAAGTTGCTATAG |
| | NNNNCNDD > | | | | | T | | TAAGGGCAACAGACC |
| | NNNNC | | | | | (SEQ ID NO: | | CGAGGCGTTGGGGAT |
| | | | | | | 20736) | | CGCCTAGCCCGTGTT |
| | | | | | | | | TACGGGCTCTCCCCA |
| | | | | | | | | TATTCAAAATAATGA |
| | | | | | | | | CAGACGAGCACCTTG |
| | | | | | | | | GAGCATTTATCTCCG |
| | | | | | | | | AGGTGCT |
| | | | | | | | | (SEQ ID NO: |
| | | | | | | | | 20747) |
| cCas9-v16 | NNVACT; | −3 | 2 | 21 | 21 | GTCTTAGTACTCTG | GAAA | CAGAATCTACTAAGA |
| | NNVATGM; | | | | | (SEQ ID NO: | | CAAGGCAAAATGCCG |
| | NNVATT; | | | | | 20737) | | TGTTTATCTCGTCAA |
| | NNVGCT; | | | | | | | CTTGTTGGCGAGA |
| | NNVGTG; | | | | | | | (SEQ ID NO: |
| | NNVGTT | | | | | | | 20748) |
| cCas9-v17 | NNVRRN | −3 | 2 | 21 | 21 | GTCTTAGTACTCTG | GAAA | CAGAATCTACTAAGA |
| | | | | | | (SEQ ID NO: | | CAAGGCAAAATGCCG |
| | | | | | | 20737) | | TGTTTATCTCGTCAA |
| | | | | | | | | CTTGTTGGCGAGA |
| | | | | | | | | (SEQ ID NO: |
| | | | | | | | | 20748) |
| cCas9-v21 | NNVACT; | −3 | 2 | 21 | 21 | GTCTTAGTACTCTG | GAAA | CAGAATCTACTAAGA |
| | NNVATGM; | | | | | (SEQ ID NO: | | CAAGGCAAAATGCCG |
| | NNVATT; | | | | | 20737) | | TGTTTATCTCGTCAA |
| | NNVGCT; | | | | | | | CTTGTTGGCGAGA |
| | NNVGTG; | | | | | | | (SEQ ID NO: |
| | NNVGTT | | | | | | | 20748) |
| cCas9-v42 | NNVRRN | −3 | 2 | 21 | 21 | GTCTTAGTACTCTG | GAAA | CAGAATCTACTAAGA |
| | | | | | | (SEQ ID NO: | | CAAGGCAAAATGCCG |
| | | | | | | 20737) | | TGTTTATCTCGTCAA |
| | | | | | | | | CTTGTTGGCGAGA |
| | | | | | | | | (SEQ ID NO: |
| | | | | | | | | 20748) |
| CdiCas9 | NNRHHHY; | | 2 | 22 | 22 | ACTGGGGTTCAG | GAAA | CTGAACCTCAGTAAG |
| | NNRAAAY | | | | | (SEQ ID NO: | | CATTGGCTCGTTTCC |
| | | | | | | 20738) | | AATGTTGATTGCTCC |
| | | | | | | | | GCCGGTGCTCCTTAT |
| | | | | | | | | TITTAAGGGCGCCGG |
| | | | | | | | | C |
| | | | | | | | | (SEQ ID NO: |
| | | | | | | | | 20749) |
| CjeCas9 | NNNNRYAC | −3 | 2 | 21 | 23 | GTTTTAGTCCCT | GAAA | AGGGACTAAAATAAA |
| | | | | | | (SEQ ID NO: | | GAGTTTGCGGGACTC |
| | | | | | | 20739) | | TGCGGGGTTACAATC |
| | | | | | | | | CCCTAAAACCGC |
| | | | | | | | | (SEQ ID NO: |
| | | | | | | | | 20750) |
| GeoCas9 | NNNNCRAA | | 2 | 21 | 23 | GTCATAGTTCCCCTG | GAAA | TCAGGGTTACTATGA |
| | | | | | | A | | TAAGGGCTTTCTGCC |
| | | | | | | (SEQ ID NO: | | TAAGGCAGACTGACC |
| | | | | | | 20740) | | CGCGGCGTTGGGGAT |
| | | | | | | | | CGCCTGTCGCCCGCT |
| | | | | | | | | TTTGGCGGGCATTCC |
| | | | | | | | | CCATCCTT |
| | | | | | | | | (SEQ ID NO: |
| | | | | | | | | 20751) |
| iSpyMacCas9 | NAAN | −3 | 2 | 19 | 21 | GTTTTAGAGCTA | GAAA | TAGCAAGTTAAAATA |
| | | | | | | (SEQ ID NO: | | AGGCTAGTCCGTTAT |
| | | | | | | 20734) | | CAACTTGAAAAAGTG |
| | | | | | | | | GCACCGAGTCGGTGC |
| | | | | | | | | (SEQ ID NO: |
| | | | | | | | | 20745) |
| NmeCas9 | NNNNGAYT; | −3 | 2 | 20 | 24 | GTTGTAGCTCCCTTT | GAAA | CGAAATGAGAACCGT |
| | NNNNGYTT; | | | | | CTCATTTCG | | TGCTACAATAAGGCC |
| | NNNNGAYA; | | | | | (SEQ ID NO: | | GTCTGAAAAGATGTG |
| | NNNNGTCT | | | | | 20731) | | CCGCAACGCTCTGCC |
| | | | | | | | | CCTTAAAGCTTCTGC |
| | | | | | | | | TTTAAGGGGCATCGT |
| | | | | | | | | TTA |
| | | | | | | | | (SEQ ID NO: |
| | | | | | | | | 20742) |
| ScaCas9 | NNG | −3 | 2 | 20 | 20 | GTTTTAGAGCTA | GAAA | TAGCAAGTTAAAATA |
| | | | | | | (SEQ ID NO: | | AGGCTAGTCCGTTAT |
| | | | | | | 20734) | | CAACTTGAAAAAGTG |
| | | | | | | | | GCACCGAGTCGGTGC |
| | | | | | | | | (SEQ ID NO: |
| | | | | | | | | 20745) |
| ScaCas9- | NNG | −3 | 2 | 20 | 20 | GTTTTAGAGCTA | GAAA | TAGCAAGTTAAAATA |
| HiFi- | | | | | | (SEQ ID NO: | | AGGCTAGTCCGTTAT |
| Sc++ | | | | | | 20734) | | CAACTTGAAAAAGTG |
| | | | | | | | | GCACCGAGTCGGTGC |
| | | | | | | | | (SEQ ID NO: |
| | | | | | | | | 20745) |
| SpyCas9- | NRRH | −3 | 2 | 20 | 20 | GTTTAAGAGCTATGC | GAAA | CAGCATAGCAAGTTT |
| 3var- | | | | | | TG | | AAATAAGGCTAGTCC |
| NRRH | | | | | | (SEQ ID NO: | | GTTATCAACTTGAAA |
| | | | | | | 20741) | | AAGTGGCACCGAGTC |
| | | | | | | | | GGTGC |
| | | | | | | | | (SEQ ID NO: |
| | | | | | | | | 20752) |
| SpyCas9- | NRTH | −3 | 2 | 20 | 20 | GTTTAAGAGCTATGC | GAAA | CAGCATAGCAAGTTT |
| 3var- | | | | | | TG | | AAATAAGGCTAGTCC |
| NRTH | | | | | | (SEQ ID NO: | | GTTATCAACTTGAAA |
| | | | | | | 20741) | | AAGTGGCACCGAGTC |
| | | | | | | | | GGTGC |
| | | | | | | | | (SEQ ID NO: |
| | | | | | | | | 20752) |
| SpyCas9- | NRCH | −3 | 2 | 20 | 20 | GTTTAAGAGCTATGC | GAAA | CAGCATAGCAAGTIT |
| 3var- | | | | | | TG | | AAATAAGGCTAGTCC |
| NRCH | | | | | | (SEQ ID NO: | | GTTATCAACTTGAAA |
| | | | | | | 20741) | | AAGTGGCACCGAGTC |
| | | | | | | | | GGTGC |
| | | | | | | | | (SEQ ID NO: |
| | | | | | | | | 20752) |
| SpyCas9- | NGG | −3 | 2 | 20 | 20 | GTTTTAGAGCTA | GAAA | TAGCAAGTTAAAATA |
| HF1 | | | | | | (SEQ ID NO: | | AGGCTAGTCCGTTAT |
| | | | | | | 20734) | | CAACTTGAAAAAGTG |
| | | | | | | | | GCACCGAGTCGGTGC |
| | | | | | | | | (SEQ ID NO: |
| | | | | | | | | 20745) |
| SpyCas9- | NAAG | −3 | 2 | 20 | 20 | GTTTTAGAGCTA | GAAA | TAGCAAGTTAAAATA |
| QQR1 | | | | | | (SEQ ID NO: | | AGGCTAGTCCGTTAT |
| | | | | | | 20734) | | CAACTTGAAAAAGTG |
| | | | | | | | | GCACCGAGTCGGTGC |
| | | | | | | | | (SEQ ID NO: |
| | | | | | | | | 20745) |
| SpyCas9- | NGN | −3 | 2 | 20 | 20 | GTTTTAGAGCTA | GAAA | TAGCAAGTTAAAATA |
| SpG | | | | | | (SEQ ID NO: | | AGGCTAGTCCGTTAT |
| | | | | | | 20734) | | CAACTTGAAAAAGTG |
| | | | | | | | | GCACCGAGTCGGTGC |
| | | | | | | | | (SEQ ID NO: |
| | | | | | | | | 20745) |
| SpyCas9- | NGAN | −3 | 2 | 20 | 20 | GTTTTAGAGCTA | GAAA | TAGCAAGTTAAAATA |
| VQR | | | | | | (SEQ ID NO: | | AGGCTAGTCCGTTAT |
| | | | | | | 20734) | | CAACTTGAAAAAGTG |
| | | | | | | | | GCACCGAGTCGGTGC |
| | | | | | | | | (SEQ ID NO: |
| | | | | | | | | 20745) |
| SpyCas9- | NGCG | −3 | 2 | 20 | 20 | GTTTTAGAGCTA | GAAA | TAGCAAGTTAAAATA |
| VRER | | | | | | (SEQ ID NO: | | AGGCTAGTCCGTTAT |
| | | | | | | 20734) | | CAACTTGAAAAAGTG |
| | | | | | | | | GCACCGAGTCGGTGC |
| | | | | | | | | (SEQ ID NO: |
| | | | | | | | | 20745) |
| SpyCas9- | NG; | −3 | 2 | 20 | 20 | GTTTAAGAGCTATGC | GAAA | CAGCATAGCAAGTTT |
| xCas | GAA; | | | | | TG | | AAATAAGGCTAGTCC |
| | GAT | | | | | (SEQ ID NO: | | GTTATCAACTTGAAA |
| | | | | | | 20741) | | AAGTGGCACCGAGTC |
| | | | | | | | | GGTGC |
| | | | | | | | | (SEQ ID NO: |
| | | | | | | | | 20752) |
| SpyCas9- | NG | −3 | 2 | 20 | 20 | GTTTAAGAGCTATGC | GAAA | CAGCATAGCAAGTTT |
| xCas- | | | | | | TG | | AAATAAGGCTAGTCC |
| NG | | | | | | (SEQ ID NO: | | GTTATCAACTTGAAA |
| | | | | | | 20741) | | AAGTGGCACCGAGTC |
| | | | | | | | | GGTGC |
| | | | | | | | | (SEQ ID NO: |
| | | | | | | | | 20752) |
| St1Cas9- | NNACAA | −3 | 2 | 20 | 20 | GTCTTTGTACTCTG | GTAC | CAGAAGCTACAAAGA |
| CNRZ1066 | | | | | | (SEQ ID NO: | | TAAGGCTTCATGCCG |
| | | | | | | 20735) | | AAATCAACACCCTGT |
| | | | | | | | | CATTTTATGGCAGGG |
| | | | | | | | | TGTTTT |
| | | | | | | | | (SEQ ID NO: |
| | | | | | | | | 20746) |
| St1Cas9- | NNGCAA | −3 | 2 | 20 | 20 | GTCTTTGTACTCTG | GTAC | CAGAAGCTACAAAGA |
| LMG1831 | | | | | | (SEQ ID NO: | | TAAGGCTTCATGCCG |
| | | | | | | 20735) | | AAATCAACACCCTGT |
| | | | | | | | | CATTTTATGGCAGGG |
| | | | | | | | | TGTTTT |
| | | | | | | | | (SEQ ID NO: |
| | | | | | | | | 20746) |
| St1Cas9- | NNAAAA | −3 | 2 | 20 | 20 | GTCTTTGTACTCTG | GTAC | CAGAAGCTACAAAGA |
| MTH17CL396 | | | | | | (SEQ ID NO: | | TAAGGCTTCATGCCG |
| | | | | | | 20735) | | AAATCAACACCCTGT |
| | | | | | | | | CATTTTATGGCAGGG |
| | | | | | | | | TGTTTT |
| | | | | | | | | (SEQ ID NO: |
| | | | | | | | | 20746) |
| St1Cas9- | NNGAAA | −3 | 2 | 20 | 20 | GTCTTTGTACTCTG | GTAC | CAGAAGCTACAAAGA |
| TH1477 | | | | | | (SEQ ID NO: | | TAAGGCTTCATGCCG |
| | | | | | | 20735) | | AAATCAACACCCTGT |
| | | | | | | | | CATTTTATGGCAGGG |
| | | | | | | | | TGTTTT |
| | | | | | | | | (SEQ ID NO: |
| | | | | | | | | 20746) |
| sRGN3.1 | NNGG | | 1 | 21 | 23 | GTTTTAGTACTCTG | GAAA | CAGAATCTACTGAAA |
| | | | | | | (SEQ ID NO: | | CAAGACAATATGTCG |
| | | | | | | 20733) | | TGTTTATCCCATCAA |
| | | | | | | | | TTTATTGGTGGGATT |
| | | | | | | | | TT |
| | | | | | | | | (SEQ ID NO: |
| | | | | | | | | 20753) |
| sRGN3.3 | NNGG | | 1 | 21 | 23 | GTTTTAGTACTCTG | GAAA | CAGAATCTACTGAAA |
| | | | | | | (SEQ ID NO: | | CAAGACAATATGTCG |
| | | | | | | 20733) | | TGTTTATCCCATCAA |
| | | | | | | | | TTTATTGGTGGGATT |
| | | | | | | | | TT |
| | | | | | | | | (SEQ ID NO: |
| | | | | | | | | 20753) |

[0448] Herein, when an RNA sequence (e.g., a template RNA sequence) is said to comprise a particular sequence (e.g., a sequence of Table 12 or a portion thereof) that comprises thymine (T), it is of course understood that the RNA sequence may (and frequently does) comprise uracil (U) in place of T. For instance, the RNA sequence may comprise U at every position shown as T in the sequence in Table 12. More specifically, the present disclosure provides an RNA sequence according to every gRNA scaffold sequence of Table 12, wherein the RNA sequence has a U in place of each T in the sequence in Table 12. Additionally, it is understood that terminal Us and Ts may optionally be added or removed from tracrRNA sequences and may be modified or unmodified when provided as RNA. Without wishing to be bound by example, versions of gRNA scaffold sequences alternative to those exemplified in Table 12 may also function with the different Cas9 enzymes or derivatives thereof exemplified in Table 8, e.g., alternate gRNA scaffold sequences with nucleotide additions, substitutions, or deletions, e.g., sequences with stem-loop structures added or removed. It is contemplated herein that the gRNA scaffold sequences represent a component of gene modifying systems that can be similarly optimized for a given system, Cas-RT fusion polypeptide, indication, target mutation, template RNA, or delivery vehicle.

### RNA Binding Domain Recruitment Sites (RRS)

[0449] In some embodiments, a template RNA described herein comprises an RNA binding domain (RBD) recruitment site (RRS), capable of binding to an RBD as described herein. In some embodiments, an RRS binds to the RBD of a gene modifying polypeptide or complex as described herein. In some embodiments, the RRS is located at the 5′ end of the template RNA. In some embodiments, the RRS is located within 5, 10, 15, 20, 25, or 30 nucleotides of the 5′ end of the template RNA. In some embodiments, the RRS comprises one or more (e.g., 1 or 2) stem-loop sequences.

[0450] In some embodiments, a template nucleic acid comprises a plurality of RRS sequences (e.g., a plurality of the same RRS sequence, or a plurality of different RRS sequences). In some embodiments, the RRS sequence is repeated at least 2, 3, 4, 5, 6, 7, 8, 9, or 10 times. In some embodiments, the plurality of RRS sequences is separated by one or more linker sequences. In some embodiments, the plurality of RRS sequences are positioned adjacent to each other (e.g., without an intervening linker sequence).

[0451] In some embodiments, the RRS is not located between a PBS and a heterologous object sequence. In some embodiments, the RRS is located between a PBS and a heterologous object sequence.

[0452] In some embodiments, an RRS comprises the nucleic acid sequence of an RRS as listed in Table 40, or a nucleic acid sequence having at least 75%, 80%, 85%, 90%, 95%, 96%, 97%, 98%, or 99% identity thereto. In some embodiments, an RRS comprises the nucleic acid sequence of an RRS as listed in Table 40, or a nucleic acid sequence having no more than 1, 2, 3, 4, 5, 6, 7, 8, 9, or 10 nucleotide differences therefrom. Herein, when an RNA sequence (e.g., an RRS) is said to comprise a particular sequence (e.g., a sequence of Table 40 or a portion thereof) that comprises thymine (T), it is of course understood that the RNA sequence may (and frequently does) comprise uracil (U) in place of T. For instance, the RNA sequence may comprise U at every position shown as T in the sequence in Table 40. More specifically, the present disclosure provides an RNA sequence according to every RRS sequence of Table 40, wherein the RNA sequence has a U in place of each T in the sequence in Table 40.

TABLE 40
Exemplary RNA binding domain recruitment
sites (RRS)

| RBP | | |
|---|---|---|
| recognition | RBP | |
| site | binding | |
| (RRS) | partner | Sequence (5′ to 3′) |
| MS2 | MCP | gcACATGAGGATCACCCATGTg |
| | | c (SEQ ID NO: 20754) |
| PP7 | PCP | caTAAGGAGTTTATATGGAAAC |
| | | CCTTAtg |
| | | (SEQ ID NO: 20755) |
| com | Com | CTGAATGCCTGCGAGCATC |
| | | (SEQ ID NO: 20756) |
| LS4-1 | LS4 | GGCAGAGAAAGGCCATACAATC |
| | | ATTGGCCTTGTGAGGCCGTGTG |
| | | TCTTCCAGTGGC |
| | | (SEQ ID NO: 20757) |
| LS12-1 | LS12 | GGCAGAGAAAGGCCATACAATC |
| | | ATTGGCTTTTCCATGACGCCAG |
| | | TTCCAGTGGC |
| | | (SEQ ID NO: 20758) |
| BoxB | lambdaN | GGGCCCTGAAGAAGGGCCC |
| | (1-22) | (SEQ ID NO: 20759) |
| Kt | L7Ae | GGATCCGTGATCGGAAACGTG |
| | | AGATCC |
| | | (SEQ ID NO: 20760) |
| CS1 | LS4 | GGTGGCAGAGAAAGGCGAAAG |
| | | CCTTGTGAGGCCATCAA |
| | | (SEQ ID NO: 20761) |
| CS2 | LS12 | GGATGCAGAGAACGAAAGTTC |
| | | CATGACGCATCCAA (SEQ ID |
| | | NO: 20762) |

### End Block Sequences

[0453] In some embodiments, a template RNA as described herein comprises one or more end block sequences. In some instances, an end block sequence or end protection sequence, as described herein, may protect the template RNA from exonuclease degradation (e.g., reduces exonuclease degradation of the template RNA by at least 25%, 50%, 75%, 80%, 85%, 90%, 95%, 96%, 97%, 98%, 99%, or 100% relative to an otherwise similar template RNA lacking the end block sequence). In some instances, an end block sequence or end protection sequence, as described herein, may act to terminate a reverse transcriptase reaction. In some embodiments, an end block sequence is positioned adjacent to, or within 1, 2, 3, 4, 5, 6, 7, 8, 9, 10, 15, 20, 25, or 30 nucleotides of a 5′ pro-spacer sequence (e.g., which pairs with the nicked target nucleic acid strand). In embodiments, the 5′ pro-spacer sequence has 100% complementarity to the nicked target nucleic acid strand and/or directs nicking activity by a Cas domain (e.g., a Cas9 domain, e.g., an nCas9). In embodiments, the 5′ pro-spacer sequence has less than or equal to 17 nucleotides of complementarity (e.g., about 5, 10, 11, 12, 13, 14, 15, 16, or 17 nucleotides of complementarity) to the target nucleic acid strand, e.g., and promotes unwinding of the target nucleic acid without nicking. In some embodiments, an end block sequence (e.g., a 5′ end block sequence) comprises a gRNA spacer (e.g., a pro-spacer) as described herein. In some embodiments, an end block sequence (e.g., a 5′ end blocksequence) comprises a gRNA scaffold as described herein. In some embodiments, a pro-spacer as described herein does not have a length sufficient for full nicking, or has a length suitable for limited nicking. In some embodiments, a gRNA spacer as described herein has a length suitable for full nicking.

[0454] In some embodiments, an end block sequence comprises the nucleic acid sequence of an end block sequence as listed in Table 41, or a nucleic acid sequence having at least 75%, 80%, 85%, 90%, 95%, 96%, 97%, 98%, or 99% identity thereto, or the reverse complement thereof. In some embodiments, an end block sequence comprises the nucleic acid sequence of an end block sequence as listed in Table 41, or a nucleic acid sequence having no more than 1, 2, 3, 4, 5, 6, 7, 8, 9, or 10 nucleotide differences therefrom, or the reverse complement thereof. Herein, when an RNA sequence (e.g., a end block sequence) is said to comprise a particular sequence (e.g., a sequence of Table 41 or a portion thereof) that comprises thymine (T), it is of course understood that the RNA sequence may (and frequently does) comprise uracil (U) in place of T. For instance, the RNA sequence may comprise U at every position shown as T in the sequence in Table 41. More specifically, the present disclosure provides an RNA sequence according to every end block sequence of Table 41, wherein the RNA sequence has a U in place of each T in the sequence in Table 41.

TABLE 41
Exemplary end block sequences

| End-block | Sequence (5′ to 3′) |
|---|---|
| G-quadruplex | GGTGGTGGTGG (SEQ ID NO: 20763) |
| Tinoco hairpin | GGACTTCGGTCC (SEQ ID NO: 20764) |
| GC-Geo hairpin | CTCATAGTTCCCCTGAGAAATCAGGGTTACTATGAG (SEQ ID NO: |
| | 20765) |
| Nme2Cas9 scaffold | GTTGTAGCTCCCTTTCTCATTTCGGAAACGAAATGAGAACCGTTGCTAC |
| | AATAAGGCCGTCTGAAAAGATGTGCCGCAACGCTCTGCCCCTTAAAGC |
| | TTCTGCTTTAAGGGGCATCGTTTA (SEQ ID NO: 20766) |
| Nme2Cas9 | CAGTACATGACCTTACGGGAGTTGTAGCTCCCTTTCTCATTTCG |
| spacer + scaffold | GAAACGAAATGAGAACCGTTGCTACAATAAGGCCGTCTGAAAAGATGT |
| | GCCGCAACGCTCTGCCCCTTAAAGCTTCTGCTTTAAGGGGCATCGTTTA |
| | (SEQ ID NO: 20767) |
| Nme2Cas9 16 nt | ACATGACCTTACGGGAGTTGTAGCTCCCTTTCTCATTTCGGAAAC |
| spacer + scaffold | GAAATGAGAACCGTTGCTACAATAAGGCCGTCTGAAAAGATGTGCCGC |
| | AACGCTCTGCCCCTTAAAGCTTCTGCTTTAAGGGGCATCGTTTA (SEQ |
| | ID NO: 20768) |
| BlatCas9 scaffold | GCTATAGTTCCTTACTGAAAGGTAAGTTGCTATAGTAAGGGCAACAGA |
| | CCCGAGGCGTTGGGGATCGCCTAGCCCGTGTTTACGGGCTCTCCCCAT |
| | ATTCAAAATAATGACAGACGAGCACCTTGGAGCATTTATCTCCGAGGT |
| | GCT (SEQ ID NO: 20769) |
| GeoCas9 | GTCATAGTTCCCCTGAGAAATCAGGGTTACTATGATAAGGGCTTTCTGC |
| | CTAAGGCAGACTGACCCGCGGCGTTGGGGATCGCCTGTCGCCCGCTTT |
| | TGGCGGGCATTCCCCATCCTT (SEQ ID NO: 20770) |
| PpnCas9 scaffold | GTTGTAGCTCCCTTTTTCATTTCGCGAAAGCGAAATGAAAAACGTTGTT |
| | ACAATAAGAGATGAATTTCTCGCAAAGCTCTGCCTCTTGAAATTTCGGT |
| | TTCAAGAGGCATC (SEQ ID NO: 20771) |
| CdiCas9scaffold | ACTGGGGTTCAGGAAACTGAACCTCAGTAAGCATTGGCTCGTTTCCAAT |
| | GTTGATTGCTCCGCCGGTGCTCCTTATTTTTAAGGGCGCCGGC (SEQ ID |
| | NO: 20772) |
| SpyCas9 + hairpin | GTTTTAGAGCTAGAAATAGCAAGTTAAAATAAGGCTAGTCCGTTATCA |
| scaffold | ACTTGAAAAAGTGGCACCGGGACTTCGGTCCCGGTGC (SEQ ID |
| | NO: 20773) |
| St1Cas9 scaffold | GTCTTTGTACTCTGGTACCAGAAGCTACAAAGATAAGGCTTCATGCCGA |
| | AATCAACACCCTGTCATTTTATGGCAGGGTGTTTT (SEQ ID NO: 20774) |
| cCas9-v16 scaffold | GTCTTAGTACTCTGGAAACAGAATCTACTAAGACAAGGCAAAATGCCG |
| | TGTTTATCTCGTCAACTTGTTGGCGAGA (SEQ ID NO: 20775) |
| SpyCas9-3var-NRRH | GTTTAAGAGCTATGCTGGAAACAGCATAGCAAGTTTAAATAAGGCTAG |
| scaffold | TCCGTTATCAACTTGAAAAAGTGGCACCGAGTCGGTGC (SEQ ID NO: |
| | 20776) |
| SauCas9 scaffold | GTTTTAGTACTCTGGAAACAGAATCTACTAAAACAAGGCAAAATGCCG |
| | TGTTTATCTCGTCAACTTGTTGGCGAGA (SEQ ID NO: 20777) |
| CjeCas9 scaffold | GTTTTAGTCCCTGAAAAGGGACTAAAATAAAGAGTTTGCGGGACTCTG |
| | CGGGGTTACAATCCCCTAAAACCGC (SEQ ID NO: 20778) |
| SpyCas9 scaffold | GTTTTAGAGCTAGAAATAGCAAGTTAAAATAAGGCTAGTCCGTTATCA |
| | ACTTGAAAAAGTGGCACCGAGTCGGTGC (SEQ ID NO: 20779) |

[0455] In some embodiments, an end block comprises a pro-spacer sequence (e.g., a 5′ protospacer sequence), e.g., as described herein. In certain embodiments, the pro-spacer sequence has greater than or equal to 17 nucleotides of complementarity (e.g., about 17, 18, 19, 20, 21, 22, or 23 nucleotides of complementarity) to the target nucleic acid strand. In certain embodiments, the pro-spacer sequence promotes unwinding and nicking of the target nucleic acid.

### Heterologous Object Sequence

[0456] A template RNA described herein may comprise a heterologous object sequence that the gene modifying polypeptide can use as a template for reverse transcription, to write a desired sequence into the target nucleic acid. In some embodiments, the heterologous object sequence comprises, from 5′ to 3′, a post-edit homology region, the mutation region, and a pre-edit homology region. Without wishing to be bound by theory, an RT performing reverse transcription on the template RNA first reverse transcribes the pre-edit homology region, then the mutation region, and then the post-edit homology region, thereby creating a DNA strand comprising the desired mutation with a homology region on either side.

[0457] In some embodiments, the heterologous object sequence is at least 32, 33, 34, 35, 36, 37, 38, 39, 40, 41, 42, 43, 44, 45, 46, 47, 48, 49, 50, 51, 52, 53, 54, 55, 56, 57, 58, 59, 60, 61, 62, 63, 64, 65, 66, 67, 68, 69, 70, 71, 72, 73, 74, 75, 76, 77, 78, 79, 80, 81, 82, 83, 84, 85, 86, 87, 88, 89, 90, 91, 92, 93, 94, 95, 96, 97, 98, 99, 100, 120, 140, 160, 180, 200, 500, or 1,000 nucleotides (nts) in length, or at least 1, 1.5, 2, 2.5, 3, 3.5, 4, 4.5, 5, 5.5, 6, 6.5, 7, 7.5, 8, 8.5, 9, 9.5, or 10 kilobases in length. In some embodiments, the heterologous object sequence is no more than 33, 34, 35, 36, 37, 38, 39, 40, 41, 42, 43, 44, 45, 46, 47, 48, 49, 50, 51, 52, 53, 54, 55, 56, 57, 58, 59, 60, 61, 62, 63, 64, 65, 66, 67, 68, 69, 70, 71, 72, 73, 74, 75, 76, 77, 78, 79, 80, 81, 82, 83, 84, 85, 86, 87, 88, 89, 90, 91, 92, 93, 94, 95, 96, 97, 98, 99, 100, 120, 140, 160, 180, 200, 500, 1,000, or 2000 nucleotides (nts) in length, or no more than 20, 15, 10, 9, 8, 7, 6, 5, 4, or 3 kilobases in length. In some embodiments, the heterologous object sequence is 30-1000, 40-1000, 50-1000, 60-1000, 70-1000, 74-1000, 75-1000, 76-1000, 77-1000, 78-1000, 79-1000, 80-1000, 85-1000, 90-1000, 100-1000, 120-1000, 140-1000, 160-1000, 180-1000, 200-1000, 500-1000, 30-500, 40-500, 50-500, 60-500, 70-500, 74-500, 75-500, 76-500, 77-500, 78-500, 79-500, 80-500, 85-500, 90-500, 100-500, 120-500, 140-500, 160-500, 180-500, 200-500, 30-200, 40-200, 50-200, 60-200, 70-200, 74-200, 75-200, 76-200, 77-200, 78-200, 79-200, 80-200, 85-200, 90-200, 100-200, 120-200, 140-200, 160-200, 180-200, 30-100, 40-100, 50-100, 60-100, 70-100, 74-100, 75-100, 76-100, 77-100, 78-100, 79-100, 80-100, 85-100, or 90-100 nucleotides (nts) in length, or 1-20, 1-15, 1-10, 1-9, 1-8, 1-7, 1-6, 1-5, 1-4, 1-3, 1-2, 2-20, 2-15, 2-10, 2-9, 2-8, 2-7, 2-6, 2-5, 2-4, 2-3, 3-20, 3-15, 3-10, 3-9, 3-8, 3-7, 3-6, 3-5, 3-4, 4-20, 4-15, 4-10, 4-9, 4-8, 4-7, 4-6, 4-5, 5-20, 5-15, 5-10, 5-9, 5-8, 5-7, 5-6, 6-20, 6-15, 6-10, 6-9, 6-8, 6-7, 7-20, 7-15, 7-10, 7-9, 7-8, 8-20, 8-15, 8-10, 8-9, 9-20, 9-15, 9-10, 10-15, 10-20, or 15-20 kilobases in length. In some embodiments, the heterologous object sequence is 10-100, 10-90, 10-80, 10-70, 10-60, 10-50, 10-40, 10-30, or 10-20 nt in length, e.g., 10-80, 10-50, or 10-20 nt in length, e.g., about 10-20 nt in length. In some embodiments, the heterologous object sequence is 8-30, 9-25, 10-20, 11-16, or 12-15 nucleotides in length, e.g., is 11-16 nt in length. Without wishing to be bound by theory, in some embodiments, a larger insertion size, larger region of editing (e.g., the distance between a first edit/substitution and a second edit/substitution in the target region), and/or greater number of desired edits (e.g., mismatches of the heterologous object sequence to the target genome), may result in a longer optimal heterologous object sequence.

[0458] In certain embodiments, the template nucleic acid comprises a customized RNA sequence template which can be identified, designed, engineered and constructed to contain sequences altering or specifying host genome function, for example by introducing a heterologous coding region into a genome; affecting or causing exon structure/alternative splicing, e.g., leading to exon skipping of one or more exons; causing disruption of an endogenous gene, e.g., creating a genetic knockout; causing transcriptional activation of an endogenous gene; causing epigenetic regulation of an endogenous DNA; causing up-regulation of one or more operably linked genes, e.g., leading to gene activation or overexpression; causing down-regulation of one or more operably linked genes, e.g., creating a genetic knock-down; etc. In certain embodiments, a customized RNA sequence template can be engineered to contain sequences coding for exons and/or transgenes, provide binding sites for transcription factor activators, repressors, enhancers, etc., and combinations thereof. In some embodiments, a customized template can be engineered to encode a nucleic acid or peptide tag to be expressed in an endogenous RNA transcript or endogenous protein operably linked to the target site. In other embodiments, the coding sequence can be further customized with splice donor sites, splice acceptor sites, or poly-A tails.

[0459] The template nucleic acid (e.g., template RNA) of the system typically comprises an object sequence (e.g., a heterologous object sequence) for writing a desired sequence into a target DNA. The object sequence may be coding or non-coding. The template nucleic acid (e.g., template RNA) can be designed to result in insertions, mutations, or deletions at the target DNA locus. In some embodiments, the template nucleic acid (e.g., template RNA) may be designed to cause an insertion in the target DNA. For example, the template nucleic acid (e.g., template RNA) may contain a heterologous sequence, wherein the reverse transcription will result in insertion of the heterologous sequence into the target DNA. In other embodiments, the RNA template may be designed to introduce a deletion into the target DNA. For example, the template nucleic acid (e.g., template RNA) may match the target DNA upstream and downstream of the desired deletion, wherein the reverse transcription will result in the copying of the upstream and downstream sequences from the template nucleic acid (e.g., template RNA) without the intervening sequence, e.g., causing deletion of the intervening sequence. In other embodiments, the template nucleic acid (e.g., template RNA) may be designed to introduce an edit into the target DNA. For example, the template RNA may match the target DNA sequence with the exception of one or more nucleotides, wherein the reverse transcription will result in the copying of these edits into the target DNA, e.g., resulting in mutations, e.g., transition or transversion mutations.

[0460] In some embodiments, writing of an object sequence into a target site results in the substitution of nucleotides, e.g., where the full length of the object sequence corresponds to a matching length of the target site with one or more mismatched bases. In some embodiments, a heterologous object sequence may be designed such that a combination of sequence alterations may occur, e.g., a simultaneous addition and deletion, addition and substitution, or deletion and substitution.

[0461] In some embodiments, the heterologous object sequence may contain an open reading frame or a fragment of an open reading frame. In some embodiments the heterologous object sequence has a Kozak sequence. In some embodiments the heterologous object sequence has an internal ribosome entry site. In some embodiments the heterologous object sequence has a self-cleaving peptide such as a T2A or P2A site. In some embodiments the heterologous object sequence has a start codon. In some embodiments the template RNA has a splice acceptor site. In some embodiments the template RNA has a splice donor site. Exemplary splice acceptor and splice donor sites are described in WO2016044416, incorporated herein by reference in its entirety. Exemplary splice acceptor site sequences are known to those of skill in the art. In some embodiments the template RNA has a microRNA binding site downstream of the stop codon. In some embodiments the template RNA has a polyA tail downstream of the stop codon of an open reading frame. In some embodiments the template RNA comprises one or more exons. In some embodiments the template RNA comprises one or more introns. In some embodiments the template RNA comprises a eukaryotic transcriptional terminator. In some embodiments the template RNA comprises an enhanced translation element or a translation enhancing element. In some embodiments the RNA comprises the human T-cell leukemia virus (HTLV-1) R region. In some embodiments the RNA comprises a posttranscriptional regulatory element that enhances nuclear export, such as that of Hepatitis B Virus (HPRE) or Woodchuck Hepatitis Virus (WPRE).

[0462] In some embodiments, the heterologous object sequence may contain a non-coding sequence. For example, the template nucleic acid (e.g., template RNA) may comprise a regulatory element, e.g., a promoter or enhancer sequence or miRNA binding site. In some embodiments, integration of the object sequence at a target site will result in upregulation of an endogenous gene. In some embodiments, integration of the object sequence at a target site will result in downregulation of an endogenous gene. In some embodiments the template nucleic acid (e.g., template RNA) comprises a tissue specific promoter or enhancer, each of which may be unidirectional or bidirectional. In some embodiments the promoter is an RNA polymerase I promoter, RNA polymerase II promoter, or RNA polymerase III promoter. In some embodiments the promoter comprises a TATA element. In some embodiments the promoter comprises a B recognition element. In some embodiments the promoter has one or more binding sites for transcription factors.

[0463] In some embodiments, the template nucleic acid (e.g., template RNA) comprises a site that coordinates epigenetic modification. In some embodiments, the template nucleic acid (e.g., template RNA) comprises a chromatin insulator. For example, the template nucleic acid (e.g., template RNA) comprises a CTCF site or a site targeted for DNA methylation.

[0464] In some embodiments, the template nucleic acid (e.g., template RNA) comprises a gene expression unit composed of at least one regulatory region operably linked to an effector sequence. The effector sequence may be a sequence that is transcribed into RNA (e.g., a coding sequence or a non-coding sequence such as a sequence encoding a micro RNA).

[0465] In some embodiments, the heterologous object sequence of the template nucleic acid (e.g., template RNA) is inserted into a target genome in an endogenous intron. In some embodiments, the heterologous object sequence of the template nucleic acid (e.g., template RNA) is inserted into a target genome and thereby acts as a new exon. In some embodiments, the insertion of the heterologous object sequence into the target genome results in replacement of a natural exon or the skipping of a natural exon.

[0466] In some embodiments, the heterologous object sequence of the template nucleic acid (e.g., template RNA) is inserted into the target genome in a genomic safe harbor site, such as AAVS1, CCR5, ROSA26, or albumin locus. In some embodiments, a gene modifying is used to integrate a CAR into the T-cell receptor a constant (TRAC) locus (Eyquem et al Nature 543, 113-117 (2017)). In some embodiments, a gene modifying system is used to integrate a CAR into a T-cell receptor β constant (TRBC) locus. Many other safe harbors have been identified by computational approaches (Pellenz et al Hum Gen Ther 30, 814-828 (2019)) and could be used for gene modifying system-mediated integration. In some embodiments, the heterologous object sequence of the template nucleic acid (e.g., template RNA) is added to the genome in an intergenic or intragenic region. In some embodiments, the heterologous object sequence of the template nucleic acid (e.g., template RNA) is added to the genome 5′ or 3′ within 0.1 kb, 0.25 kb, 0.5 kb, 0.75, kb, 1 kb, 2 kb, 3 kb, 4 kb, 5 kb, 7.5 kb, 10 kb, 15 kb, 20 kb, 25 kb, 50, 75 kb, or 100 kb of an endogenous active gene. In some embodiments, the heterologous object sequence of the template nucleic acid (e.g., template RNA) is added to the genome 5′ or 3′ within 0.1 kb, 0.25 kb, 0.5 kb, 0.75, kb, 1 kb, 2 kb, 3 kb, 4 kb, 5 kb, 7.5 kb, 10 kb, 15 kb, 20 kb, 25 kb, 50, 75 kb, or 100 kb of an endogenous promoter or enhancer. In some embodiments, the heterologous object sequence of the template nucleic acid (e.g., template RNA) can be, e.g., 50-50,000 base pairs (e.g., between 50-40,000 bp, between 500-30,000 bp between 500-20,000 bp, between 100-15,000 bp, between 500-10,000 bp, between 50-10,000 bp, between 50-5,000 bp.

[0467] The template nucleic acid (e.g., template RNA) can be designed to result in insertions, mutations, or deletions at the target DNA locus. In some embodiments, the template nucleic acid (e.g., template RNA) may be designed to cause an insertion in the target DNA. For example, the template nucleic acid (e.g., template RNA) may contain a heterologous object sequence, wherein the reverse transcription will result in insertion of the heterologous object sequence into the target DNA. In other embodiments, the RNA template may be designed to write a deletion into the target DNA. For example, the template nucleic acid (e.g., template RNA) may match the target DNA upstream and downstream of the desired deletion, wherein the reverse transcription will result in the copying of the upstream and downstream sequences from the template nucleic acid (e.g., template RNA) without the intervening sequence, e.g., causing deletion of the intervening sequence. In other embodiments, the template nucleic acid (e.g., template RNA) may be designed to write an edit into the target DNA. For example, the template RNA may match the target DNA sequence with the exception of one or more nucleotides, wherein the reverse transcription will result in the copying of these edits into the target DNA, e.g., resulting in mutations, e.g., transition or transversion mutations.

[0468] In some embodiments, the pre-edit homology domain comprises a nucleic acid sequence having 100% sequence identity with a nucleic acid sequence comprised in a target nucleic acid molecule.

[0469] In some embodiments, the post-edit homology domain comprises a nucleic acid sequence having 100% sequence identity with a nucleic acid sequence comprised in a target nucleic acid molecule.

[0470] In some embodiments, a homology domain (e.g., a pre-edit homology domain) comprises the nucleic acid sequence of a homology 1 sequence as listed in Table 38 below, or a nucleic acid sequence having at least 75%, 80%, 85%, 90%, 95%, 96%, 97%, 98%, or 99% identity thereto. In some embodiments, a homology domain (e.g., a pre-edit homology domain) comprises the nucleic acid sequence of a homology 1 sequence as listed in Table 38 below, or a nucleic acid sequence having no more than 1, 2, 3, 4, or 5 nucleotide differences relative thereto. In some embodiments, a homology domain has a length of 0-30 nucleotides (e.g., about 0-10, 10-20, or 20-30 nucleotides). Herein, when an RNA sequence (e.g., a homology domain sequence) is said to comprise a particular sequence (e.g., a sequence of Table 38 or a portion thereof) that comprises thymine (T), it is of course understood that the RNA sequence may (and frequently does) comprise uracil (U) in place of T. For instance, the RNA sequence may comprise U at every position shown as T in the sequence in Table 38. More specifically, the present disclosure provides an RNA sequence according to every homology domain sequence of Table 38, wherein the RNA sequence has a U in place of each T in the sequence in Table 38. In certain embodiments, the homology domain has a length between 0-5, 5-10, 10-15, 15-20, 20-25, 25-30, 30-35, 35-40, 40-45, or 45-50 nucleotides. In certain embodiments, the homology domain has a length between 50-100, 100-150, 150-200, 200-250, 250-300, 300-350, 350-400, 400-450, or 450-550 nucleotides. In certain embodiments, the homology domain has a length of about 0, 1, 2, 3, 4, 5, 6, 7, 8, 9, 10, 11, 12, 13, 14, 15, 16, 17, 18, 19, 20, 21, 22, 23, 24, 25, 26, 27, 28, 29, 30, 40, 50, 60, 70, 80, 90, 100, 150, 200, 250, 300, 350, 400, 450, or 500 nucleotides.

TABLE 38
Exemplary homology 1 sequences

| | | | Homology | Homology 1 |
|---|---|---|---|---|
| | Edit | | 1 | Sequence |
| Reporter | type | Edit Sequence (5′ to 3′) | length | (5′ to 3′) |
| BFP to GFP | SNP | GT | 3 nt | ACG |
| | SNP | GT | 3 nt | ACG |
| | SNP | GT | 3 nt | ACG |
| | SNP | GT | 3 nt | ACG |
| | SNP | GT | 3 nt | ACG |
| | SNP | GT | 3 nt | ACG |
| | SNP | GT | 3 nt | ACG |
| | SNP | GT | 3 nt | ACG |
| | SNP | GT | 3 nt | ACG |
| 250 bp GFP | 250 | AGAATTTTGTAATACGACTCACTATAGGGCGGCCGGGAATTCGC | 0 nt | |
| insertion | bp | CACCATGGTGAGCAAGGGCGAGGAGCTGTTCACCGGGGTGGT | | |
| | insert | GCCCATCCTGGTCGAGCTGGACGGCGACGTAAACGGCCACAAG | | |
| | ion | TTCAGCGTGTCCGGCGAGGGCGAGGGCGATGCCACCTACGGCA | | |
| | | AGCTGACCCTGAAGTTCATCTGCACCACCGGCAAGCTGCCCGTG | | |
| | | CCCTGGCCCACCCTCGTGACCACCCTGACGTACG (SEQ ID NO: | | |
| | | 20780) | | |
| | 250 | CAGAATTTTGTAATACGACTCACTATAGGGCGGCCGGGAATTCG | 1 nt | G |
| | bp | CCACCATGGTGAGCAAGGGCGAGGAGCTGTTCACCGGGGTGGT | | |
| | insert | GCCCATCCTGGTCGAGCTGGACGGCGACGTAAACGGCCACAAG | | |
| | ion | TTCAGCGTGTCCGGCGAGGGCGAGGGCGATGCCACCTACGGCA | | |
| | | AGCTGACCCTGAAGTTCATCTGCACCACCGGCAAGCTGCCCGTG | | |
| | | CCCTGGCCCACCCTCGTGACCACCCTGACGTAC (SEQ ID NO: | | |
| | | 20781) | | |
| | 250 | TCAGAATTTTGTAATACGACTCACTATAGGGCGGCCGGGAATTC | 2 nt | CG |
| | bp | GCCACCATGGTGAGCAAGGGCGAGGAGCTGTTCACCGGGGTG | | |
| | insert | GTGCCCATCCTGGTCGAGCTGGACGGCGACGTAAACGGCCACA | | |
| | ion | AGTTCAGCGTGTCCGGCGAGGGCGAGGGCGATGCCACCTACGG | | |
| | | CAAGCTGACCCTGAAGTTCATCTGCACCACCGGCAAGCTGCCCG | | |
| | | TGCCCTGGCCCACCCTCGTGACCACCCTGACGTA (SEQ ID NO: | | |
| | | 20782) | | |
| | 250 | GTCAGAATTTTGTAATACGACTCACTATAGGGCGGCCGGGAATT | 3 nt | ACG |
| | bp | CGCCACCATGGTGAGCAAGGGCGAGGAGCTGTTCACCGGGGTG | | |
| | insert | GTGCCCATCCTGGTCGAGCTGGACGGCGACGTAAACGGCCACA | | |
| | ion | AGTTCAGCGTGTCCGGCGAGGGCGAGGGCGATGCCACCTACGG | | |
| | | CAAGCTGACCCTGAAGTTCATCTGCACCACCGGCAAGCTGCCCG | | |
| | | TGCCCTGGCCCACCCTCGTGACCACCCTGACGT (SEQ ID NO: | | |
| | | 20783) | | |
| | 250 | CGTCAGAATTTTGTAATACGACTCACTATAGGGCGGCCGGGAAT | 4 nt | TACG |
| | bp | TCGCCACCATGGTGAGCAAGGGCGAGGAGCTGTTCACCGGGGT | | |
| | insert | GGTGCCCATCCTGGTCGAGCTGGACGGCGACGTAAACGGCCAC | | |
| | ion | AAGTTCAGCGTGTCCGGCGAGGGCGAGGGCGATGCCACCTACG | | |
| | | GCAAGCTGACCCTGAAGTTCATCTGCACCACCGGCAAGCTGCCC | | |
| | | GTGCCCTGGCCCACCCTCGTGACCACCCTGACG (SEQ ID NO: | | |
| | | 20784) | | |
| | 250 | CCGTCAGAATTTTGTAATACGACTCACTATAGGGCGGCCGGGAA | 5 nt | GTACG |
| | bp | TTCGCCACCATGGTGAGCAAGGGCGAGGAGCTGTTCACCGGGG | | |
| | insert | TGGTGCCCATCCTGGTCGAGCTGGACGGCGACGTAAACGGCCA | | |
| | ion | CAAGTTCAGCGTGTCCGGCGAGGGCGAGGGCGATGCCACCTAC | | |
| | | GGCAAGCTGACCCTGAAGTTCATCTGCACCACCGGCAAGCTGCC | | |
| | | CGTGCCCTGGCCCACCCTCGTGACCACCCTGAC (SEQ ID NO: | | |
| | | 20785) | | |
| | 250 | ACCGTCAGAATTTTGTAATACGACTCACTATAGGGCGGCCGGGA | 6 nt | CGTACG |
| | bp | ATTCGCCACCATGGTGAGCAAGGGCGAGGAGCTGTTCACCGGG | | |
| | insert | GTGGTGCCCATCCTGGTCGAGCTGGACGGCGACGTAAACGGCC | | |
| | ion | ACAAGTTCAGCGTGTCCGGCGAGGGCGAGGGCGATGCCACCTA | | |
| | | CGGCAAGCTGACCCTGAAGTTCATCTGCACCACCGGCAAGCTGC | | |
| | | CCGTGCCCTGGCCCACCCTCGTGACCACCCTGA (SEQ ID NO: | | |
| | | 20786) | | |
| | 250 | AACCGTCAGAATTTTGTAATACGACTCACTATAGGGCGGCCGGG | 7 nt | ACGTACG |
| | bp | AATTCGCCACCATGGTGAGCAAGGGCGAGGAGCTGTTCACCGG | | |
| | insert | GGTGGTGCCCATCCTGGTCGAGCTGGACGGCGACGTAAACGGC | | |
| | ion | CACAAGTTCAGCGTGTCCGGCGAGGGCGAGGGCGATGCCACCT | | |
| | | ACGGCAAGCTGACCCTGAAGTTCATCTGCACCACCGGCAAGCTG | | |
| | | CCCGTGCCCTGGCCCACCCTCGTGACCACCCTG (SEQ ID NO: | | |
| | | 20787) | | |
| | 250 | GAACCGTCAGAATTTTGTAATACGACTCACTATAGGGCGGCCGG | 8 nt | GACGTACG |
| | bp | GAATTCGCCACCATGGTGAGCAAGGGCGAGGAGCTGTTCACCG | | |
| | insert | GGGTGGTGCCCATCCTGGTCGAGCTGGACGGCGACGTAAACGG | | |
| | ion | CCACAAGTTCAGCGTGTCCGGCGAGGGCGAGGGCGATGCCACC | | |
| | | TACGGCAAGCTGACCCTGAAGTTCATCTGCACCACCGGCAAGCT | | |
| | | GCCCGTGCCCTGGCCCACCCTCGTGACCACCCT (SEQ ID NO: | | |
| | | 20788) | | |
| | 250 | TGAACCGTCAGAATTTTGTAATACGACTCACTATAGGGCGGCCG | 9 nt | TGACGTACG |
| | bp | GGAATTCGCCACCATGGTGAGCAAGGGCGAGGAGCTGTTCACC | | |
| | insert | GGGGTGGTGCCCATCCTGGTCGAGCTGGACGGCGACGTAAACG | | |
| | ion | GCCACAAGTTCAGCGTGTCCGGCGAGGGCGAGGGCGATGCCAC | | |
| | | CTACGGCAAGCTGACCCTGAAGTTCATCTGCACCACCGGCAAGC | | |
| | | TGCCCGTGCCCTGGCCCACCCTCGTGACCACCC (SEQ ID NO: | | |
| | | 20789) | | |
| | 250 | GTGAACCGTCAGAATTTTGTAATACGACTCACTATAGGGCGGCC | 10 nt | CTGACGTACG (SEQ |
| | bp | GGGAATTCGCCACCATGGTGAGCAAGGGCGAGGAGCTGTTCAC | | ID NO: 20801) |
| | insert | CGGGGTGGTGCCCATCCTGGTCGAGCTGGACGGCGACGTAAAC | | |
| | ion | GGCCACAAGTTCAGCGTGTCCGGCGAGGGCGAGGGCGATGCCA | | |
| | | CCTACGGCAAGCTGACCCTGAAGTTCATCTGCACCACCGGCAAG | | |
| | | CTGCCCGTGCCCTGGCCCACCCTCGTGACCACC (SEQ ID NO: | | |
| | | 20790) | | |
| | 250 | AGTGAACCGTCAGAATTTTGTAATACGACTCACTATAGGGCGGC | 11 nt | CCTGACGTACG |
| | bp | CGGGAATTCGCCACCATGGTGAGCAAGGGCGAGGAGCTGTTCA | | (SEQ ID NO: 20802) |
| | insert | CCGGGGTGGTGCCCATCCTGGTCGAGCTGGACGGCGACGTAAA | | |
| | ion | CGGCCACAAGTTCAGCGTGTCCGGCGAGGGCGAGGGCGATGCC | | |
| | | ACCTACGGCAAGCTGACCCTGAAGTTCATCTGCACCACCGGCAA | | |
| | | GCTGCCCGTGCCCTGGCCCACCCTCGTGACCAC (SEQ ID NO: | | |
| | | 20791) | | |
| | 250 | TAGTGAACCGTCAGAATTTTGTAATACGACTCACTATAGGGCGG | 12 nt | CCCTGACGTACG |
| | bp | CCGGGAATTCGCCACCATGGTGAGCAAGGGCGAGGAGCTGTTC | | (SEQ ID NO: 20803) |
| | insert | ACCGGGGTGGTGCCCATCCTGGTCGAGCTGGACGGCGACGTAA | | |
| | ion | ACGGCCACAAGTTCAGCGTGTCCGGCGAGGGCGAGGGCGATGC | | |
| | | CACCTACGGCAAGCTGACCCTGAAGTTCATCTGCACCACCGGCA | | |
| | | AGCTGCCCGTGCCCTGGCCCACCCTCGTGACCA (SEQ ID NO: | | |
| | | 20792) | | |
| | 250 | TTAGTGAACCGTCAGAATTTTGTAATACGACTCACTATAGGGCG | 13 nt | ACCCTGACGTACG |
| | bp | GCCGGGAATTCGCCACCATGGTGAGCAAGGGCGAGGAGCTGTT | | (SEQ ID NO: 20804) |
| | insert | CACCGGGGTGGTGCCCATCCTGGTCGAGCTGGACGGCGACGTA | | |
| | ion | AACGGCCACAAGTTCAGCGTGTCCGGCGAGGGCGAGGGCGAT | | |
| | | GCCACCTACGGCAAGCTGACCCTGAAGTTCATCTGCACCACCGG | | |
| | | CAAGCTGCCCGTGCCCTGGCCCACCCTCGTGACC (SEQ ID NO: | | |
| | | 20793) | | |
| | 250 | TTTAGTGAACCGTCAGAATTTTGTAATACGACTCACTATAGGGC | 14 nt | CACCCTGACGTACG |
| | bp | GGCCGGGAATTCGCCACCATGGTGAGCAAGGGCGAGGAGCTGT | | (SEQ ID NO: 20805) |
| | insert | TCACCGGGGTGGTGCCCATCCTGGTCGAGCTGGACGGCGACGT | | |
| | ion | AAACGGCCACAAGTTCAGCGTGTCCGGCGAGGGCGAGGGCGAT | | |
| | | GCCACCTACGGCAAGCTGACCCTGAAGTTCATCTGCACCACCGG | | |
| | | CAAGCTGCCCGTGCCCTGGCCCACCCTCGTGAC (SEQ ID NO: | | |
| | | 20794) | | |
| | 250 | GTTTAGTGAACCGTCAGAATTTTGTAATACGACTCACTATAGGG | 15 nt | CCACCCTGACGTAC |
| | bp | CGGCCGGGAATTCGCCACCATGGTGAGCAAGGGCGAGGAGCT | | G (SEQ ID NO: |
| | insert | GTTCACCGGGGTGGTGCCCATCCTGGTCGAGCTGGACGGCGAC | | 20806) |
| | ion | GTAAACGGCCACAAGTTCAGCGTGTCCGGCGAGGGCGAGGGC | | |
| | | GATGCCACCTACGGCAAGCTGACCCTGAAGTTCATCTGCACCAC | | |
| | | CGGCAAGCTGCCCGTGCCCTGGCCCACCCTCGTGA (SEQ ID NO: | | |
| | | 20795) | | |
| | 250 | CGTTTAGTGAACCGTCAGAATTTTGTAATACGACTCACTATAGG | 16 nt | ACCACCCTGACGTA |
| | bp | GCGGCCGGGAATTCGCCACCATGGTGAGCAAGGGCGAGGAGC | | CG (SEQ ID NO: |
| | insert | TGTTCACCGGGGTGGTGCCCATCCTGGTCGAGCTGGACGGCGA | | 20807) |
| | ion | CGTAAACGGCCACAAGTTCAGCGTGTCCGGCGAGGGCGAGGGC | | |
| | | GATGCCACCTACGGCAAGCTGACCCTGAAGTTCATCTGCACCAC | | |
| | | CGGCAAGCTGCCCGTGCCCTGGCCCACCCTCGTG (SEQ ID NO: | | |
| | | 20796) | | |
| | 250 | TCGTTTAGTGAACCGTCAGAATTTTGTAATACGACTCACTATAGG | 17 nt | GACCACCCTGACGT |
| | bp | GCGGCCGGGAATTCGCCACCATGGTGAGCAAGGGCGAGGAGC | | ACG (SEQ ID NO: |
| | insert | TGTTCACCGGGGTGGTGCCCATCCTGGTCGAGCTGGACGGCGA | | 20808) |
| | ion | CGTAAACGGCCACAAGTTCAGCGTGTCCGGCGAGGGCGAGGGC | | |
| | | GATGCCACCTACGGCAAGCTGACCCTGAAGTTCATCTGCACCAC | | |
| | | CGGCAAGCTGCCCGTGCCCTGGCCCACCCTCGT (SEQ ID NO: | | |
| | | 20797) | | |
| | 250 | CTCGTTTAGTGAACCGTCAGAATTTTGTAATACGACTCACTATAG | 18 nt | TGACCACCCTGACG |
| | bp | GGCGGCCGGGAATTCGCCACCATGGTGAGCAAGGGCGAGGAG | | TACG (SEQ ID NO: |
| | insert | CTGTTCACCGGGGTGGTGCCCATCCTGGTCGAGCTGGACGGCG | | 20809) |
| | ion | ACGTAAACGGCCACAAGTTCAGCGTGTCCGGCGAGGGCGAGGG | | |
| | | CGATGCCACCTACGGCAAGCTGACCCTGAAGTTCATCTGCACCA | | |
| | | CCGGCAAGCTGCCCGTGCCCTGGCCCACCCTCG (SEQ ID NO: | | |
| | | 20798) | | |
| | 250 | GCTCGTTTAGTGAACCGTCAGAATTTTGTAATACGACTCACTATA | 19 nt | GTGACCACCCTGAC |
| | bp | GGGCGGCCGGGAATTCGCCACCATGGTGAGCAAGGGCGAGGA | | GTACG (SEQ ID NO: |
| | insert | GCTGTTCACCGGGGTGGTGCCCATCCTGGTCGAGCTGGACGGC | | 20810) |
| | ion | GACGTAAACGGCCACAAGTTCAGCGTGTCCGGCGAGGGCGAGG | | |
| | | GCGATGCCACCTACGGCAAGCTGACCCTGAAGTTCATCTGCACC | | |
| | | ACCGGCAAGCTGCCCGTGCCCTGGCCCACCCTC (SEQ ID NO: | | |
| | | 20799) | | |
| | 250 | AGCTCGTTTAGTGAACCGTCAGAATTTTGTAATACGACTCACTAT | 20 nt | CGTGACCACCCTGA |
| | bp | AGGGCGGCCGGGAATTCGCCACCATGGTGAGCAAGGGCGAGG | | CGTACG (SEQ ID |
| | insert | AGCTGTTCACCGGGGTGGTGCCCATCCTGGTCGAGCTGGACGG | | NO: 20811) |
| | ion | CGACGTAAACGGCCACAAGTTCAGCGTGTCCGGCGAGGGCGAG | | |
| | | GGCGATGCCACCTACGGCAAGCTGACCCTGAAGTTCATCTGCAC | | |
| | | CACCGGCAAGCTGCCCGTGCCCTGGCCCACCCT (SEQ ID NO: | | |
| | | 20800) | | |
| mCherry | >750 | [mCherry-expressing cassette] | 0 nt | |
| insertion | bp | | | |
| | insert | | | |
| | ion | | | |
| | >750 | [mCherry-expressing cassette] | 1 nt | G |
| | bp | | | |
| | insert | | | |
| | ion | | | |
| | >750 | [mCherry-expressing cassette] | 2 nt | CG |
| | bp | | | |
| | insert | | | |
| | ion | | | |
| | >750 | [mCherry-expressing cassette] | 3 nt | ACG |
| | bp | | | |
| | insert | | | |
| | ion | | | |
| | >750 | [mCherry-expressing cassette] | 4 nt | TACG |
| | bp | | | |
| | insert | | | |
| | ion | | | |
| | >750 | [mCherry-expressing cassette] | 5 nt | GTACG |
| | bp | | | |
| | insert | | | |
| | ion | | | |
| | >750 | [mCherry-expressing cassette] | 6 nt | CGTACG |
| | bp | | | |
| | insert | | | |
| | ion | | | |
| | >750 | [mCherry-expressing cassette] | 7 nt | ACGTACG |
| | bp | | | |
| | insert | | | |
| | ion | | | |
| | >750 | [mCherry-expressing cassette] | 8 nt | GACGTACG |
| | bp | | | |
| | insert | | | |
| | ion | | | |
| | >750 | [mCherry-expressing cassette] | 9 nt | TGACGTACG |
| | bp | | | |
| | insert | | | |
| | ion | | | |
| | >750 | [mCherry-expressing cassette] | 10 nt | CTGACGTACG (SEQ |
| | bp | | | ID NO: 20801) |
| | insert | | | |
| | ion | | | |
| | >750 | [mCherry-expressing cassette] | 11 nt | CCTGACGTACG |
| | bp | | | (SEQ ID NO: 20802) |
| | insert | | | |
| | ion | | | |
| | >750 | [mCherry-expressing cassette] | 12 nt | CCCTGACGTACG |
| | bp | | | (SEQ ID NO: 20803) |
| | insert | | | |
| | ion | | | |
| | >750 | [mCherry-expressing cassette] | 13 nt | ACCCTGACGTACG |
| | bp | | | (SEQ ID NO: 20804) |
| | insert | | | |
| | ion | | | |
| | >750 | [mCherry-expressing cassette] | 14 nt | CACCCTGACGTACG |
| | bp | | | (SEQ ID NO: 20805) |
| | insert | | | |
| | ion | | | |
| | >750 | [mCherry-expressing cassette] | 15 nt | CCACCCTGACGTAC |
| | bp | | | G (SEQ ID NO: |
| | insert | | | 20806) |
| | ion | | | |
| | >750 | [mCherry-expressing cassette] | 16 nt | ACCACCCTGACGTA |
| | bp | | | CG (SEQ ID NO: |
| | insert | | | 20807) |
| | ion | | | |
| | >750 | [mCherry-expressing cassette] | 17 nt | GACCACCCTGACGT |
| | bp | | | ACG (SEQ ID NO: |
| | insert | | | 20808) |
| | ion | | | |
| | >750 | [mCherry-expressing cassette] | 18 nt | TGACCACCCTGACG |
| | bp | | | TACG (SEQ ID NO: |
| | insert | | | 20809) |
| | ion | | | |
| | >750 | [mCherry-expressing cassette] | 19 nt | GTGACCACCCTGAC |
| | bp | | | GTACG (SEQ ID NO: |
| | insert | | | 20810) |
| | ion | | | |
| | >750 | [mCherry-expressing cassette] | 20 nt | CGTGACCACCCTGA |
| | bp | | | CGTACG (SEQ ID |
| | insert | | | NO: 20811) |
| | ion | | | |

[0471] In some embodiments, a homology domain (e.g., a pre-edit homology domain) comprises the nucleic acid sequence of a homology 2 sequence as listed in Table 39 below, or a nucleic acid sequence having at least 75%, 80%, 85%, 90%, 95%, 96%, 97%, 98%, or 99% identity thereto. In some embodiments, a homology domain (e.g., a pre-edit homology domain) comprises the nucleic acid sequence of a homology 2 sequence as listed in Table 39 below, or a nucleic acid sequence having no more than 1, 2, 3, 4, or 5 nucleotide differences relative thereto. In some embodiments, a homology domain has a length of 0-1000 nucleotides (e.g., about 0-5, 5-10, 10-50, 50-100, 100-500, or 500-1000 nucleotides). Herein, when an RNA sequence (e.g., a homology domain sequence) is said to comprise a particular sequence (e.g., a sequence of Table 39 or a portion thereof) that comprises thymine (T), it is of course understood that the RNA sequence may (and frequently does) comprise uracil (U) in place of T. For instance, the RNA sequence may comprise U at every position shown as T in the sequence in Table 39. More specifically, the present disclosure provides an RNA sequence according to every homology domain sequence of Table 39, wherein the RNA sequence has a U in place of each T in the sequence in Table 39.

TABLE 39
Exemplary homology 2 sequences

| | Homology | | |
|---|---|---|---|
| Reporter | 2 length | Homology 2 Sequence (5′ to 3′) | Homology 1 pair |
| BFP to GFP | 8 nt | ACCCTGAC | |
| | 11 nt | ACCACCCTGAC (SEQ ID NO: 20812) | |
| | 12 nt | GACCACCCTGAC (SEQ ID NO: 20813) | |
| | 13 nt | TGACCACCCTGAC (SEQ ID NO: 20814) | |
| | 14 nt | GTGACCACCCTGAC (SEQ ID NO: 20815) | |
| | 16 nt | TCGTGACCACCCTGAC (SEQ ID NO: 20816) | |
| | 20 nt | ACCCTCGTGACCACCCTGAC (SEQ ID NO: 20817) | |
| | 24 nt | GCCCACCCTCGTGACCACCCTGAC (SEQ ID NO: 20818) | |
| | 25 nt | GGCCCACCCTCGTGACCACCCTGAC (SEQ ID NO: 20819) | |
| 250 bp GFP | 500 nt | CCCGCCTGGCTGACCGCCCAACGACCCCCGCCCATTGACGTCAATAATGACGTATGTTCCCATAGTAAC | 0 nt Homology 1 |
| insertion | | GCCAATAGGGACTTTCCATTGACGTCAATGGGTGGAGTATTTACGGTAAACTGCCCACTTGGCAGTAC | |
| | | ATCAAGTGTATCATATGCCAAGTCCGCCCCCTATTGACGTCAATGACGGTAAATGGCCCGCCTGGCATT | |
| | | ATGCCCAGTACATGACCTTACGGGACTTTCCTACTTGGCAGTACATCTACGTATTAGTCATCGCTATTAC | |
| | | CATGGTGATGCGGTTTTGGCAGTACACCAATGGGCGTGGATAGCGGTTTGACTCACGGGGATTTCCAA | |
| | | GTCTCCACCCCATTGACGTCAATGGGAGTTTGTTTTGGCACCAAAATCAACGGGACTTTCCAAAATGTC | |
| | | GTAATAACCCCGCCCCGTTGACGCAAATGGGCGGTAGGCGTGTACGGTGGGAGGTCTATATAAGCAG | |
| | | AGCTCGTTTAGTGAACCGTC (SEQ ID NO: 20820) | |
| | 499 nt | CCGCCTGGCTGACCGCCCAACGACCCCCGCCCATTGACGTCAATAATGACGTATGTTCCCATAGTAACG | 0 nt Homology 1 |
| | | CCAATAGGGACTTTCCATTGACGTCAATGGGTGGAGTATTTACGGTAAACTGCCCACTTGGCAGTACA | |
| | | TCAAGTGTATCATATGCCAAGTCCGCCCCCTATTGACGTCAATGACGGTAAATGGCCCGCCTGGCATTA | |
| | | TGCCCAGTACATGACCTTACGGGACTTTCCTACTTGGCAGTACATCTACGTATTAGTCATCGCTATTACC | |
| | | ATGGTGATGCGGTTTTGGCAGTACACCAATGGGCGTGGATAGCGGTTTGACTCACGGGGATTTCCAA | |
| | | GTCTCCACCCCATTGACGTCAATGGGAGTTTGTTTTGGCACCAAAATCAACGGGACTTTCCAAAATGTC | |
| | | GTAATAACCCCGCCCCGTTGACGCAAATGGGCGGTAGGCGTGTACGGTGGGAGGTCTATATAAGCAG | |
| | | AGCTCGTTTAGTGAACCGTC (SEQ ID NO: 20821) | |
| | 498 nt | CGCCTGGCTGACCGCCCAACGACCCCCGCCCATTGACGTCAATAATGACGTATGTTCCCATAGTAACGC | 0 nt Homology 1 |
| | | CAATAGGGACTTTCCATTGACGTCAATGGGTGGAGTATTTACGGTAAACTGCCCACTTGGCAGTACAT | |
| | | CAAGTGTATCATATGCCAAGTCCGCCCCCTATTGACGTCAATGACGGTAAATGGCCCGCCTGGCATTAT | |
| | | GCCCAGTACATGACCTTACGGGACTTTCCTACTTGGCAGTACATCTACGTATTAGTCATCGCTATTACCA | |
| | | TGGTGATGCGGTTTTGGCAGTACACCAATGGGCGTGGATAGCGGTTTGACTCACGGGGATTTCCAAG | |
| | | TCTCCACCCCATTGACGTCAATGGGAGTTTGTTTTGGCACCAAAATCAACGGGACTTTCCAAAATGTCG | |
| | | TAATAACCCCGCCCCGTTGACGCAAATGGGCGGTAGGCGTGTACGGTGGGAGGTCTATATAAGCAGA | |
| | | GCTCGTTTAGTGAACCGTC (SEQ ID NO: 20822) | |
| | 497 nt | GCCTGGCTGACCGCCCAACGACCCCCGCCCATTGACGTCAATAATGACGTATGTTCCCATAGTAACGCC | 0 nt Homology 1 |
| | | AATAGGGACTTTCCATTGACGTCAATGGGTGGAGTATTTACGGTAAACTGCCCACTTGGCAGTACATC | |
| | | AAGTGTATCATATGCCAAGTCCGCCCCCTATTGACGTCAATGACGGTAAATGGCCCGCCTGGCATTAT | |
| | | GCCCAGTACATGACCTTACGGGACTTTCCTACTTGGCAGTACATCTACGTATTAGTCATCGCTATTACCA | |
| | | TGGTGATGCGGTTTTGGCAGTACACCAATGGGCGTGGATAGCGGTTTGACTCACGGGGATTTCCAAG | |
| | | TCTCCACCCCATTGACGTCAATGGGAGTTTGTTTTGGCACCAAAATCAACGGGACTTTCCAAAATGTCG | |
| | | TAATAACCCCGCCCCGTTGACGCAAATGGGGGTAGGCGTGTACGGTGGGAGGTCTATATAAGCAGA | |
| | | GCTCGTTTAGTGAACCGTC (SEQ ID NO: 20823) | |
| | 496 nt | CCTGGCTGACCGCCCAACGACCCCCGCCCATTGACGTCAATAATGACGTATGTTCCCATAGTAACGCCA | 0 nt Homology 1 |
| | | ATAGGGACTTTCCATTGACGTCAATGGGTGGAGTATTTACGGTAAACTGCCCACTTGGCAGTACATCA | |
| | | AGTGTATCATATGCCAAGTCCGCCCCCTATTGACGTCAATGACGGTAAATGGCCCGCCTGGCATTATGC | |
| | | CCAGTACATGACCTTACGGGACTTTCCTACTTGGCAGTACATCTACGTATTAGTCATCGCTATTACCATG | |
| | | GTGATGCGGTTTTGGCAGTACACCAATGGGCGTGGATAGCGGTTTGACTCACGGGGATTTCCAAGTCT | |
| | | CCACCCCATTGACGTCAATGGGAGTTTGTTTTGGCACCAAAATCAACGGGACTTTCCAAAATGTCGTAA | |
| | | TAACCCCGCCCCGTTGACGCAAATGGGCGGTAGGCGTGTACGGTGGGAGGTCTATATAAGCAGAGCT | |
| | | CGTTTAGTGAACCGTC (SEQ ID NO: 20824) | |
| | 495 nt | CTGGCTGACCGCCCAACGACCCCCGCCCATTGACGTCAATAATGACGTATGTTCCCATAGTAACGCCAA | 0 nt Homology 1 |
| | | TAGGGACTTTCCATTGACGTCAATGGGTGGAGTATTTACGGTAAACTGCCCACTTGGCAGTACATCAA | |
| | | GTGTATCATATGCCAAGTCCGCCCCCTATTGACGTCAATGACGGTAAATGGCCCGCCTGGCATTATGCC | |
| | | CAGTACATGACCTTACGGGACTTTCCTACTTGGCAGTACATCTACGTATTAGTCATCGCTATTACCATG | |
| | | GTGATGCGGTTTTGGCAGTACACCAATGGGCGTGGATAGCGGTTTGACTCACGGGGATTTCCAAGTCT | |
| | | CCACCCCATTGACGTCAATGGGAGTTTGTTTTGGCACCAAAATCAACGGGACTTTCCAAAATGTCGTAA | |
| | | TAACCCCGCCCCGTTGACGCAAATGGGCGGTAGGCGTGTACGGTGGGAGGTCTATATAAGCAGAGCT | |
| | | CGTTTAGTGAACCGTC (SEQ ID NO: 20825) | |
| | 494 nt | TGGCTGACCGCCCAACGACCCCCGCCCATTGACGTCAATAATGACGTATGTTCCCATAGTAACGCCAAT | 0 nt Homology 1 |
| | | AGGGACTTTCCATTGACGTCAATGGGTGGAGTATTTACGGTAAACTGCCCACTTGGCAGTACATCAAG | |
| | | TGTATCATATGCCAAGTCCGCCCCCTATTGACGTCAATGACGGTAAATGGCCCGCCTGGCATTATGCCC | |
| | | AGTACATGACCTTACGGGACTTTCCTACTTGGCAGTACATCTACGTATTAGTCATCGCTATTACCATGGT | |
| | | GATGCGGTTTTGGCAGTACACCAATGGGCGTGGATAGCGGTTTGACTCACGGGGATTTCCAAGTCTCC | |
| | | ACCCCATTGACGTCAATGGGAGTTTGTTTTGGCACCAAAATCAACGGGACTTTCCAAAATGTCGTAATA | |
| | | ACCCCGCCCCGTTGACGCAAATGGGCGGTAGGCGTGTACGGTGGGAGGTCTATATAAGCAGAGCTCG | |
| | | TTTAGTGAACCGTC (SEQ ID NO: 20826) | |
| | 493 nt | GGCTGACCGCCCAACGACCCCCGCCCATTGACGTCAATAATGACGTATGTTCCCATAGTAACGCCAAT | 0 nt Homology 1 |
| | | AGGGACTTTCCATTGACGTCAATGGGTGGAGTATTTACGGTAAACTGCCCACTTGGCAGTACATCAAG | |
| | | TGTATCATATGCCAAGTCCGCCCCCTATTGACGTCAATGACGGTAAATGGCCCGCCTGGCATTATGCCC | |
| | | AGTACATGACCTTACGGGACTTTCCTACTTGGCAGTACATCTACGTATTAGTCATCGCTATTACCATGGT | |
| | | GATGCGGTTTTGGCAGTACACCAATGGGCGTGGATAGCGGTTTGACTCACGGGGATTTCCAAGTCTCC | |
| | | ACCCCATTGACGTCAATGGGAGTTTGTTTTGGCACCAAAATCAACGGGACTTTCCAAAATGTCGTAATA | |
| | | ACCCCGCCCCGTTGACGCAAATGGGCGGTAGGCGTGTACGGTGGGAGGTCTATATAAGCAGAGCTCG | |
| | | TTTAGTGAACCGTC (SEQ ID NO: 20827) | |
| | 492 nt | GCTGACCGCCCAACGACCCCCGCCCATTGACGTCAATAATGACGTATGTTCCCATAGTAACGCCAATA | 0 nt Homology 1 |
| | | GGGACTTTCCATTGACGTCAATGGGTGGAGTATTTACGGTAAACTGCCCACTTGGCAGTACATCAAGT | |
| | | GTATCATATGCCAAGTCCGCCCCCTATTGACGTCAATGACGGTAAATGGCCCGCCTGGCATTATGCCCA | |
| | | GTACATGACCTTACGGGACTTTCCTACTTGGCAGTACATCTACGTATTAGTCATCGCTATTACCATGGT | |
| | | GATGCGGTTTTGGCAGTACACCAATGGGCGTGGATAGCGGTTTGACTCACGGGGATTTCCAAGTCTCC | |
| | | ACCCCATTGACGTCAATGGGAGTTTGTTTTGGCACCAAAATCAACGGGACTTTCCAAAATGTCGTAATA | |
| | | ACCCCGCCCCGTTGACGCAAATGGGCGGTAGGCGTGTACGGTGGGAGGTCTATATAAGCAGAGCTCG | |
| | | TTTAGTGAACCGTC (SEQ ID NO: 20828) | |
| | 491 nt | CTGACCGCCCAACGACCCCCGCCCATTGACGTCAATAATGACGTATGTTCCCATAGTAACGCCAATAG | 0 nt Homology 1 |
| | | GGACTTTCCATTGACGTCAATGGGTGGAGTATTTACGGTAAACTGCCCACTTGGCAGTACATCAAGTG | |
| | | TATCATATGCCAAGTCCGCCCCCTATTGACGTCAATGACGGTAAATGGCCCGCCTGGCATTATGCCCAG | |
| | | TACATGACCTTACGGGACTTTCCTACTTGGCAGTACATCTACGTATTAGTCATCGCTATTACCATGGTGA | |
| | | TGCGGTTTTGGCAGTACACCAATGGGCGTGGATAGCGGTTTGACTCACGGGGATTTCCAAGTCTCCAC | |
| | | CCCATTGACGTCAATGGGAGTTTGTTTTGGCACCAAAATCAACGGGACTTTCCAAAATGTCGTAATAAC | |
| | | CCCGCCCCGTTGACGCAAATGGGCGGTAGGCGTGTACGGTGGGAGGTCTATATAAGCAGAGCTCGTT | |
| | | TAGTGAACCGTC (SEQ ID NO: 20829) | |
| | 490 nt | TGACCGCCCAACGACCCCCGCCCATTGACGTCAATAATGACGTATGTTCCCATAGTAACGCCAATAGG | 0 nt Homology 1 |
| | | GACTTTCCATTGACGTCAATGGGTGGAGTATTTACGGTAAACTGCCCACTTGGCAGTACATCAAGTGT | |
| | | ATCATATGCCAAGTCCGCCCCCTATTGACGTCAATGACGGTAAATGGCCCGCCTGGCATTATGCCCAGT | |
| | | ACATGACCTTACGGGACTTTCCTACTTGGCAGTACATCTACGTATTAGTCATCGCTATTACCATGGTGAT | |
| | | GCGGTTTTGGCAGTACACCAATGGGCGTGGATAGCGGTTTGACTCACGGGGATTTCCAAGTCTCCACC | |
| | | CCATTGACGTCAATGGGAGTTTGTTTTGGCACCAAAATCAACGGGACTTTCCAAAATGTCGTAATAACC | |
| | | CCGCCCCGTTGACGCAAATGGGCGGTAGGCGTGTACGGTGGGAGGTCTATATAAGCAGAGCTCGTTT | |
| | | AGTGAACCGTC (SEQ ID NO: 20830) | |
| | 489 nt | GACCGCCCAACGACCCCCGCCCATTGACGTCAATAATGACGTATGTTCCCATAGTAACGCCAATAGGG | 0 nt Homology 1 |
| | | ACTTTCCATTGACGTCAATGGGTGGAGTATTTACGGTAAACTGCCCACTTGGCAGTACATCAAGTGTAT | |
| | | CATATGCCAAGTCCGCCCCCTATTGACGTCAATGACGGTAAATGGCCCGCCTGGCATTATGCCCAGTAC | |
| | | ATGACCTTACGGGACTTTCCTACTTGGCAGTACATCTACGTATTAGTCATCGCTATTACCATGGTGATG | |
| | | CGGTTTTGGCAGTACACCAATGGGCGTGGATAGCGGTTTGACTCACGGGGATTTCCAAGTCTCCACCC | |
| | | CATTGACGTCAATGGGAGTTTGTTTTGGCACCAAAATCAACGGGACTTTCCAAAATGTCGTAATAACCC | |
| | | CGCCCCGTTGACGCAAATGGGCGGTAGGCGTGTACGGTGGGAGGTCTATATAAGCAGAGCTCGTTTA | |
| | | GTGAACCGTC (SEQ ID NO: 20831) | |
| | 488 nt | ACCGCCCAACGACCCCCGCCCATTGACGTCAATAATGACGTATGTTCCCATAGTAACGCCAATAGGGA | 0 nt Homology 1 |
| | | CTTTCCATTGACGTCAATGGGTGGAGTATTTACGGTAAACTGCCCACTTGGCAGTACATCAAGTGTATC | |
| | | ATATGCCAAGTCCGCCCCCTATTGACGTCAATGACGGTAAATGGCCCGCCTGGCATTATGCCCAGTAC | |
| | | ATGACCTTACGGGACTTTCCTACTTGGCAGTACATCTACGTATTAGTCATCGCTATTACCATGGTGATG | |
| | | CGGTTTTGGCAGTACACCAATGGGCGTGGATAGCGGTTTGACTCACGGGGATTTCCAAGTCTCCACCC | |
| | | CATTGACGTCAATGGGAGTTTGTTTTGGCACCAAAATCAACGGGACTTTCCAAAATGTCGTAATAACCC | |
| | | CGCCCCGTTGACGCAAATGGGCGGTAGGCGTGTACGGTGGGAGGTCTATATAAGCAGAGCTCGTTTA | |
| | | GTGAACCGTC (SEQ ID NO: 20832) | |
| | 487 nt | CCGCCCAACGACCCCCGCCCATTGACGTCAATAATGACGTATGTTCCCATAGTAACGCCAATAGGGAC | 0 nt Homology 1 |
| | | TTTCCATTGACGTCAATGGGTGGAGTATTTACGGTAAACTGCCCACTTGGCAGTACATCAAGTGTATCA | |
| | | TATGCCAAGTCCGCCCCCTATTGACGTCAATGACGGTAAATGGCCCGCCTGGCATTATGCCCAGTACAT | |
| | | GACCTTACGGGACTTTCCTACTTGGCAGTACATCTACGTATTAGTCATCGCTATTACCATGGTGATGCG | |
| | | GTTTTGGCAGTACACCAATGGGCGTGGATAGCGGTTTGACTCACGGGGATTTCCAAGTCTCCACCCCA | |
| | | TTGACGTCAATGGGAGTTTGTTTTGGCACCAAAATCAACGGGACTTTCCAAAATGTCGTAATAACCCCG | |
| | | CCCCGTTGACGCAAATGGGCGGTAGGCGTGTACGGTGGGAGGTCTATATAAGCAGAGCTCGTTTAGT | |
| | | GAACCGTC (SEQ ID NO: 20833) | |
| | 486 nt | CGCCCAACGACCCCCGCCCATTGACGTCAATAATGACGTATGTTCCCATAGTAACGCCAATAGGGACTT | 0 nt Homology 1 |
| | | TCCATTGACGTCAATGGGTGGAGTATTTACGGTAAACTGCCCACTTGGCAGTACATCAAGTGTATCATA | |
| | | TGCCAAGTCCGCCCCCTATTGACGTCAATGACGGTAAATGGCCCGCCTGGCATTATGCCCAGTACATG | |
| | | ACCTTACGGGACTTTCCTACTTGGCAGTACATCTACGTATTAGTCATCGCTATTACCATGGTGATGCGG | |
| | | TTTTGGCAGTACACCAATGGGCGTGGATAGCGGTTTGACTCACGGGGATTTCCAAGTCTCCACCCCATT | |
| | | GACGTCAATGGGAGTTTGTTTTGGCACCAAAATCAACGGGACTTTCCAAAATGTCGTAATAACCCCGC | |
| | | CCCGTTGACGCAAATGGGCGGTAGGCGTGTACGGTGGGAGGTCTATATAAGCAGAGCTCGTTTAGTG | |
| | | AACCGTC (SEQ ID NO: 20834) | |
| | 485 nt | GCCCAACGACCCCCGCCCATTGACGTCAATAATGACGTATGTTCCCATAGTAACGCCAATAGGGACTTT | 0 nt Homology 1 |
| | | CCATTGACGTCAATGGGTGGAGTATTTACGGTAAACTGCCCACTTGGCAGTACATCAAGTGTATCATAT | |
| | | GCCAAGTCCGCCCCCTATTGACGTCAATGACGGTAAATGGCCCGCCTGGCATTATGCCCAGTACATGA | |
| | | CCTTACGGGACTTTCCTACTTGGCAGTACATCTACGTATTAGTCATCGCTATTACCATGGTGATGCGGT | |
| | | TTTGGCAGTACACCAATGGGCGTGGATAGCGGTTTGACTCACGGGGATTTCCAAGTCTCCACCCCATT | |
| | | GACGTCAATGGGAGTTTGTTTTGGCACCAAAATCAACGGGACTTTCCAAAATGTCGTAATAACCCCGC | |
| | | CCCGTTGACGCAAATGGGCGGTAGGCGTGTACGGTGGGAGGTCTATATAAGCAGAGCTCGTTTAGTG | |
| | | AACCGTC (SEQ ID NO: 20835) | |
| | 484 nt | CCCAACGACCCCCGCCCATTGACGTCAATAATGACGTATGTTCCCATAGTAACGCCAATAGGGACTTTC | 0 nt Homology 1 |
| | | CATTGACGTCAATGGGTGGAGTATTTACGGTAAACTGCCCACTTGGCAGTACATCAAGTGTATCATAT | |
| | | GCCAAGTCCGCCCCCTATTGACGTCAATGACGGTAAATGGCCCGCCTGGCATTATGCCCAGTACATGA | |
| | | CCTTACGGGACTTTCCTACTTGGCAGTACATCTACGTATTAGTCATCGCTATTACCATGGTGATGCGGT | |
| | | TTTGGCAGTACACCAATGGGCGTGGATAGCGGTTTGACTCACGGGGATTTCCAAGTCTCCACCCCATT | |
| | | GACGTCAATGGGAGTTTGTTTTGGCACCAAAATCAACGGGACTTTCCAAAATGTCGTAATAACCCCGC | |
| | | CCCGTTGACGCAAATGGGCGGTAGGCGTGTACGGTGGGAGGTCTATATAAGCAGAGCTCGTTTAGTG | |
| | | AACCGTC (SEQ ID NO: 20836) | |
| | 483 nt | CCAACGACCCCCGCCCATTGACGTCAATAATGACGTATGTTCCCATAGTAACGCCAATAGGGACTTTCC | 0 nt Homology 1 |
| | | ATTGACGTCAATGGGTGGAGTATTTACGGTAAACTGCCCACTTGGCAGTACATCAAGTGTATCATATG | |
| | | CCAAGTCCGCCCCCTATTGACGTCAATGACGGTAAATGGCCCGCCTGGCATTATGCCCAGTACATGAC | |
| | | CTTACGGGACTTTCCTACTTGGCAGTACATCTACGTATTAGTCATCGCTATTACCATGGTGATGCGGTTT | |
| | | TGGCAGTACACCAATGGGCGTGGATAGCGGTTTGACTCACGGGGATTTCCAAGTCTCCACCCCATTGA | |
| | | CGTCAATGGGAGTTTGTTTTGGCACCAAAATCAACGGGACTTTCCAAAATGTCGTAATAACCCCGCCCC | |
| | | GTTGACGCAAATGGGCGGTAGGCGTGTACGGTGGGAGGTCTATATAAGCAGAGCTCGTTTAGTGAAC | |
| | | CGTC (SEQ ID NO: 20837) | |
| | 482 nt | CAACGACCCCCGCCCATTGACGTCAATAATGACGTATGTTCCCATAGTAACGCCAATAGGGACTTTCCA | 0 nt Homology 1 |
| | | TTGACGTCAATGGGTGGAGTATTTACGGTAAACTGCCCACTTGGCAGTACATCAAGTGTATCATATGC | |
| | | CAAGTCCGCCCCCTATTGACGTCAATGACGGTAAATGGCCCGCCTGGCATTATGCCCAGTACATGACCT | |
| | | TACGGGACTTTCCTACTTGGCAGTACATCTACGTATTAGTCATCGCTATTACCATGGTGATGCGGTTTT | |
| | | GGCAGTACACCAATGGGCGTGGATAGCGGTTTGACTCACGGGGATTTCCAAGTCTCCACCCCATTGAC | |
| | | GTCAATGGGAGTTTGTTTTGGCACCAAAATCAACGGGACTTTCCAAAATGTCGTAATAACCCCGCCCC | |
| | | GTTGACGCAAATGGGCGGTAGGCGTGTACGGTGGGAGGTCTATATAAGCAGAGCTCGTTTAGTGAAC | |
| | | CGTC (SEQ ID NO: 20838) | |
| | 481 nt | AACGACCCCCGCCCATTGACGTCAATAATGACGTATGTTCCCATAGTAACGCCAATAGGGACTTTCCAT | 0 nt Homology 1 |
| | | TGACGTCAATGGGTGGAGTATTTACGGTAAACTGCCCACTTGGCAGTACATCAAGTGTATCATATGCC | |
| | | AAGTCCGCCCCCTATTGACGTCAATGACGGTAAATGGCCCGCCTGGCATTATGCCCAGTACATGACCTT | |
| | | ACGGGACTTTCCTACTTGGCAGTACATCTACGTATTAGTCATCGCTATTACCATGGTGATGCGGTTTTG | |
| | | GCAGTACACCAATGGGCGTGGATAGCGGTTTGACTCACGGGGATTTCCAAGTCTCCACCCCATTGACG | |
| | | TCAATGGGAGTTTGTTTTGGCACCAAAATCAACGGGACTTTCCAAAATGTCGTAATAACCCCGCCCCGT | |
| | | TGACGCAAATGGGCGGTAGGCGTGTACGGTGGGAGGTCTATATAAGCAGAGCTCGTTTAGTGAACCG | |
| | | TC (SEQ ID NO: 20839) | |
| | 480 nt | ACGACCCCCGCCCATTGACGTCAATAATGACGTATGTTCCCATAGTAACGCCAATAGGGACTTTCCATT | 0 nt Homology 1 |
| | | GACGTCAATGGGTGGAGTATTTACGGTAAACTGCCCACTTGGCAGTACATCAAGTGTATCATATGCCA | |
| | | AGTCCGCCCCCTATTGACGTCAATGACGGTAAATGGCCCGCCTGGCATTATGCCCAGTACATGACCTTA | |
| | | CGGGACTTTCCTACTTGGCAGTACATCTACGTATTAGTCATCGCTATTACCATGGTGATGCGGTTTTGG | |
| | | CAGTACACCAATGGGCGTGGATAGCGGTTTGACTCACGGGGATTTCCAAGTCTCCACCCCATTGACGT | |
| | | CAATGGGAGTTTGTTTTGGCACCAAAATCAACGGGACTTTCCAAAATGTCGTAATAACCCCGCCCCGTT | |
| | | GACGCAAATGGGCGGTAGGCGTGTACGGTGGGAGGTCTATATAAGCAGAGCTCGTTTAGTGAACCGT | |
| | | C (SEQ ID NO: 20840) | |
| | 479 nt | CGACCCCCGCCCATTGACGTCAATAATGACGTATGTTCCCATAGTAACGCCAATAGGGACTTTCCATTG | 0 nt Homology 1 |
| | | ACGTCAATGGGTGGAGTATTTACGGTAAACTGCCCACTTGGCAGTACATCAAGTGTATCATATGCCAA | |
| | | GTCCGCCCCCTATTGACGTCAATGACGGTAAATGGCCCGCCTGGCATTATGCCCAGTACATGACCTTAC | |
| | | GGGACTTTCCTACTTGGCAGTACATCTACGTATTAGTCATCGCTATTACCATGGTGATGCGGTTTTGGC | |
| | | AGTACACCAATGGGCGTGGATAGCGGTTTGACTCACGGGGATTTCCAAGTCTCCACCCCATTGACGTC | |
| | | AATGGGAGTTTGTTTTGGCACCAAAATCAACGGGACTTTCCAAAATGTCGTAATAACCCCGCCCCGTTG | |
| | | ACGCAAATGGGCGGTAGGCGTGTACGGTGGGAGGTCTATATAAGCAGAGCTCGTTTAGTGAACCGTC | |
| | | (SEQ ID NO: 20841) | |
| | 478 nt | GACCCCCGCCCATTGACGTCAATAATGACGTATGTTCCCATAGTAACGCCAATAGGGACTTTCCATTGA | 0 nt Homology 1 |
| | | CGTCAATGGGTGGAGTATTTACGGTAAACTGCCCACTTGGCAGTACATCAAGTGTATCATATGCCAAG | |
| | | TCCGCCCCCTATTGACGTCAATGACGGTAAATGGCCCGCCTGGCATTATGCCCAGTACATGACCTTACG | |
| | | GGACTTTCCTACTTGGCAGTACATCTACGTATTAGTCATCGCTATTACCATGGTGATGCGGTTTTGGCA | |
| | | GTACACCAATGGGCGTGGATAGCGGTTTGACTCACGGGGATTTCCAAGTCTCCACCCCATTGACGTCA | |
| | | ATGGGAGTTTGTTTTGGCACCAAAATCAACGGGACTTTCCAAAATGTCGTAATAACCCCGCCCCGTTGA | |
| | | CGCAAATGGGCGGTAGGCGTGTACGGTGGGAGGTCTATATAAGCAGAGCTCGTTTAGTGAACCGTC | |
| | | (SEQ ID NO: 20842) | |
| | 477 nt | ACCCCCGCCCATTGACGTCAATAATGACGTATGTTCCCATAGTAACGCCAATAGGGACTTTCCATTGAC | 0 nt Homology 1 |
| | | GTCAATGGGTGGAGTATTTACGGTAAACTGCCCACTTGGCAGTACATCAAGTGTATCATATGCCAAGT | |
| | | CCGCCCCCTATTGACGTCAATGACGGTAAATGGCCCGCCTGGCATTATGCCCAGTACATGACCTTACG | |
| | | GGACTTTCCTACTTGGCAGTACATCTACGTATTAGTCATCGCTATTACCATGGTGATGCGGTTTTGGCA | |
| | | GTACACCAATGGGCGTGGATAGCGGTTTGACTCACGGGGATTTCCAAGTCTCCACCCCATTGACGTCA | |
| | | ATGGGAGTTTGTTTTGGCACCAAAATCAACGGGACTTTCCAAAATGTCGTAATAACCCCGCCCCGTTGA | |
| | | CGCAAATGGGCGGTAGGCGTGTACGGTGGGAGGTCTATATAAGCAGAGCTCGTTTAGTGAACCGTC | |
| | | (SEQ ID NO: 20843) | |
| | 476 nt | CCCCCGCCCATTGACGTCAATAATGACGTATGTTCCCATAGTAACGCCAATAGGGACTTTCCATTGACG | 0 nt Homology 1 |
| | | TCAATGGGTGGAGTATTTACGGTAAACTGCCCACTTGGCAGTACATCAAGTGTATCATATGCCAAGTC | |
| | | CGCCCCCTATTGACGTCAATGACGGTAAATGGCCCGCCTGGCATTATGCCCAGTACATGACCTTACGG | |
| | | GACTTTCCTACTTGGCAGTACATCTACGTATTAGTCATCGCTATTACCATGGTGATGCGGTTTTGGCAG | |
| | | TACACCAATGGGCGTGGATAGCGGTTTGACTCACGGGGATTTCCAAGTCTCCACCCCATTGACGTCAA | |
| | | TGGGAGTTTGTTTTGGCACCAAAATCAACGGGACTTTCCAAAATGTCGTAATAACCCCGCCCCGTTGAC | |
| | | GCAAATGGGCGGTAGGCGTGTACGGTGGGAGGTCTATATAAGCAGAGCTCGTTTAGTGAACCGTC | |
| | | (SEQ ID NO: 20844) | |
| | 475 nt | CCCCGCCCATTGACGTCAATAATGACGTATGTTCCCATAGTAACGCCAATAGGGACTTTCCATTGACGT | 0 nt Homology 1 |
| | | CAATGGGTGGAGTATTTACGGTAAACTGCCCACTTGGCAGTACATCAAGTGTATCATATGCCAAGTCC | |
| | | GCCCCCTATTGACGTCAATGACGGTAAATGGCCCGCCTGGCATTATGCCCAGTACATGACCTTACGGG | |
| | | ACTTTCCTACTTGGCAGTACATCTACGTATTAGTCATCGCTATTACCATGGTGATGCGGTTTTGGCAGT | |
| | | ACACCAATGGGCGTGGATAGCGGTTTGACTCACGGGGATTTCCAAGTCTCCACCCCATTGACGTCAAT | |
| | | GGGAGTTTGTTTTGGCACCAAAATCAACGGGACTTTCCAAAATGTCGTAATAACCCCGCCCCGTTGAC | |
| | | GCAAATGGGCGGTAGGCGTGTACGGTGGGAGGTCTATATAAGCAGAGCTCGTTTAGTGAACCGTC | |
| | | (SEQ ID NO: 20845) | |
| | 474 nt | CCCGCCCATTGACGTCAATAATGACGTATGTTCCCATAGTAACGCCAATAGGGACTTTCCATTGACGTC | 0 nt Homology 1 |
| | | AATGGGTGGAGTATTTACGGTAAACTGCCCACTTGGCAGTACATCAAGTGTATCATATGCCAAGTCCG | |
| | | CCCCCTATTGACGTCAATGACGGTAAATGGCCCGCCTGGCATTATGCCCAGTACATGACCTTACGGGA | |
| | | CTTTCCTACTTGGCAGTACATCTACGTATTAGTCATCGCTATTACCATGGTGATGCGGTTTTGGCAGTAC | |
| | | ACCAATGGGCGTGGATAGCGGTTTGACTCACGGGGATTTCCAAGTCTCCACCCCATTGACGTCAATGG | |
| | | GAGTTTGTTTTGGCACCAAAATCAACGGGACTTTCCAAAATGTCGTAATAACCCCGCCCCGTTGACGCA | |
| | | AATGGGCGGTAGGCGTGTACGGTGGGAGGTCTATATAAGCAGAGCTCGTTTAGTGAACCGTC (SEQ | |
| | | ID NO: 20846) | |
| | 473 nt | CCGCCCATTGACGTCAATAATGACGTATGTTCCCATAGTAACGCCAATAGGGACTTTCCATTGACGTCA | 0 nt Homology 1 |
| | | ATGGGTGGAGTATTTACGGTAAACTGCCCACTTGGCAGTACATCAAGTGTATCATATGCCAAGTCCGC | |
| | | CCCCTATTGACGTCAATGACGGTAAATGGCCCGCCTGGCATTATGCCCAGTACATGACCTTACGGGAC | |
| | | TTTCCTACTTGGCAGTACATCTACGTATTAGTCATCGCTATTACCATGGTGATGCGGTTTTGGCAGTAC | |
| | | ACCAATGGGCGTGGATAGCGGTTTGACTCACGGGGATTTCCAAGTCTCCACCCCATTGACGTCAATGG | |
| | | GAGTTTGTTTTGGCACCAAAATCAACGGGACTTTCCAAAATGTCGTAATAACCCCGCCCCGTTGACGCA | |
| | | AATGGGCGGTAGGCGTGTACGGTGGGAGGTCTATATAAGCAGAGCTCGTTTAGTGAACCGTC (SEQ | |
| | | ID NO: 20847) | |
| | 472 nt | CGCCCATTGACGTCAATAATGACGTATGTTCCCATAGTAACGCCAATAGGGACTTTCCATTGACGTCAA | 0 nt Homology 1 |
| | | TGGGTGGAGTATTTACGGTAAACTGCCCACTTGGCAGTACATCAAGTGTATCATATGCCAAGTCCGCC | |
| | | CCCTATTGACGTCAATGACGGTAAATGGCCCGCCTGGCATTATGCCCAGTACATGACCTTACGGGACTT | |
| | | TCCTACTTGGCAGTACATCTACGTATTAGTCATCGCTATTACCATGGTGATGCGGTTTTGGCAGTACAC | |
| | | CAATGGGCGTGGATAGCGGTTTGACTCACGGGGATTTCCAAGTCTCCACCCCATTGACGTCAATGGGA | |
| | | GTTTGTTTTGGCACCAAAATCAACGGGACTTTCCAAAATGTCGTAATAACCCCGCCCCGTTGACGCAAA | |
| | | TGGGCGGTAGGCGTGTACGGTGGGAGGTCTATATAAGCAGAGCTCGTTTAGTGAACCGTC (SEQ ID | |
| | | NO: 20848) | |
| | 471 nt | GCCCATTGACGTCAATAATGACGTATGTTCCCATAGTAACGCCAATAGGGACTTTCCATTGACGTCAAT | 0 nt Homology 1 |
| | | GGGTGGAGTATTTACGGTAAACTGCCCACTTGGCAGTACATCAAGTGTATCATATGCCAAGTCCGCCC | |
| | | CCTATTGACGTCAATGACGGTAAATGGCCCGCCTGGCATTATGCCCAGTACATGACCTTACGGGACTTT | |
| | | CCTACTTGGCAGTACATCTACGTATTAGTCATCGCTATTACCATGGTGATGCGGTTTTGGCAGTACACC | |
| | | AATGGGCGTGGATAGCGGTTTGACTCACGGGGATTTCCAAGTCTCCACCCCATTGACGTCAATGGGAG | |
| | | TTTGTTTTGGCACCAAAATCAACGGGACTTTCCAAAATGTCGTAATAACCCCGCCCCGTTGACGCAAAT | |
| | | GGGCGGTAGGCGTGTACGGTGGGAGGTCTATATAAGCAGAGCTCGTTTAGTGAACCGTC (SEQ ID | |
| | | NO: 20849) | |
| | 470 nt | CCCATTGACGTCAATAATGACGTATGTTCCCATAGTAACGCCAATAGGGACTTTCCATTGACGTCAATG | 0 nt Homology 1 |
| | | GGTGGAGTATTTACGGTAAACTGCCCACTTGGCAGTACATCAAGTGTATCATATGCCAAGTCCGCCCC | |
| | | CTATTGACGTCAATGACGGTAAATGGCCCGCCTGGCATTATGCCCAGTACATGACCTTACGGGACTTTC | |
| | | CTACTTGGCAGTACATCTACGTATTAGTCATCGCTATTACCATGGTGATGCGGTTTTGGCAGTACACCA | |
| | | ATGGGCGTGGATAGCGGTTTGACTCACGGGGATTTCCAAGTCTCCACCCCATTGACGTCAATGGGAGT | |
| | | TTGTTTTGGCACCAAAATCAACGGGACTTTCCAAAATGTCGTAATAACCCCGCCCCGTTGACGCAAATG | |
| | | GGCGGTAGGCGTGTACGGTGGGAGGTCTATATAAGCAGAGCTCGTTTAGTGAACCGTC (SEQ ID NO: | |
| | | 20850) | |
| | 469 nt | CCATTGACGTCAATAATGACGTATGTTCCCATAGTAACGCCAATAGGGACTTTCCATTGACGTCAATGG | 0 nt Homology 1 |
| | | GTGGAGTATTTACGGTAAACTGCCCACTTGGCAGTACATCAAGTGTATCATATGCCAAGTCCGCCCCCT | |
| | | ATTGACGTCAATGACGGTAAATGGCCCGCCTGGCATTATGCCCAGTACATGACCTTACGGGACTTTCCT | |
| | | ACTTGGCAGTACATCTACGTATTAGTCATCGCTATTACCATGGTGATGCGGTTTTGGCAGTACACCAAT | |
| | | GGGCGTGGATAGCGGTTTGACTCACGGGGATTTCCAAGTCTCCACCCCATTGACGTCAATGGGAGTTT | |
| | | GTTTTGGCACCAAAATCAACGGGACTTTCCAAAATGTCGTAATAACCCCGCCCCGTTGACGCAAATGG | |
| | | GCGGTAGGCGTGTACGGTGGGAGGTCTATATAAGCAGAGCTCGTTTAGTGAACCGTC (SEQ ID NO: | |
| | | 20851) | |
| | 468 nt | CATTGACGTCAATAATGACGTATGTTCCCATAGTAACGCCAATAGGGACTTTCCATTGACGTCAATGGG | 0 nt Homology 1 |
| | | TGGAGTATTTACGGTAAACTGCCCACTTGGCAGTACATCAAGTGTATCATATGCCAAGTCCGCCCCCTA | |
| | | TTGACGTCAATGACGGTAAATGGCCCGCCTGGCATTATGCCCAGTACATGACCTTACGGGACTTTCCTA | |
| | | CTTGGCAGTACATCTACGTATTAGTCATCGCTATTACCATGGTGATGCGGTTTTGGCAGTACACCAATG | |
| | | GGCGTGGATAGCGGTTTGACTCACGGGGATTTCCAAGTCTCCACCCCATTGACGTCAATGGGAGTTTG | |
| | | TTTTGGCACCAAAATCAACGGGACTTTCCAAAATGTCGTAATAACCCCGCCCCGTTGACGCAAATGGG | |
| | | CGGTAGGCGTGTACGGTGGGAGGTCTATATAAGCAGAGCTCGTTTAGTGAACCGTC (SEQ ID NO: | |
| | | 20852) | |
| | 467 nt | ATTGACGTCAATAATGACGTATGTTCCCATAGTAACGCCAATAGGGACTTTCCATTGACGTCAATGGGT | 0 nt Homology 1 |
| | | GGAGTATTTACGGTAAACTGCCCACTTGGCAGTACATCAAGTGTATCATATGCCAAGTCCGCCCCCTAT | |
| | | TGACGTCAATGACGGTAAATGGCCCGCCTGGCATTATGCCCAGTACATGACCTTACGGGACTTTCCTAC | |
| | | TTGGCAGTACATCTACGTATTAGTCATCGCTATTACCATGGTGATGCGGTTTTGGCAGTACACCAATGG | |
| | | GCGTGGATAGCGGTTTGACTCACGGGGATTTCCAAGTCTCCACCCCATTGACGTCAATGGGAGTTTGT | |
| | | TTTGGCACCAAAATCAACGGGACTTTCCAAAATGTCGTAATAACCCCGCCCCGTTGACGCAAATGGGC | |
| | | GGTAGGCGTGTACGGTGGGAGGTCTATATAAGCAGAGCTCGTTTAGTGAACCGTC (SEQ ID NO: | |
| | | 20853) | |
| | 466 nt | TTGACGTCAATAATGACGTATGTTCCCATAGTAACGCCAATAGGGACTTTCCATTGACGTCAATGGGTG | 0 nt Homology 1 |
| | | GAGTATTTACGGTAAACTGCCCACTTGGCAGTACATCAAGTGTATCATATGCCAAGTCCGCCCCCTATT | |
| | | GACGTCAATGACGGTAAATGGCCCGCCTGGCATTATGCCCAGTACATGACCTTACGGGACTTTCCTACT | |
| | | TGGCAGTACATCTACGTATTAGTCATCGCTATTACCATGGTGATGCGGTTTTGGCAGTACACCAATGGG | |
| | | CGTGGATAGCGGTTTGACTCACGGGGATTTCCAAGTCTCCACCCCATTGACGTCAATGGGAGTTTGTTT | |
| | | TGGCACCAAAATCAACGGGACTTTCCAAAATGTCGTAATAACCCCGCCCCGTTGACGCAAATGGGCGG | |
| | | TAGGCGTGTACGGTGGGAGGTCTATATAAGCAGAGCTCGTTTAGTGAACCGTC (SEQ ID NO: 20854) | |
| | 465 nt | TGACGTCAATAATGACGTATGTTCCCATAGTAACGCCAATAGGGACTTTCCATTGACGTCAATGGGTG | 0 nt Homology 1 |
| | | GAGTATTTACGGTAAACTGCCCACTTGGCAGTACATCAAGTGTATCATATGCCAAGTCCGCCCCCTATT | |
| | | GACGTCAATGACGGTAAATGGCCCGCCTGGCATTATGCCCAGTACATGACCTTACGGGACTTTCCTACT | |
| | | TGGCAGTACATCTACGTATTAGTCATCGCTATTACCATGGTGATGCGGTTTTGGCAGTACACCAATGGG | |
| | | CGTGGATAGCGGTTTGACTCACGGGGATTTCCAAGTCTCCACCCCATTGACGTCAATGGGAGTTTGTTT | |
| | | TGGCACCAAAATCAACGGGACTTTCCAAAATGTCGTAATAACCCCGCCCCGTTGACGCAAATGGGCGG | |
| | | TAGGCGTGTACGGTGGGAGGTCTATATAAGCAGAGCTCGTTTAGTGAACCGTC (SEQ ID NO: 20855) | |
| | 464 nt | GACGTCAATAATGACGTATGTTCCCATAGTAACGCCAATAGGGACTTTCCATTGACGTCAATGGGTGG | 0 nt Homology 1 |
| | | AGTATTTACGGTAAACTGCCCACTTGGCAGTACATCAAGTGTATCATATGCCAAGTCCGCCCCCTATTG | |
| | | ACGTCAATGACGGTAAATGGCCCGCCTGGCATTATGCCCAGTACATGACCTTACGGGACTTTCCTACTT | |
| | | GGCAGTACATCTACGTATTAGTCATCGCTATTACCATGGTGATGCGGTTTTGGCAGTACACCAATGGG | |
| | | CGTGGATAGCGGTTTGACTCACGGGGATTTCCAAGTCTCCACCCCATTGACGTCAATGGGAGTTTGTTT | |
| | | TGGCACCAAAATCAACGGGACTTTCCAAAATGTCGTAATAACCCCGCCCCGTTGACGCAAATGGGCGG | |
| | | TAGGCGTGTACGGTGGGAGGTCTATATAAGCAGAGCTCGTTTAGTGAACCGTC (SEQ ID NO: 20856) | |
| | 463 nt | ACGTCAATAATGACGTATGTTCCCATAGTAACGCCAATAGGGACTTTCCATTGACGTCAATGGGTGGA | 0 nt Homology 1 |
| | | GTATTTACGGTAAACTGCCCACTTGGCAGTACATCAAGTGTATCATATGCCAAGTCCGCCCCCTATTGA | |
| | | CGTCAATGACGGTAAATGGCCCGCCTGGCATTATGCCCAGTACATGACCTTACGGGACTTTCCTACTTG | |
| | | GCAGTACATCTACGTATTAGTCATCGCTATTACCATGGTGATGCGGTTTTGGCAGTACACCAATGGGC | |
| | | GTGGATAGCGGTTTGACTCACGGGGATTTCCAAGTCTCCACCCCATTGACGTCAATGGGAGTTTGTTTT | |
| | | GGCACCAAAATCAACGGGACTTTCCAAAATGTCGTAATAACCCCGCCCCGTTGACGCAAATGGGCGGT | |
| | | AGGCGTGTACGGTGGGAGGTCTATATAAGCAGAGCTCGTTTAGTGAACCGTC (SEQ ID NO: 20857) | |
| | 462 nt | CGTCAATAATGACGTATGTTCCCATAGTAACGCCAATAGGGACTTTCCATTGACGTCAATGGGTGGAG | 0 nt Homology 1 |
| | | TATTTACGGTAAACTGCCCACTTGGCAGTACATCAAGTGTATCATATGCCAAGTCCGCCCCCTATTGAC | |
| | | GTCAATGACGGTAAATGGCCCGCCTGGCATTATGCCCAGTACATGACCTTACGGGACTTTCCTACTTGG | |
| | | CAGTACATCTACGTATTAGTCATCGCTATTACCATGGTGATGCGGTTTTGGCAGTACACCAATGGGCGT | |
| | | GGATAGCGGTTTGACTCACGGGGATTTCCAAGTCTCCACCCCATTGACGTCAATGGGAGTTTGTTTTG | |
| | | GCACCAAAATCAACGGGACTTTCCAAAATGTCGTAATAACCCCGCCCCGTTGACGCAAATGGGCGGTA | |
| | | GGCGTGTACGGTGGGAGGTCTATATAAGCAGAGCTCGTTTAGTGAACCGTC (SEQ ID NO: 20858) | |
| | 461 nt | GTCAATAATGACGTATGTTCCCATAGTAACGCCAATAGGGACTTTCCATTGACGTCAATGGGTGGAGT | 0 nt Homology 1 |
| | | ATTTACGGTAAACTGCCCACTTGGCAGTACATCAAGTGTATCATATGCCAAGTCCGCCCCCTATTGACG | |
| | | TCAATGACGGTAAATGGCCCGCCTGGCATTATGCCCAGTACATGACCTTACGGGACTTTCCTACTTGGC | |
| | | AGTACATCTACGTATTAGTCATCGCTATTACCATGGTGATGCGGTTTTGGCAGTACACCAATGGGCGTG | |
| | | GATAGCGGTTTGACTCACGGGGATTTCCAAGTCTCCACCCCATTGACGTCAATGGGAGTTTGTTTTGGC | |
| | | ACCAAAATCAACGGGACTTTCCAAAATGTCGTAATAACCCCGCCCCGTTGACGCAAATGGGCGGTAGG | |
| | | CGTGTACGGTGGGAGGTCTATATAAGCAGAGCTCGTTTAGTGAACCGTC (SEQ ID NO: 20859) | |
| | 460 nt | TCAATAATGACGTATGTTCCCATAGTAACGCCAATAGGGACTTTCCATTGACGTCAATGGGTGGAGTA | 0 nt Homology 1 |
| | | TTTACGGTAAACTGCCCACTTGGCAGTACATCAAGTGTATCATATGCCAAGTCCGCCCCCTATTGACGT | |
| | | CAATGACGGTAAATGGCCCGCCTGGCATTATGCCCAGTACATGACCTTACGGGACTTTCCTACTTGGCA | |
| | | GTACATCTACGTATTAGTCATCGCTATTACCATGGTGATGCGGTTTTGGCAGTACACCAATGGGCGTG | |
| | | GATAGCGGTTTGACTCACGGGGATTTCCAAGTCTCCACCCCATTGACGTCAATGGGAGTTTGTTTTGGC | |
| | | ACCAAAATCAACGGGACTTTCCAAAATGTCGTAATAACCCCGCCCCGTTGACGCAAATGGGGGTAGG | |
| | | CGTGTACGGTGGGAGGTCTATATAAGCAGAGCTCGTTTAGTGAACCGTC (SEQ ID NO: 20860) | |
| | 459 nt | CAATAATGACGTATGTTCCCATAGTAACGCCAATAGGGACTTTCCATTGACGTCAATGGGTGGAGTAT | 0 nt Homology 1 |
| | | TTACGGTAAACTGCCCACTTGGCAGTACATCAAGTGTATCATATGCCAAGTCCGCCCCCTATTGACGTC | |
| | | AATGACGGTAAATGGCCCGCCTGGCATTATGCCCAGTACATGACCTTACGGGACTTTCCTACTTGGCA | |
| | | GTACATCTACGTATTAGTCATCGCTATTACCATGGTGATGCGGTTTTGGCAGTACACCAATGGGCGTG | |
| | | GATAGCGGTTTGACTCACGGGGATTTCCAAGTCTCCACCCCATTGACGTCAATGGGAGTTTGTTTTGGC | |
| | | ACCAAAATCAACGGGACTTTCCAAAATGTCGTAATAACCCCGCCCCGTTGACGCAAATGGGCGGTAGG | |
| | | CGTGTACGGTGGGAGGTCTATATAAGCAGAGCTCGTTTAGTGAACCGTC (SEQ ID NO: 20861) | |
| | 458 nt | AATAATGACGTATGTTCCCATAGTAACGCCAATAGGGACTTTCCATTGACGTCAATGGGTGGAGTATTT | 0 nt Homology 1 |
| | | ACGGTAAACTGCCCACTTGGCAGTACATCAAGTGTATCATATGCCAAGTCCGCCCCCTATTGACGTCAA | |
| | | TGACGGTAAATGGCCCGCCTGGCATTATGCCCAGTACATGACCTTACGGGACTTTCCTACTTGGCAGTA | |
| | | CATCTACGTATTAGTCATCGCTATTACCATGGTGATGCGGTTTTGGCAGTACACCAATGGGCGTGGATA | |
| | | GCGGTTTGACTCACGGGGATTTCCAAGTCTCCACCCCATTGACGTCAATGGGAGTTTGTTTTGGCACCA | |
| | | AAATCAACGGGACTTTCCAAAATGTCGTAATAACCCCGCCCCGTTGACGCAAATGGGCGGTAGGCGTG | |
| | | TACGGTGGGAGGTCTATATAAGCAGAGCTCGTTTAGTGAACCGTC (SEQ ID NO: 20862) | |
| | 457 nt | ATAATGACGTATGTTCCCATAGTAACGCCAATAGGGACTTTCCATTGACGTCAATGGGTGGAGTATTTA | 0 nt Homology 1 |
| | | CGGTAAACTGCCCACTTGGCAGTACATCAAGTGTATCATATGCCAAGTCCGCCCCCTATTGACGTCAAT | |
| | | GACGGTAAATGGCCCGCCTGGCATTATGCCCAGTACATGACCTTACGGGACTTTCCTACTTGGCAGTA | |
| | | CATCTACGTATTAGTCATCGCTATTACCATGGTGATGCGGTTTTGGCAGTACACCAATGGGCGTGGATA | |
| | | GCGGTTTGACTCACGGGGATTTCCAAGTCTCCACCCCATTGACGTCAATGGGAGTTTGTTTTGGCACCA | |
| | | AAATCAACGGGACTTTCCAAAATGTCGTAATAACCCCGCCCCGTTGACGCAAATGGGCGGTAGGCGTG | |
| | | TACGGTGGGAGGTCTATATAAGCAGAGCTCGTTTAGTGAACCGTC (SEQ ID NO: 20863) | |
| | 456 nt | TAATGACGTATGTTCCCATAGTAACGCCAATAGGGACTTTCCATTGACGTCAATGGGTGGAGTATTTAC | 0 nt Homology 1 |
| | | GGTAAACTGCCCACTTGGCAGTACATCAAGTGTATCATATGCCAAGTCCGCCCCCTATTGACGTCAATG | |
| | | ACGGTAAATGGCCCGCCTGGCATTATGCCCAGTACATGACCTTACGGGACTTTCCTACTTGGCAGTACA | |
| | | TCTACGTATTAGTCATCGCTATTACCATGGTGATGCGGTTTTGGCAGTACACCAATGGGCGTGGATAG | |
| | | CGGTTTGACTCACGGGGATTTCCAAGTCTCCACCCCATTGACGTCAATGGGAGTTTGTTTTGGCACCAA | |
| | | AATCAACGGGACTTTCCAAAATGTCGTAATAACCCCGCCCCGTTGACGCAAATGGGCGGTAGGCGTGT | |
| | | ACGGTGGGAGGTCTATATAAGCAGAGCTCGTTTAGTGAACCGTC (SEQ ID NO: 20864) | |
| | 455 nt | AATGACGTATGTTCCCATAGTAACGCCAATAGGGACTTTCCATTGACGTCAATGGGTGGAGTATTTAC | 0 nt Homology 1 |
| | | GGTAAACTGCCCACTTGGCAGTACATCAAGTGTATCATATGCCAAGTCCGCCCCCTATTGACGTCAATG | |
| | | ACGGTAAATGGCCCGCCTGGCATTATGCCCAGTACATGACCTTACGGGACTTTCCTACTTGGCAGTACA | |
| | | TCTACGTATTAGTCATCGCTATTACCATGGTGATGCGGTTTTGGCAGTACACCAATGGGCGTGGATAG | |
| | | CGGTTTGACTCACGGGGATTTCCAAGTCTCCACCCCATTGACGTCAATGGGAGTTTGTTTTGGCACCAA | |
| | | AATCAACGGGACTTTCCAAAATGTCGTAATAACCCCGCCCCGTTGACGCAAATGGGCGGTAGGCGTGT | |
| | | ACGGTGGGAGGTCTATATAAGCAGAGCTCGTTTAGTGAACCGTC (SEQ ID NO: 20865) | |
| | 454 nt | ATGACGTATGTTCCCATAGTAACGCCAATAGGGACTTTCCATTGACGTCAATGGGTGGAGTATTTACG | 0 nt Homology 1 |
| | | GTAAACTGCCCACTTGGCAGTACATCAAGTGTATCATATGCCAAGTCCGCCCCCTATTGACGTCAATGA | |
| | | CGGTAAATGGCCCGCCTGGCATTATGCCCAGTACATGACCTTACGGGACTTTCCTACTTGGCAGTACAT | |
| | | CTACGTATTAGTCATCGCTATTACCATGGTGATGCGGTTTTGGCAGTACACCAATGGGCGTGGATAGC | |
| | | GGTTTGACTCACGGGGATTTCCAAGTCTCCACCCCATTGACGTCAATGGGAGTTTGTTTTGGCACCAAA | |
| | | ATCAACGGGACTTTCCAAAATGTCGTAATAACCCCGCCCCGTTGACGCAAATGGGCGGTAGGCGTGTA | |
| | | CGGTGGGAGGTCTATATAAGCAGAGCTCGTTTAGTGAACCGTC (SEQ ID NO: 20866) | |
| | 453 nt | TGACGTATGTTCCCATAGTAACGCCAATAGGGACTTTCCATTGACGTCAATGGGTGGAGTATTTACGG | 0 nt Homology 1 |
| | | TAAACTGCCCACTTGGCAGTACATCAAGTGTATCATATGCCAAGTCCGCCCCCTATTGACGTCAATGAC | |
| | | GGTAAATGGCCCGCCTGGCATTATGCCCAGTACATGACCTTACGGGACTTTCCTACTTGGCAGTACATC | |
| | | TACGTATTAGTCATCGCTATTACCATGGTGATGCGGTTTTGGCAGTACACCAATGGGCGTGGATAGCG | |
| | | GTTTGACTCACGGGGATTTCCAAGTCTCCACCCCATTGACGTCAATGGGAGTTTGTTTTGGCACCAAAA | |
| | | TCAACGGGACTTTCCAAAATGTCGTAATAACCCCGCCCCGTTGACGCAAATGGGCGGTAGGCGTGTAC | |
| | | GGTGGGAGGTCTATATAAGCAGAGCTCGTTTAGTGAACCGTC (SEQ ID NO: 20867) | |
| | 452 nt | GACGTATGTTCCCATAGTAACGCCAATAGGGACTTTCCATTGACGTCAATGGGTGGAGTATTTACGGT | 0 nt Homology 1 |
| | | AAACTGCCCACTTGGCAGTACATCAAGTGTATCATATGCCAAGTCCGCCCCCTATTGACGTCAATGACG | |
| | | GTAAATGGCCCGCCTGGCATTATGCCCAGTACATGACCTTACGGGACTTTCCTACTTGGCAGTACATCT | |
| | | ACGTATTAGTCATCGCTATTACCATGGTGATGCGGTTTTGGCAGTACACCAATGGGCGTGGATAGCGG | |
| | | TTTGACTCACGGGGATTTCCAAGTCTCCACCCCATTGACGTCAATGGGAGTTTGTTTTGGCACCAAAAT | |
| | | CAACGGGACTTTCCAAAATGTCGTAATAACCCCGCCCCGTTGACGCAAATGGGCGGTAGGCGTGTACG | |
| | | GTGGGAGGTCTATATAAGCAGAGCTCGTTTAGTGAACCGTC (SEQ ID NO: 20868) | |
| | 451 nt | ACGTATGTTCCCATAGTAACGCCAATAGGGACTTTCCATTGACGTCAATGGGTGGAGTATTTACGGTA | 0 nt Homology 1 |
| | | AACTGCCCACTTGGCAGTACATCAAGTGTATCATATGCCAAGTCCGCCCCCTATTGACGTCAATGACGG | |
| | | TAAATGGCCCGCCTGGCATTATGCCCAGTACATGACCTTACGGGACTTTCCTACTTGGCAGTACATCTA | |
| | | CGTATTAGTCATCGCTATTACCATGGTGATGCGGTTTTGGCAGTACACCAATGGGCGTGGATAGCGGT | |
| | | TTGACTCACGGGGATTTCCAAGTCTCCACCCCATTGACGTCAATGGGAGTTTGTTTTGGCACCAAAATC | |
| | | AACGGGACTTTCCAAAATGTCGTAATAACCCCGCCCCGTTGACGCAAATGGGCGGTAGGCGTGTACG | |
| | | GTGGGAGGTCTATATAAGCAGAGCTCGTTTAGTGAACCGTC (SEQ ID NO: 20869) | |
| | 450 nt | CGTATGTTCCCATAGTAACGCCAATAGGGACTTTCCATTGACGTCAATGGGTGGAGTATTTACGGTAA | 0 nt Homology 1 |
| | | ACTGCCCACTTGGCAGTACATCAAGTGTATCATATGCCAAGTCCGCCCCCTATTGACGTCAATGACGGT | |
| | | AAATGGCCCGCCTGGCATTATGCCCAGTACATGACCTTACGGGACTTTCCTACTTGGCAGTACATCTAC | |
| | | GTATTAGTCATCGCTATTACCATGGTGATGCGGTTTTGGCAGTACACCAATGGGCGTGGATAGCGGTT | |
| | | TGACTCACGGGGATTTCCAAGTCTCCACCCCATTGACGTCAATGGGAGTTTGTTTTGGCACCAAAATCA | |
| | | ACGGGACTTTCCAAAATGTCGTAATAACCCCGCCCCGTTGACGCAAATGGGCGGTAGGCGTGTACGGT | |
| | | GGGAGGTCTATATAAGCAGAGCTCGTTTAGTGAACCGTC (SEQ ID NO: 20870) | |
| | 449 nt | GTATGTTCCCATAGTAACGCCAATAGGGACTTTCCATTGACGTCAATGGGTGGAGTATTTACGGTAAA | 0 nt Homology 1 |
| | | CTGCCCACTTGGCAGTACATCAAGTGTATCATATGCCAAGTCCGCCCCCTATTGACGTCAATGACGGTA | |
| | | AATGGCCCGCCTGGCATTATGCCCAGTACATGACCTTACGGGACTTTCCTACTTGGCAGTACATCTACG | |
| | | TATTAGTCATCGCTATTACCATGGTGATGCGGTTTTGGCAGTACACCAATGGGCGTGGATAGCGGTTT | |
| | | GACTCACGGGGATTTCCAAGTCTCCACCCCATTGACGTCAATGGGAGTTTGTTTTGGCACCAAAATCAA | |
| | | CGGGACTTTCCAAAATGTCGTAATAACCCCGCCCCGTTGACGCAAATGGGGGTAGGCGTGTACGGT | |
| | | GGGAGGTCTATATAAGCAGAGCTCGTTTAGTGAACCGTC (SEQ ID NO: 20871) | |
| | 448 nt | TATGTTCCCATAGTAACGCCAATAGGGACTTTCCATTGACGTCAATGGGTGGAGTATTTACGGTAAACT | 0 nt Homology 1 |
| | | GCCCACTTGGCAGTACATCAAGTGTATCATATGCCAAGTCCGCCCCCTATTGACGTCAATGACGGTAAA | |
| | | TGGCCCGCCTGGCATTATGCCCAGTACATGACCTTACGGGACTTTCCTACTTGGCAGTACATCTACGTA | |
| | | TTAGTCATCGCTATTACCATGGTGATGCGGTTTTGGCAGTACACCAATGGGCGTGGATAGCGGTTTGA | |
| | | CTCACGGGGATTTCCAAGTCTCCACCCCATTGACGTCAATGGGAGTTTGTTTTGGCACCAAAATCAACG | |
| | | GGACTTTCCAAAATGTCGTAATAACCCCGCCCCGTTGACGCAAATGGGCGGTAGGCGTGTACGGTGG | |
| | | GAGGTCTATATAAGCAGAGCTCGTTTAGTGAACCGTC (SEQ ID NO: 20872) | |
| | 447 nt | ATGTTCCCATAGTAACGCCAATAGGGACTTTCCATTGACGTCAATGGGTGGAGTATTTACGGTAAACT | 0 nt Homology 1 |
| | | GCCCACTTGGCAGTACATCAAGTGTATCATATGCCAAGTCCGCCCCCTATTGACGTCAATGACGGTAAA | |
| | | TGGCCCGCCTGGCATTATGCCCAGTACATGACCTTACGGGACTTTCCTACTTGGCAGTACATCTACGTA | |
| | | TTAGTCATCGCTATTACCATGGTGATGCGGTTTTGGCAGTACACCAATGGGCGTGGATAGCGGTTTGA | |
| | | CTCACGGGGATTTCCAAGTCTCCACCCCATTGACGTCAATGGGAGTTTGTTTTGGCACCAAAATCAACG | |
| | | GGACTTTCCAAAATGTCGTAATAACCCCGCCCCGTTGACGCAAATGGGCGGTAGGCGTGTACGGTGG | |
| | | GAGGTCTATATAAGCAGAGCTCGTTTAGTGAACCGTC (SEQ ID NO: 20873) | |
| | 446 nt | TGTTCCCATAGTAACGCCAATAGGGACTTTCCATTGACGTCAATGGGTGGAGTATTTACGGTAAACTG | 0 nt Homology 1 |
| | | CCCACTTGGCAGTACATCAAGTGTATCATATGCCAAGTCCGCCCCCTATTGACGTCAATGACGGTAAAT | |
| | | GGCCCGCCTGGCATTATGCCCAGTACATGACCTTACGGGACTTTCCTACTTGGCAGTACATCTACGTAT | |
| | | TAGTCATCGCTATTACCATGGTGATGCGGTTTTGGCAGTACACCAATGGGCGTGGATAGCGGTTTGAC | |
| | | TCACGGGGATTTCCAAGTCTCCACCCCATTGACGTCAATGGGAGTTTGTTTTGGCACCAAAATCAACGG | |
| | | GACTTTCCAAAATGTCGTAATAACCCCGCCCCGTTGACGCAAATGGGCGGTAGGCGTGTACGGTGGG | |
| | | AGGTCTATATAAGCAGAGCTCGTTTAGTGAACCGTC (SEQ ID NO: 20874) | |
| | 445 nt | GTTCCCATAGTAACGCCAATAGGGACTTTCCATTGACGTCAATGGGTGGAGTATTTACGGTAAACTGC | 0 nt Homology 1 |
| | | CCACTTGGCAGTACATCAAGTGTATCATATGCCAAGTCCGCCCCCTATTGACGTCAATGACGGTAAATG | |
| | | GCCCGCCTGGCATTATGCCCAGTACATGACCTTACGGGACTTTCCTACTTGGCAGTACATCTACGTATT | |
| | | AGTCATCGCTATTACCATGGTGATGCGGTTTTGGCAGTACACCAATGGGCGTGGATAGCGGTTTGACT | |
| | | CACGGGGATTTCCAAGTCTCCACCCCATTGACGTCAATGGGAGTTTGTTTTGGCACCAAAATCAACGG | |
| | | GACTTTCCAAAATGTCGTAATAACCCCGCCCCGTTGACGCAAATGGGCGGTAGGCGTGTACGGTGGG | |
| | | AGGTCTATATAAGCAGAGCTCGTTTAGTGAACCGTC (SEQ ID NO: 20875) | |
| | 444 nt | TTCCCATAGTAACGCCAATAGGGACTTTCCATTGACGTCAATGGGTGGAGTATTTACGGTAAACTGCCC | 0 nt Homology 1 |
| | | ACTTGGCAGTACATCAAGTGTATCATATGCCAAGTCCGCCCCCTATTGACGTCAATGACGGTAAATGG | |
| | | CCCGCCTGGCATTATGCCCAGTACATGACCTTACGGGACTTTCCTACTTGGCAGTACATCTACGTATTA | |
| | | GTCATCGCTATTACCATGGTGATGCGGTTTTGGCAGTACACCAATGGGCGTGGATAGCGGTTTGACTC | |
| | | ACGGGGATTTCCAAGTCTCCACCCCATTGACGTCAATGGGAGTTTGTTTTGGCACCAAAATCAACGGG | |
| | | ACTTTCCAAAATGTCGTAATAACCCCGCCCCGTTGACGCAAATGGGCGGTAGGCGTGTACGGTGGGA | |
| | | GGTCTATATAAGCAGAGCTCGTTTAGTGAACCGTC (SEQ ID NO: 20876) | |
| | 443 nt | TCCCATAGTAACGCCAATAGGGACTTTCCATTGACGTCAATGGGTGGAGTATTTACGGTAAACTGCCC | 0 nt Homology 1 |
| | | ACTTGGCAGTACATCAAGTGTATCATATGCCAAGTCCGCCCCCTATTGACGTCAATGACGGTAAATGG | |
| | | CCCGCCTGGCATTATGCCCAGTACATGACCTTACGGGACTTTCCTACTTGGCAGTACATCTACGTATTA | |
| | | GTCATCGCTATTACCATGGTGATGCGGTTTTGGCAGTACACCAATGGGCGTGGATAGCGGTTTGACTC | |
| | | ACGGGGATTTCCAAGTCTCCACCCCATTGACGTCAATGGGAGTTTGTTTTGGCACCAAAATCAACGGG | |
| | | ACTTTCCAAAATGTCGTAATAACCCCGCCCCGTTGACGCAAATGGGCGGTAGGCGTGTACGGTGGGA | |
| | | GGTCTATATAAGCAGAGCTCGTTTAGTGAACCGTC (SEQ ID NO: 20877) | |
| | 442 nt | CCCATAGTAACGCCAATAGGGACTTTCCATTGACGTCAATGGGTGGAGTATTTACGGTAAACTGCCCA | 0 nt Homology 1 |
| | | CTTGGCAGTACATCAAGTGTATCATATGCCAAGTCCGCCCCCTATTGACGTCAATGACGGTAAATGGCC | |
| | | CGCCTGGCATTATGCCCAGTACATGACCTTACGGGACTTTCCTACTTGGCAGTACATCTACGTATTAGT | |
| | | CATCGCTATTACCATGGTGATGCGGTTTTGGCAGTACACCAATGGGCGTGGATAGCGGTTTGACTCAC | |
| | | GGGGATTTCCAAGTCTCCACCCCATTGACGTCAATGGGAGTTTGTTTTGGCACCAAAATCAACGGGAC | |
| | | TTTCCAAAATGTCGTAATAACCCCGCCCCGTTGACGCAAATGGGCGGTAGGCGTGTACGGTGGGAGG | |
| | | TCTATATAAGCAGAGCTCGTTTAGTGAACCGTC (SEQ ID NO: 20878) | |
| | 441 nt | CCATAGTAACGCCAATAGGGACTTTCCATTGACGTCAATGGGTGGAGTATTTACGGTAAACTGCCCAC | 0 nt Homology 1 |
| | | TTGGCAGTACATCAAGTGTATCATATGCCAAGTCCGCCCCCTATTGACGTCAATGACGGTAAATGGCCC | |
| | | GCCTGGCATTATGCCCAGTACATGACCTTACGGGACTTTCCTACTTGGCAGTACATCTACGTATTAGTC | |
| | | ATCGCTATTACCATGGTGATGCGGTTTTGGCAGTACACCAATGGGCGTGGATAGCGGTTTGACTCACG | |
| | | GGGATTTCCAAGTCTCCACCCCATTGACGTCAATGGGAGTTTGTTTTGGCACCAAAATCAACGGGACTT | |
| | | TCCAAAATGTCGTAATAACCCCGCCCCGTTGACGCAAATGGGCGGTAGGCGTGTACGGTGGGAGGTC | |
| | | TATATAAGCAGAGCTCGTTTAGTGAACCGTC (SEQ ID NO: 20879) | |
| | 440 nt | CATAGTAACGCCAATAGGGACTTTCCATTGACGTCAATGGGTGGAGTATTTACGGTAAACTGCCCACT | 0 nt Homology 1 |
| | | TGGCAGTACATCAAGTGTATCATATGCCAAGTCCGCCCCCTATTGACGTCAATGACGGTAAATGGCCC | |
| | | GCCTGGCATTATGCCCAGTACATGACCTTACGGGACTTTCCTACTTGGCAGTACATCTACGTATTAGTC | |
| | | ATCGCTATTACCATGGTGATGCGGTTTTGGCAGTACACCAATGGGCGTGGATAGCGGTTTGACTCACG | |
| | | GGGATTTCCAAGTCTCCACCCCATTGACGTCAATGGGAGTTTGTTTTGGCACCAAAATCAACGGGACTT | |
| | | TCCAAAATGTCGTAATAACCCCGCCCCGTTGACGCAAATGGGCGGTAGGCGTGTACGGTGGGAGGTC | |
| | | TATATAAGCAGAGCTCGTTTAGTGAACCGTC (SEQ ID NO: 20880) | |
| | 439 nt | ATAGTAACGCCAATAGGGACTTTCCATTGACGTCAATGGGTGGAGTATTTACGGTAAACTGCCCACTT | 0 nt Homology 1 |
| | | GGCAGTACATCAAGTGTATCATATGCCAAGTCCGCCCCCTATTGACGTCAATGACGGTAAATGGCCCG | |
| | | CCTGGCATTATGCCCAGTACATGACCTTACGGGACTTTCCTACTTGGCAGTACATCTACGTATTAGTCAT | |
| | | CGCTATTACCATGGTGATGCGGTTTTGGCAGTACACCAATGGGCGTGGATAGCGGTTTGACTCACGGG | |
| | | GATTTCCAAGTCTCCACCCCATTGACGTCAATGGGAGTTTGTTTTGGCACCAAAATCAACGGGACTTTC | |
| | | CAAAATGTCGTAATAACCCCGCCCCGTTGACGCAAATGGGCGGTAGGCGTGTACGGTGGGAGGTCTA | |
| | | TATAAGCAGAGCTCGTTTAGTGAACCGTC (SEQ ID NO: 20881) | |
| | 438 nt | TAGTAACGCCAATAGGGACTTTCCATTGACGTCAATGGGTGGAGTATTTACGGTAAACTGCCCACTTG | 0 nt Homology 1 |
| | | GCAGTACATCAAGTGTATCATATGCCAAGTCCGCCCCCTATTGACGTCAATGACGGTAAATGGCCCGC | |
| | | CTGGCATTATGCCCAGTACATGACCTTACGGGACTTTCCTACTTGGCAGTACATCTACGTATTAGTCATC | |
| | | GCTATTACCATGGTGATGCGGTTTTGGCAGTACACCAATGGGCGTGGATAGCGGTTTGACTCACGGG | |
| | | GATTTCCAAGTCTCCACCCCATTGACGTCAATGGGAGTTTGTTTTGGCACCAAAATCAACGGGACTTTC | |
| | | CAAAATGTCGTAATAACCCCGCCCCGTTGACGCAAATGGGCGGTAGGCGTGTACGGTGGGAGGTCTA | |
| | | TATAAGCAGAGCTCGTTTAGTGAACCGTC (SEQ ID NO: 20882) | |
| | 437 nt | AGTAACGCCAATAGGGACTTTCCATTGACGTCAATGGGTGGAGTATTTACGGTAAACTGCCCACTTGG | 0 nt Homology 1 |
| | | CAGTACATCAAGTGTATCATATGCCAAGTCCGCCCCCTATTGACGTCAATGACGGTAAATGGCCCGCCT | |
| | | GGCATTATGCCCAGTACATGACCTTACGGGACTTTCCTACTTGGCAGTACATCTACGTATTAGTCATCG | |
| | | CTATTACCATGGTGATGCGGTTTTGGCAGTACACCAATGGGCGTGGATAGCGGTTTGACTCACGGGGA | |
| | | TTTCCAAGTCTCCACCCCATTGACGTCAATGGGAGTTTGTTTTGGCACCAAAATCAACGGGACTTTCCA | |
| | | AAATGTCGTAATAACCCCGCCCCGTTGACGCAAATGGGCGGTAGGCGTGTACGGTGGGAGGTCTATA | |
| | | TAAGCAGAGCTCGTTTAGTGAACCGTC (SEQ ID NO: 20883) | |
| | 436 nt | GTAACGCCAATAGGGACTTTCCATTGACGTCAATGGGTGGAGTATTTACGGTAAACTGCCCACTTGGC | 0 nt Homology 1 |
| | | AGTACATCAAGTGTATCATATGCCAAGTCCGCCCCCTATTGACGTCAATGACGGTAAATGGCCCGCCT | |
| | | GGCATTATGCCCAGTACATGACCTTACGGGACTTTCCTACTTGGCAGTACATCTACGTATTAGTCATCG | |
| | | CTATTACCATGGTGATGCGGTTTTGGCAGTACACCAATGGGCGTGGATAGCGGTTTGACTCACGGGGA | |
| | | TTTCCAAGTCTCCACCCCATTGACGTCAATGGGAGTTTGTTTTGGCACCAAAATCAACGGGACTTTCCA | |
| | | AAATGTCGTAATAACCCCGCCCCGTTGACGCAAATGGGCGGTAGGCGTGTACGGTGGGAGGTCTATA | |
| | | TAAGCAGAGCTCGTTTAGTGAACCGTC (SEQ ID NO: 20884) | |
| | 435 nt | TAACGCCAATAGGGACTTTCCATTGACGTCAATGGGTGGAGTATTTACGGTAAACTGCCCACTTGGCA | 0 nt Homology 1 |
| | | GTACATCAAGTGTATCATATGCCAAGTCCGCCCCCTATTGACGTCAATGACGGTAAATGGCCCGCCTG | |
| | | GCATTATGCCCAGTACATGACCTTACGGGACTTTCCTACTTGGCAGTACATCTACGTATTAGTCATCGCT | |
| | | ATTACCATGGTGATGCGGTTTTGGCAGTACACCAATGGGCGTGGATAGCGGTTTGACTCACGGGGATT | |
| | | TCCAAGTCTCCACCCCATTGACGTCAATGGGAGTTTGTTTTGGCACCAAAATCAACGGGACTTTCCAAA | |
| | | ATGTCGTAATAACCCCGCCCCGTTGACGCAAATGGGCGGTAGGCGTGTACGGTGGGAGGTCTATATA | |
| | | AGCAGAGCTCGTTTAGTGAACCGTC (SEQ ID NO: 20885) | |
| | 434 nt | AACGCCAATAGGGACTTTCCATTGACGTCAATGGGTGGAGTATTTACGGTAAACTGCCCACTTGGCAG | 0 nt Homology 1 |
| | | TACATCAAGTGTATCATATGCCAAGTCCGCCCCCTATTGACGTCAATGACGGTAAATGGCCCGCCTGGC | |
| | | ATTATGCCCAGTACATGACCTTACGGGACTTTCCTACTTGGCAGTACATCTACGTATTAGTCATCGCTAT | |
| | | TACCATGGTGATGCGGTTTTGGCAGTACACCAATGGGCGTGGATAGCGGTTTGACTCACGGGGATTTC | |
| | | CAAGTCTCCACCCCATTGACGTCAATGGGAGTTTGTTTTGGCACCAAAATCAACGGGACTTTCCAAAAT | |
| | | GTCGTAATAACCCCGCCCCGTTGACGCAAATGGGCGGTAGGCGTGTACGGTGGGAGGTCTATATAAG | |
| | | CAGAGCTCGTTTAGTGAACCGTC (SEQ ID NO: 20886) | |
| | 433 nt | ACGCCAATAGGGACTTTCCATTGACGTCAATGGGTGGAGTATTTACGGTAAACTGCCCACTTGGCAGT | 0 nt Homology 1 |
| | | ACATCAAGTGTATCATATGCCAAGTCCGCCCCCTATTGACGTCAATGACGGTAAATGGCCCGCCTGGC | |
| | | ATTATGCCCAGTACATGACCTTACGGGACTTTCCTACTTGGCAGTACATCTACGTATTAGTCATCGCTAT | |
| | | TACCATGGTGATGCGGTTTTGGCAGTACACCAATGGGCGTGGATAGCGGTTTGACTCACGGGGATTTC | |
| | | CAAGTCTCCACCCCATTGACGTCAATGGGAGTTTGTTTTGGCACCAAAATCAACGGGACTTTCCAAAAT | |
| | | GTCGTAATAACCCCGCCCCGTTGACGCAAATGGGCGGTAGGCGTGTACGGTGGGAGGTCTATATAAG | |
| | | CAGAGCTCGTTTAGTGAACCGTC (SEQ ID NO: 20887) | |
| | 432 nt | CGCCAATAGGGACTTTCCATTGACGTCAATGGGTGGAGTATTTACGGTAAACTGCCCACTTGGCAGTA | 0 nt Homology 1 |
| | | CATCAAGTGTATCATATGCCAAGTCCGCCCCCTATTGACGTCAATGACGGTAAATGGCCCGCCTGGCAT | |
| | | TATGCCCAGTACATGACCTTACGGGACTTTCCTACTTGGCAGTACATCTACGTATTAGTCATCGCTATTA | |
| | | CCATGGTGATGCGGTTTTGGCAGTACACCAATGGGCGTGGATAGCGGTTTGACTCACGGGGATTTCCA | |
| | | AGTCTCCACCCCATTGACGTCAATGGGAGTTTGTTTTGGCACCAAAATCAACGGGACTTTCCAAAATGT | |
| | | CGTAATAACCCCGCCCCGTTGACGCAAATGGGCGGTAGGCGTGTACGGTGGGAGGTCTATATAAGCA | |
| | | GAGCTCGTTTAGTGAACCGTC (SEQ ID NO: 20888) | |
| | 431 nt | GCCAATAGGGACTTTCCATTGACGTCAATGGGTGGAGTATTTACGGTAAACTGCCCACTTGGCAGTAC | 0 nt Homology 1 |
| | | ATCAAGTGTATCATATGCCAAGTCCGCCCCCTATTGACGTCAATGACGGTAAATGGCCCGCCTGGCATT | |
| | | ATGCCCAGTACATGACCTTACGGGACTTTCCTACTTGGCAGTACATCTACGTATTAGTCATCGCTATTAC | |
| | | CATGGTGATGCGGTTTTGGCAGTACACCAATGGGCGTGGATAGCGGTTTGACTCACGGGGATTTCCAA | |
| | | GTCTCCACCCCATTGACGTCAATGGGAGTTTGTTTTGGCACCAAAATCAACGGGACTTTCCAAAATGTC | |
| | | GTAATAACCCCGCCCCGTTGACGCAAATGGGCGGTAGGCGTGTACGGTGGGAGGTCTATATAAGCAG | |
| | | AGCTCGTTTAGTGAACCGTC (SEQ ID NO: 20889) | |
| | 430 nt | CCAATAGGGACTTTCCATTGACGTCAATGGGTGGAGTATTTACGGTAAACTGCCCACTTGGCAGTACA | 0 nt Homology 1 |
| | | TCAAGTGTATCATATGCCAAGTCCGCCCCCTATTGACGTCAATGACGGTAAATGGCCCGCCTGGCATTA | |
| | | TGCCCAGTACATGACCTTACGGGACTTTCCTACTTGGCAGTACATCTACGTATTAGTCATCGCTATTACC | |
| | | ATGGTGATGCGGTTTTGGCAGTACACCAATGGGCGTGGATAGCGGTTTGACTCACGGGGATTTCCAA | |
| | | GTCTCCACCCCATTGACGTCAATGGGAGTTTGTTTTGGCACCAAAATCAACGGGACTTTCCAAAATGTC | |
| | | GTAATAACCCCGCCCCGTTGACGCAAATGGGCGGTAGGCGTGTACGGTGGGAGGTCTATATAAGCAG | |
| | | AGCTCGTTTAGTGAACCGTC (SEQ ID NO: 20890) | |
| | 429 nt | CAATAGGGACTTTCCATTGACGTCAATGGGTGGAGTATTTACGGTAAACTGCCCACTTGGCAGTACAT | 0 nt Homology 1 |
| | | CAAGTGTATCATATGCCAAGTCCGCCCCCTATTGACGTCAATGACGGTAAATGGCCCGCCTGGCATTAT | |
| | | GCCCAGTACATGACCTTACGGGACTTTCCTACTTGGCAGTACATCTACGTATTAGTCATCGCTATTACCA | |
| | | TGGTGATGCGGTTTTGGCAGTACACCAATGGGCGTGGATAGCGGTTTGACTCACGGGGATTTCCAAG | |
| | | TCTCCACCCCATTGACGTCAATGGGAGTTTGTTTTGGCACCAAAATCAACGGGACTTTCCAAAATGTCG | |
| | | TAATAACCCCGCCCCGTTGACGCAAATGGGCGGTAGGCGTGTACGGTGGGAGGTCTATATAAGCAGA | |
| | | GCTCGTTTAGTGAACCGTC (SEQ ID NO: 20891) | |
| | 428 nt | AATAGGGACTTTCCATTGACGTCAATGGGTGGAGTATTTACGGTAAACTGCCCACTTGGCAGTACATC | 0 nt Homology 1 |
| | | AAGTGTATCATATGCCAAGTCCGCCCCCTATTGACGTCAATGACGGTAAATGGCCCGCCTGGCATTAT | |
| | | GCCCAGTACATGACCTTACGGGACTTTCCTACTTGGCAGTACATCTACGTATTAGTCATCGCTATTACCA | |
| | | TGGTGATGCGGTTTTGGCAGTACACCAATGGGCGTGGATAGCGGTTTGACTCACGGGGATTTCCAAG | |
| | | TCTCCACCCCATTGACGTCAATGGGAGTTTGTTTTGGCACCAAAATCAACGGGACTTTCCAAAATGTCG | |
| | | TAATAACCCCGCCCCGTTGACGCAAATGGGCGGTAGGCGTGTACGGTGGGAGGTCTATATAAGCAGA | |
| | | GCTCGTTTAGTGAACCGTC (SEQ ID NO: 20892) | |
| | 427 nt | ATAGGGACTTTCCATTGACGTCAATGGGTGGAGTATTTACGGTAAACTGCCCACTTGGCAGTACATCA | 0 nt Homology 1 |
| | | AGTGTATCATATGCCAAGTCCGCCCCCTATTGACGTCAATGACGGTAAATGGCCCGCCTGGCATTATGC | |
| | | CCAGTACATGACCTTACGGGACTTTCCTACTTGGCAGTACATCTACGTATTAGTCATCGCTATTACCATG | |
| | | GTGATGCGGTTTTGGCAGTACACCAATGGGCGTGGATAGCGGTTTGACTCACGGGGATTTCCAAGTCT | |
| | | CCACCCCATTGACGTCAATGGGAGTTTGTTTTGGCACCAAAATCAACGGGACTTTCCAAAATGTCGTAA | |
| | | TAACCCCGCCCCGTTGACGCAAATGGGCGGTAGGCGTGTACGGTGGGAGGTCTATATAAGCAGAGCT | |
| | | CGTTTAGTGAACCGTC (SEQ ID NO: 20893) | |
| | 426 nt | TAGGGACTTTCCATTGACGTCAATGGGTGGAGTATTTACGGTAAACTGCCCACTTGGCAGTACATCAA | 0 nt Homology 1 |
| | | GTGTATCATATGCCAAGTCCGCCCCCTATTGACGTCAATGACGGTAAATGGCCCGCCTGGCATTATGCC | |
| | | CAGTACATGACCTTACGGGACTTTCCTACTTGGCAGTACATCTACGTATTAGTCATCGCTATTACCATG | |
| | | GTGATGCGGTTTTGGCAGTACACCAATGGGCGTGGATAGCGGTTTGACTCACGGGGATTTCCAAGTCT | |
| | | CCACCCCATTGACGTCAATGGGAGTTTGTTTTGGCACCAAAATCAACGGGACTTTCCAAAATGTCGTAA | |
| | | TAACCCCGCCCCGTTGACGCAAATGGGCGGTAGGCGTGTACGGTGGGAGGTCTATATAAGCAGAGCT | |
| | | CGTTTAGTGAACCGTC (SEQ ID NO: 20894) | |
| | 425 nt | AGGGACTTTCCATTGACGTCAATGGGTGGAGTATTTACGGTAAACTGCCCACTTGGCAGTACATCAAG | 0 nt Homology 1 |
| | | TGTATCATATGCCAAGTCCGCCCCCTATTGACGTCAATGACGGTAAATGGCCCGCCTGGCATTATGCCC | |
| | | AGTACATGACCTTACGGGACTTTCCTACTTGGCAGTACATCTACGTATTAGTCATCGCTATTACCATGGT | |
| | | GATGCGGTTTTGGCAGTACACCAATGGGCGTGGATAGCGGTTTGACTCACGGGGATTTCCAAGTCTCC | |
| | | ACCCCATTGACGTCAATGGGAGTTTGTTTTGGCACCAAAATCAACGGGACTTTCCAAAATGTCGTAATA | |
| | | ACCCCGCCCCGTTGACGCAAATGGGCGGTAGGCGTGTACGGTGGGAGGTCTATATAAGCAGAGCTCG | |
| | | TTTAGTGAACCGTC (SEQ ID NO: 20895) | |
| | 424 nt | GGGACTTTCCATTGACGTCAATGGGTGGAGTATTTACGGTAAACTGCCCACTTGGCAGTACATCAAGT | 0 nt Homology 1 |
| | | GTATCATATGCCAAGTCCGCCCCCTATTGACGTCAATGACGGTAAATGGCCCGCCTGGCATTATGCCCA | |
| | | GTACATGACCTTACGGGACTTTCCTACTTGGCAGTACATCTACGTATTAGTCATCGCTATTACCATGGT | |
| | | GATGCGGTTTTGGCAGTACACCAATGGGCGTGGATAGCGGTTTGACTCACGGGGATTTCCAAGTCTCC | |
| | | ACCCCATTGACGTCAATGGGAGTTTGTTTTGGCACCAAAATCAACGGGACTTTCCAAAATGTCGTAATA | |
| | | ACCCCGCCCCGTTGACGCAAATGGGCGGTAGGCGTGTACGGTGGGAGGTCTATATAAGCAGAGCTCG | |
| | | TTTAGTGAACCGTC (SEQ ID NO: 20896) | |
| | 423 nt | GGACTTTCCATTGACGTCAATGGGTGGAGTATTTACGGTAAACTGCCCACTTGGCAGTACATCAAGTG | 0 nt Homology 1 |
| | | TATCATATGCCAAGTCCGCCCCCTATTGACGTCAATGACGGTAAATGGCCCGCCTGGCATTATGCCCAG | |
| | | TACATGACCTTACGGGACTTTCCTACTTGGCAGTACATCTACGTATTAGTCATCGCTATTACCATGGTGA | |
| | | TGCGGTTTTGGCAGTACACCAATGGGCGTGGATAGCGGTTTGACTCACGGGGATTTCCAAGTCTCCAC | |
| | | CCCATTGACGTCAATGGGAGTTTGTTTTGGCACCAAAATCAACGGGACTTTCCAAAATGTCGTAATAAC | |
| | | CCCGCCCCGTTGACGCAAATGGGCGGTAGGCGTGTACGGTGGGAGGTCTATATAAGCAGAGCTCGTT | |
| | | TAGTGAACCGTC (SEQ ID NO: 20897) | |
| | 422 nt | GACTTTCCATTGACGTCAATGGGTGGAGTATTTACGGTAAACTGCCCACTTGGCAGTACATCAAGTGT | 0 nt Homology 1 |
| | | ATCATATGCCAAGTCCGCCCCCTATTGACGTCAATGACGGTAAATGGCCCGCCTGGCATTATGCCCAGT | |
| | | ACATGACCTTACGGGACTTTCCTACTTGGCAGTACATCTACGTATTAGTCATCGCTATTACCATGGTGAT | |
| | | GCGGTTTTGGCAGTACACCAATGGGCGTGGATAGCGGTTTGACTCACGGGGATTTCCAAGTCTCCACC | |
| | | CCATTGACGTCAATGGGAGTTTGTTTTGGCACCAAAATCAACGGGACTTTCCAAAATGTCGTAATAACC | |
| | | CCGCCCCGTTGACGCAAATGGGCGGTAGGCGTGTACGGTGGGAGGTCTATATAAGCAGAGCTCGTTT | |
| | | AGTGAACCGTC (SEQ ID NO: 20898) | |
| | 421 nt | ACTTTCCATTGACGTCAATGGGTGGAGTATTTACGGTAAACTGCCCACTTGGCAGTACATCAAGTGTAT | 0 nt Homology 1 |
| | | CATATGCCAAGTCCGCCCCCTATTGACGTCAATGACGGTAAATGGCCCGCCTGGCATTATGCCCAGTAC | |
| | | ATGACCTTACGGGACTTTCCTACTTGGCAGTACATCTACGTATTAGTCATCGCTATTACCATGGTGATG | |
| | | CGGTTTTGGCAGTACACCAATGGGCGTGGATAGCGGTTTGACTCACGGGGATTTCCAAGTCTCCACCC | |
| | | CATTGACGTCAATGGGAGTTTGTTTTGGCACCAAAATCAACGGGACTTTCCAAAATGTCGTAATAACCC | |
| | | CGCCCCGTTGACGCAAATGGGCGGTAGGCGTGTACGGTGGGAGGTCTATATAAGCAGAGCTCGTTTA | |
| | | GTGAACCGTC (SEQ ID NO: 20899) | |
| | 420 nt | CTTTCCATTGACGTCAATGGGTGGAGTATTTACGGTAAACTGCCCACTTGGCAGTACATCAAGTGTATC | 0 nt Homology 1 |
| | | ATATGCCAAGTCCGCCCCCTATTGACGTCAATGACGGTAAATGGCCCGCCTGGCATTATGCCCAGTAC | |
| | | ATGACCTTACGGGACTTTCCTACTTGGCAGTACATCTACGTATTAGTCATCGCTATTACCATGGTGATG | |
| | | CGGTTTTGGCAGTACACCAATGGGCGTGGATAGCGGTTTGACTCACGGGGATTTCCAAGTCTCCACCC | |
| | | CATTGACGTCAATGGGAGTTTGTTTTGGCACCAAAATCAACGGGACTTTCCAAAATGTCGTAATAACCC | |
| | | CGCCCCGTTGACGCAAATGGGCGGTAGGCGTGTACGGTGGGAGGTCTATATAAGCAGAGCTCGTTTA | |
| | | GTGAACCGTC (SEQ ID NO: 20900) | |
| | 419 nt | TTTCCATTGACGTCAATGGGTGGAGTATTTACGGTAAACTGCCCACTTGGCAGTACATCAAGTGTATCA | 0 nt Homology 1 |
| | | TATGCCAAGTCCGCCCCCTATTGACGTCAATGACGGTAAATGGCCCGCCTGGCATTATGCCCAGTACAT | |
| | | GACCTTACGGGACTTTCCTACTTGGCAGTACATCTACGTATTAGTCATCGCTATTACCATGGTGATGCG | |
| | | GTTTTGGCAGTACACCAATGGGCGTGGATAGCGGTTTGACTCACGGGGATTTCCAAGTCTCCACCCCA | |
| | | TTGACGTCAATGGGAGTTTGTTTTGGCACCAAAATCAACGGGACTTTCCAAAATGTCGTAATAACCCCG | |
| | | CCCCGTTGACGCAAATGGGCGGTAGGCGTGTACGGTGGGAGGTCTATATAAGCAGAGCTCGTTTAGT | |
| | | GAACCGTC (SEQ ID NO: 20901) | |
| | 418 nt | TTCCATTGACGTCAATGGGTGGAGTATTTACGGTAAACTGCCCACTTGGCAGTACATCAAGTGTATCAT | 0 nt Homology 1 |
| | | ATGCCAAGTCCGCCCCCTATTGACGTCAATGACGGTAAATGGCCCGCCTGGCATTATGCCCAGTACAT | |
| | | GACCTTACGGGACTTTCCTACTTGGCAGTACATCTACGTATTAGTCATCGCTATTACCATGGTGATGCG | |
| | | GTTTTGGCAGTACACCAATGGGCGTGGATAGCGGTTTGACTCACGGGGATTTCCAAGTCTCCACCCCA | |
| | | TTGACGTCAATGGGAGTTTGTTTTGGCACCAAAATCAACGGGACTTTCCAAAATGTCGTAATAACCCCG | |
| | | CCCCGTTGACGCAAATGGGCGGTAGGCGTGTACGGTGGGAGGTCTATATAAGCAGAGCTCGTTTAGT | |
| | | GAACCGTC (SEQ ID NO: 20902) | |
| | 417 nt | TCCATTGACGTCAATGGGTGGAGTATTTACGGTAAACTGCCCACTTGGCAGTACATCAAGTGTATCATA | 0 nt Homology 1 |
| | | TGCCAAGTCCGCCCCCTATTGACGTCAATGACGGTAAATGGCCCGCCTGGCATTATGCCCAGTACATG | |
| | | ACCTTACGGGACTTTCCTACTTGGCAGTACATCTACGTATTAGTCATCGCTATTACCATGGTGATGCGG | |
| | | TTTTGGCAGTACACCAATGGGCGTGGATAGCGGTTTGACTCACGGGGATTTCCAAGTCTCCACCCCATT | |
| | | GACGTCAATGGGAGTTTGTTTTGGCACCAAAATCAACGGGACTTTCCAAAATGTCGTAATAACCCCGC | |
| | | CCCGTTGACGCAAATGGGCGGTAGGCGTGTACGGTGGGAGGTCTATATAAGCAGAGCTCGTTTAGTG | |
| | | AACCGTC (SEQ ID NO: 20903) | |
| | 416 nt | CCATTGACGTCAATGGGTGGAGTATTTACGGTAAACTGCCCACTTGGCAGTACATCAAGTGTATCATAT | 0 nt Homology 1 |
| | | GCCAAGTCCGCCCCCTATTGACGTCAATGACGGTAAATGGCCCGCCTGGCATTATGCCCAGTACATGA | |
| | | CCTTACGGGACTTTCCTACTTGGCAGTACATCTACGTATTAGTCATCGCTATTACCATGGTGATGCGGT | |
| | | TTTGGCAGTACACCAATGGGCGTGGATAGCGGTTTGACTCACGGGGATTTCCAAGTCTCCACCCCATT | |
| | | GACGTCAATGGGAGTTTGTTTTGGCACCAAAATCAACGGGACTTTCCAAAATGTCGTAATAACCCCGC | |
| | | CCCGTTGACGCAAATGGGCGGTAGGCGTGTACGGTGGGAGGTCTATATAAGCAGAGCTCGTTTAGTG | |
| | | AACCGTC (SEQ ID NO: 20904) | |
| | 415 nt | CATTGACGTCAATGGGTGGAGTATTTACGGTAAACTGCCCACTTGGCAGTACATCAAGTGTATCATAT | 0 nt Homology 1 |
| | | GCCAAGTCCGCCCCCTATTGACGTCAATGACGGTAAATGGCCCGCCTGGCATTATGCCCAGTACATGA | |
| | | CCTTACGGGACTTTCCTACTTGGCAGTACATCTACGTATTAGTCATCGCTATTACCATGGTGATGCGGT | |
| | | TTTGGCAGTACACCAATGGGCGTGGATAGCGGTTTGACTCACGGGGATTTCCAAGTCTCCACCCCATT | |
| | | GACGTCAATGGGAGTTTGTTTTGGCACCAAAATCAACGGGACTTTCCAAAATGTCGTAATAACCCCGC | |
| | | CCCGTTGACGCAAATGGGCGGTAGGCGTGTACGGTGGGAGGTCTATATAAGCAGAGCTCGTTTAGTG | |
| | | AACCGTC (SEQ ID NO: 20905) | |
| | 414 nt | ATTGACGTCAATGGGTGGAGTATTTACGGTAAACTGCCCACTTGGCAGTACATCAAGTGTATCATATG | 0 nt Homology 1 |
| | | CCAAGTCCGCCCCCTATTGACGTCAATGACGGTAAATGGCCCGCCTGGCATTATGCCCAGTACATGAC | |
| | | CTTACGGGACTTTCCTACTTGGCAGTACATCTACGTATTAGTCATCGCTATTACCATGGTGATGCGGTTT | |
| | | TGGCAGTACACCAATGGGCGTGGATAGCGGTTTGACTCACGGGGATTTCCAAGTCTCCACCCCATTGA | |
| | | CGTCAATGGGAGTTTGTTTTGGCACCAAAATCAACGGGACTTTCCAAAATGTCGTAATAACCCCGCCCC | |
| | | GTTGACGCAAATGGGCGGTAGGCGTGTACGGTGGGAGGTCTATATAAGCAGAGCTCGTTTAGTGAAC | |
| | | CGTC (SEQ ID NO: 20906) | |
| | 413 nt | TTGACGTCAATGGGTGGAGTATTTACGGTAAACTGCCCACTTGGCAGTACATCAAGTGTATCATATGC | 0 nt Homology 1 |
| | | CAAGTCCGCCCCCTATTGACGTCAATGACGGTAAATGGCCCGCCTGGCATTATGCCCAGTACATGACCT | |
| | | TACGGGACTTTCCTACTTGGCAGTACATCTACGTATTAGTCATCGCTATTACCATGGTGATGCGGTTTT | |
| | | GGCAGTACACCAATGGGCGTGGATAGCGGTTTGACTCACGGGGATTTCCAAGTCTCCACCCCATTGAC | |
| | | GTCAATGGGAGTTTGTTTTGGCACCAAAATCAACGGGACTTTCCAAAATGTCGTAATAACCCCGCCCC | |
| | | GTTGACGCAAATGGGCGGTAGGCGTGTACGGTGGGAGGTCTATATAAGCAGAGCTCGTTTAGTGAAC | |
| | | CGTC (SEQ ID NO: 20907) | |
| | 412 nt | TGACGTCAATGGGTGGAGTATTTACGGTAAACTGCCCACTTGGCAGTACATCAAGTGTATCATATGCC | 0 nt Homology 1 |
| | | AAGTCCGCCCCCTATTGACGTCAATGACGGTAAATGGCCCGCCTGGCATTATGCCCAGTACATGACCTT | |
| | | ACGGGACTTTCCTACTTGGCAGTACATCTACGTATTAGTCATCGCTATTACCATGGTGATGCGGTTTTG | |
| | | GCAGTACACCAATGGGCGTGGATAGCGGTTTGACTCACGGGGATTTCCAAGTCTCCACCCCATTGACG | |
| | | TCAATGGGAGTTTGTTTTGGCACCAAAATCAACGGGACTTTCCAAAATGTCGTAATAACCCCGCCCCGT | |
| | | TGACGCAAATGGGCGGTAGGCGTGTACGGTGGGAGGTCTATATAAGCAGAGCTCGTTTAGTGAACCG | |
| | | TC (SEQ ID NO: 20908) | |
| | 411 nt | GACGTCAATGGGTGGAGTATTTACGGTAAACTGCCCACTTGGCAGTACATCAAGTGTATCATATGCCA | 0 nt Homology 1 |
| | | AGTCCGCCCCCTATTGACGTCAATGACGGTAAATGGCCCGCCTGGCATTATGCCCAGTACATGACCTTA | |
| | | CGGGACTTTCCTACTTGGCAGTACATCTACGTATTAGTCATCGCTATTACCATGGTGATGCGGTTTTGG | |
| | | CAGTACACCAATGGGCGTGGATAGCGGTTTGACTCACGGGGATTTCCAAGTCTCCACCCCATTGACGT | |
| | | CAATGGGAGTTTGTTTTGGCACCAAAATCAACGGGACTTTCCAAAATGTCGTAATAACCCCGCCCCGTT | |
| | | GACGCAAATGGGCGGTAGGCGTGTACGGTGGGAGGTCTATATAAGCAGAGCTCGTTTAGTGAACCGT | |
| | | C (SEQ ID NO: 20909) | |
| | 410 nt | ACGTCAATGGGTGGAGTATTTACGGTAAACTGCCCACTTGGCAGTACATCAAGTGTATCATATGCCAA | 0 nt Homology 1 |
| | | GTCCGCCCCCTATTGACGTCAATGACGGTAAATGGCCCGCCTGGCATTATGCCCAGTACATGACCTTAC | |
| | | GGGACTTTCCTACTTGGCAGTACATCTACGTATTAGTCATCGCTATTACCATGGTGATGCGGTTTTGGC | |
| | | AGTACACCAATGGGCGTGGATAGCGGTTTGACTCACGGGGATTTCCAAGTCTCCACCCCATTGACGTC | |
| | | AATGGGAGTTTGTTTTGGCACCAAAATCAACGGGACTTTCCAAAATGTCGTAATAACCCCGCCCCGTTG | |
| | | ACGCAAATGGGCGGTAGGCGTGTACGGTGGGAGGTCTATATAAGCAGAGCTCGTTTAGTGAACCGTC | |
| | | (SEQ ID NO: 20910) | |
| | 409 nt | CGTCAATGGGTGGAGTATTTACGGTAAACTGCCCACTTGGCAGTACATCAAGTGTATCATATGCCAAG | 0 nt Homology 1 |
| | | TCCGCCCCCTATTGACGTCAATGACGGTAAATGGCCCGCCTGGCATTATGCCCAGTACATGACCTTACG | |
| | | GGACTTTCCTACTTGGCAGTACATCTACGTATTAGTCATCGCTATTACCATGGTGATGCGGTTTTGGCA | |
| | | GTACACCAATGGGCGTGGATAGCGGTTTGACTCACGGGGATTTCCAAGTCTCCACCCCATTGACGTCA | |
| | | ATGGGAGTTTGTTTTGGCACCAAAATCAACGGGACTTTCCAAAATGTCGTAATAACCCCGCCCCGTTGA | |
| | | CGCAAATGGGCGGTAGGCGTGTACGGTGGGAGGTCTATATAAGCAGAGCTCGTTTAGTGAACCGTC | |
| | | (SEQ ID NO: 20911) | |
| | 408 nt | GTCAATGGGTGGAGTATTTACGGTAAACTGCCCACTTGGCAGTACATCAAGTGTATCATATGCCAAGT | 0 nt Homology 1 |
| | | CCGCCCCCTATTGACGTCAATGACGGTAAATGGCCCGCCTGGCATTATGCCCAGTACATGACCTTACG | |
| | | GGACTTTCCTACTTGGCAGTACATCTACGTATTAGTCATCGCTATTACCATGGTGATGCGGTTTTGGCA | |
| | | GTACACCAATGGGCGTGGATAGCGGTTTGACTCACGGGGATTTCCAAGTCTCCACCCCATTGACGTCA | |
| | | ATGGGAGTTTGTTTTGGCACCAAAATCAACGGGACTTTCCAAAATGTCGTAATAACCCCGCCCCGTTGA | |
| | | CGCAAATGGGCGGTAGGCGTGTACGGTGGGAGGTCTATATAAGCAGAGCTCGTTTAGTGAACCGTC | |
| | | (SEQ ID NO: 20912) | |
| | 407 nt | TCAATGGGTGGAGTATTTACGGTAAACTGCCCACTTGGCAGTACATCAAGTGTATCATATGCCAAGTC | 0 nt Homology 1 |
| | | CGCCCCCTATTGACGTCAATGACGGTAAATGGCCCGCCTGGCATTATGCCCAGTACATGACCTTACGG | |
| | | GACTTTCCTACTTGGCAGTACATCTACGTATTAGTCATCGCTATTACCATGGTGATGCGGTTTTGGCAG | |
| | | TACACCAATGGGCGTGGATAGCGGTTTGACTCACGGGGATTTCCAAGTCTCCACCCCATTGACGTCAA | |
| | | TGGGAGTTTGTTTTGGCACCAAAATCAACGGGACTTTCCAAAATGTCGTAATAACCCCGCCCCGTTGAC | |
| | | GCAAATGGGCGGTAGGCGTGTACGGTGGGAGGTCTATATAAGCAGAGCTCGTTTAGTGAACCGTC | |
| | | (SEQ ID NO: 20913) | |
| | 406 nt | CAATGGGTGGAGTATTTACGGTAAACTGCCCACTTGGCAGTACATCAAGTGTATCATATGCCAAGTCC | 0 nt Homology 1 |
| | | GCCCCCTATTGACGTCAATGACGGTAAATGGCCCGCCTGGCATTATGCCCAGTACATGACCTTACGGG | |
| | | ACTTTCCTACTTGGCAGTACATCTACGTATTAGTCATCGCTATTACCATGGTGATGCGGTTTTGGCAGT | |
| | | ACACCAATGGGCGTGGATAGCGGTTTGACTCACGGGGATTTCCAAGTCTCCACCCCATTGACGTCAAT | |
| | | GGGAGTTTGTTTTGGCACCAAAATCAACGGGACTTTCCAAAATGTCGTAATAACCCCGCCCCGTTGAC | |
| | | GCAAATGGGCGGTAGGCGTGTACGGTGGGAGGTCTATATAAGCAGAGCTCGTTTAGTGAACCGTC | |
| | | (SEQ ID NO: 20914) | |
| | 405 nt | AATGGGTGGAGTATTTACGGTAAACTGCCCACTTGGCAGTACATCAAGTGTATCATATGCCAAGTCCG | 0 nt Homology 1 |
| | | CCCCCTATTGACGTCAATGACGGTAAATGGCCCGCCTGGCATTATGCCCAGTACATGACCTTACGGGA | |
| | | CTTTCCTACTTGGCAGTACATCTACGTATTAGTCATCGCTATTACCATGGTGATGCGGTTTTGGCAGTAC | |
| | | ACCAATGGGCGTGGATAGCGGTTTGACTCACGGGGATTTCCAAGTCTCCACCCCATTGACGTCAATGG | |
| | | GAGTTTGTTTTGGCACCAAAATCAACGGGACTTTCCAAAATGTCGTAATAACCCCGCCCCGTTGACGCA | |
| | | AATGGGCGGTAGGCGTGTACGGTGGGAGGTCTATATAAGCAGAGCTCGTTTAGTGAACCGTC (SEQ | |
| | | ID NO: 20915) | |
| | 404 nt | ATGGGTGGAGTATTTACGGTAAACTGCCCACTTGGCAGTACATCAAGTGTATCATATGCCAAGTCCGC | 0 nt Homology 1 |
| | | CCCCTATTGACGTCAATGACGGTAAATGGCCCGCCTGGCATTATGCCCAGTACATGACCTTACGGGAC | |
| | | TTTCCTACTTGGCAGTACATCTACGTATTAGTCATCGCTATTACCATGGTGATGCGGTTTTGGCAGTAC | |
| | | ACCAATGGGCGTGGATAGCGGTTTGACTCACGGGGATTTCCAAGTCTCCACCCCATTGACGTCAATGG | |
| | | GAGTTTGTTTTGGCACCAAAATCAACGGGACTTTCCAAAATGTCGTAATAACCCCGCCCCGTTGACGCA | |
| | | AATGGGCGGTAGGCGTGTACGGTGGGAGGTCTATATAAGCAGAGCTCGTTTAGTGAACCGTC (SEQ | |
| | | ID NO: 20916) | |
| | 403 nt | TGGGTGGAGTATTTACGGTAAACTGCCCACTTGGCAGTACATCAAGTGTATCATATGCCAAGTCCGCC | 0 nt Homology 1 |
| | | CCCTATTGACGTCAATGACGGTAAATGGCCCGCCTGGCATTATGCCCAGTACATGACCTTACGGGACTT | |
| | | TCCTACTTGGCAGTACATCTACGTATTAGTCATCGCTATTACCATGGTGATGCGGTTTTGGCAGTACAC | |
| | | CAATGGGCGTGGATAGCGGTTTGACTCACGGGGATTTCCAAGTCTCCACCCCATTGACGTCAATGGGA | |
| | | GTTTGTTTTGGCACCAAAATCAACGGGACTTTCCAAAATGTCGTAATAACCCCGCCCCGTTGACGCAAA | |
| | | TGGGCGGTAGGCGTGTACGGTGGGAGGTCTATATAAGCAGAGCTCGTTTAGTGAACCGTC (SEQ ID | |
| | | NO: 20917) | |
| | 402 nt | GGGTGGAGTATTTACGGTAAACTGCCCACTTGGCAGTACATCAAGTGTATCATATGCCAAGTCCGCCC | 0 nt Homology 1 |
| | | CCTATTGACGTCAATGACGGTAAATGGCCCGCCTGGCATTATGCCCAGTACATGACCTTACGGGACTTT | |
| | | CCTACTTGGCAGTACATCTACGTATTAGTCATCGCTATTACCATGGTGATGCGGTTTTGGCAGTACACC | |
| | | AATGGGCGTGGATAGCGGTTTGACTCACGGGGATTTCCAAGTCTCCACCCCATTGACGTCAATGGGAG | |
| | | TTTGTTTTGGCACCAAAATCAACGGGACTTTCCAAAATGTCGTAATAACCCCGCCCCGTTGACGCAAAT | |
| | | GGGCGGTAGGCGTGTACGGTGGGAGGTCTATATAAGCAGAGCTCGTTTAGTGAACCGTC (SEQ ID | |
| | | NO: 20918) | |
| | 401 nt | GGTGGAGTATTTACGGTAAACTGCCCACTTGGCAGTACATCAAGTGTATCATATGCCAAGTCCGCCCC | 0 nt Homology 1 |
| | | CTATTGACGTCAATGACGGTAAATGGCCCGCCTGGCATTATGCCCAGTACATGACCTTACGGGACTTTC | |
| | | CTACTTGGCAGTACATCTACGTATTAGTCATCGCTATTACCATGGTGATGCGGTTTTGGCAGTACACCA | |
| | | ATGGGCGTGGATAGCGGTTTGACTCACGGGGATTTCCAAGTCTCCACCCCATTGACGTCAATGGGAGT | |
| | | TTGTTTTGGCACCAAAATCAACGGGACTTTCCAAAATGTCGTAATAACCCCGCCCCGTTGACGCAAATG | |
| | | GGCGGTAGGCGTGTACGGTGGGAGGTCTATATAAGCAGAGCTCGTTTAGTGAACCGTC (SEQ ID NO: | |
| | | 20919) | |
| | 400 nt | GTGGAGTATTTACGGTAAACTGCCCACTTGGCAGTACATCAAGTGTATCATATGCCAAGTCCGCCCCCT | 0 nt Homology 1 |
| | | ATTGACGTCAATGACGGTAAATGGCCCGCCTGGCATTATGCCCAGTACATGACCTTACGGGACTTTCCT | |
| | | ACTTGGCAGTACATCTACGTATTAGTCATCGCTATTACCATGGTGATGCGGTTTTGGCAGTACACCAAT | |
| | | GGGCGTGGATAGCGGTTTGACTCACGGGGATTTCCAAGTCTCCACCCCATTGACGTCAATGGGAGTTT | |
| | | GTTTTGGCACCAAAATCAACGGGACTTTCCAAAATGTCGTAATAACCCCGCCCCGTTGACGCAAATGG | |
| | | GCGGTAGGCGTGTACGGTGGGAGGTCTATATAAGCAGAGCTCGTTTAGTGAACCGTC (SEQ ID NO: | |
| | | 20920) | |
| | 399 nt | TGGAGTATTTACGGTAAACTGCCCACTTGGCAGTACATCAAGTGTATCATATGCCAAGTCCGCCCCCTA | 0 nt Homology 1 |
| | | TTGACGTCAATGACGGTAAATGGCCCGCCTGGCATTATGCCCAGTACATGACCTTACGGGACTTTCCTA | |
| | | CTTGGCAGTACATCTACGTATTAGTCATCGCTATTACCATGGTGATGCGGTTTTGGCAGTACACCAATG | |
| | | GGCGTGGATAGCGGTTTGACTCACGGGGATTTCCAAGTCTCCACCCCATTGACGTCAATGGGAGTTTG | |
| | | TTTTGGCACCAAAATCAACGGGACTTTCCAAAATGTCGTAATAACCCCGCCCCGTTGACGCAAATGGG | |
| | | CGGTAGGCGTGTACGGTGGGAGGTCTATATAAGCAGAGCTCGTTTAGTGAACCGTC (SEQ ID NO: | |
| | | 20921) | |
| | 398 nt | GGAGTATTTACGGTAAACTGCCCACTTGGCAGTACATCAAGTGTATCATATGCCAAGTCCGCCCCCTAT | 0 nt Homology 1 |
| | | TGACGTCAATGACGGTAAATGGCCCGCCTGGCATTATGCCCAGTACATGACCTTACGGGACTTTCCTAC | |
| | | TTGGCAGTACATCTACGTATTAGTCATCGCTATTACCATGGTGATGCGGTTTTGGCAGTACACCAATGG | |
| | | GCGTGGATAGCGGTTTGACTCACGGGGATTTCCAAGTCTCCACCCCATTGACGTCAATGGGAGTTTGT | |
| | | TTTGGCACCAAAATCAACGGGACTTTCCAAAATGTCGTAATAACCCCGCCCCGTTGACGCAAATGGGC | |
| | | GGTAGGCGTGTACGGTGGGAGGTCTATATAAGCAGAGCTCGTTTAGTGAACCGTC (SEQ ID NO: | |
| | | 20922) | |
| | 397 nt | GAGTATTTACGGTAAACTGCCCACTTGGCAGTACATCAAGTGTATCATATGCCAAGTCCGCCCCCTATT | 0 nt Homology 1 |
| | | GACGTCAATGACGGTAAATGGCCCGCCTGGCATTATGCCCAGTACATGACCTTACGGGACTTTCCTACT | |
| | | TGGCAGTACATCTACGTATTAGTCATCGCTATTACCATGGTGATGCGGTTTTGGCAGTACACCAATGGG | |
| | | CGTGGATAGCGGTTTGACTCACGGGGATTTCCAAGTCTCCACCCCATTGACGTCAATGGGAGTTTGTTT | |
| | | TGGCACCAAAATCAACGGGACTTTCCAAAATGTCGTAATAACCCCGCCCCGTTGACGCAAATGGGCGG | |
| | | TAGGCGTGTACGGTGGGAGGTCTATATAAGCAGAGCTCGTTTAGTGAACCGTC (SEQ ID NO: 20923) | |
| | 396 nt | AGTATTTACGGTAAACTGCCCACTTGGCAGTACATCAAGTGTATCATATGCCAAGTCCGCCCCCTATTG | 0 nt Homology 1 |
| | | ACGTCAATGACGGTAAATGGCCCGCCTGGCATTATGCCCAGTACATGACCTTACGGGACTTTCCTACTT | |
| | | GGCAGTACATCTACGTATTAGTCATCGCTATTACCATGGTGATGCGGTTTTGGCAGTACACCAATGGG | |
| | | CGTGGATAGCGGTTTGACTCACGGGGATTTCCAAGTCTCCACCCCATTGACGTCAATGGGAGTTTGTTT | |
| | | TGGCACCAAAATCAACGGGACTTTCCAAAATGTCGTAATAACCCCGCCCCGTTGACGCAAATGGGCGG | |
| | | TAGGCGTGTACGGTGGGAGGTCTATATAAGCAGAGCTCGTTTAGTGAACCGTC (SEQ ID NO: 20924) | |
| | 395 nt | GTATTTACGGTAAACTGCCCACTTGGCAGTACATCAAGTGTATCATATGCCAAGTCCGCCCCCTATTGA | 0 nt Homology 1 |
| | | CGTCAATGACGGTAAATGGCCCGCCTGGCATTATGCCCAGTACATGACCTTACGGGACTTTCCTACTTG | |
| | | GCAGTACATCTACGTATTAGTCATCGCTATTACCATGGTGATGCGGTTTTGGCAGTACACCAATGGGC | |
| | | GTGGATAGCGGTTTGACTCACGGGGATTTCCAAGTCTCCACCCCATTGACGTCAATGGGAGTTTGTTTT | |
| | | GGCACCAAAATCAACGGGACTTTCCAAAATGTCGTAATAACCCCGCCCCGTTGACGCAAATGGGCGGT | |
| | | AGGCGTGTACGGTGGGAGGTCTATATAAGCAGAGCTCGTTTAGTGAACCGTC (SEQ ID NO: 20925) | |
| | 394 nt | TATTTACGGTAAACTGCCCACTTGGCAGTACATCAAGTGTATCATATGCCAAGTCCGCCCCCTATTGAC | 0 nt Homology 1 |
| | | GTCAATGACGGTAAATGGCCCGCCTGGCATTATGCCCAGTACATGACCTTACGGGACTTTCCTACTTGG | |
| | | CAGTACATCTACGTATTAGTCATCGCTATTACCATGGTGATGCGGTTTTGGCAGTACACCAATGGGCGT | |
| | | GGATAGCGGTTTGACTCACGGGGATTTCCAAGTCTCCACCCCATTGACGTCAATGGGAGTTTGTTTTG | |
| | | GCACCAAAATCAACGGGACTTTCCAAAATGTCGTAATAACCCCGCCCCGTTGACGCAAATGGGCGGTA | |
| | | GGCGTGTACGGTGGGAGGTCTATATAAGCAGAGCTCGTTTAGTGAACCGTC (SEQ ID NO: 20926) | |
| | 393 nt | ATTTACGGTAAACTGCCCACTTGGCAGTACATCAAGTGTATCATATGCCAAGTCCGCCCCCTATTGACG | 0 nt Homology 1 |
| | | TCAATGACGGTAAATGGCCCGCCTGGCATTATGCCCAGTACATGACCTTACGGGACTTTCCTACTTGGC | |
| | | AGTACATCTACGTATTAGTCATCGCTATTACCATGGTGATGCGGTTTTGGCAGTACACCAATGGGCGTG | |
| | | GATAGCGGTTTGACTCACGGGGATTTCCAAGTCTCCACCCCATTGACGTCAATGGGAGTTTGTTTTGGC | |
| | | ACCAAAATCAACGGGACTTTCCAAAATGTCGTAATAACCCCGCCCCGTTGACGCAAATGGGCGGTAGG | |
| | | CGTGTACGGTGGGAGGTCTATATAAGCAGAGCTCGTTTAGTGAACCGTC (SEQ ID NO: 20927) | |
| | 392 nt | TTTACGGTAAACTGCCCACTTGGCAGTACATCAAGTGTATCATATGCCAAGTCCGCCCCCTATTGACGT | 0 nt Homology 1 |
| | | CAATGACGGTAAATGGCCCGCCTGGCATTATGCCCAGTACATGACCTTACGGGACTTTCCTACTTGGCA | |
| | | GTACATCTACGTATTAGTCATCGCTATTACCATGGTGATGCGGTTTTGGCAGTACACCAATGGGCGTG | |
| | | GATAGCGGTTTGACTCACGGGGATTTCCAAGTCTCCACCCCATTGACGTCAATGGGAGTTTGTTTTGGC | |
| | | ACCAAAATCAACGGGACTTTCCAAAATGTCGTAATAACCCCGCCCCGTTGACGCAAATGGGCGGTAGG | |
| | | CGTGTACGGTGGGAGGTCTATATAAGCAGAGCTCGTTTAGTGAACCGTC (SEQ ID NO: 20928) | |
| | 391 nt | TTACGGTAAACTGCCCACTTGGCAGTACATCAAGTGTATCATATGCCAAGTCCGCCCCCTATTGACGTC | 0 nt Homology 1 |
| | | AATGACGGTAAATGGCCCGCCTGGCATTATGCCCAGTACATGACCTTACGGGACTTTCCTACTTGGCA | |
| | | GTACATCTACGTATTAGTCATCGCTATTACCATGGTGATGCGGTTTTGGCAGTACACCAATGGGCGTG | |
| | | GATAGCGGTTTGACTCACGGGGATTTCCAAGTCTCCACCCCATTGACGTCAATGGGAGTTTGTTTTGGC | |
| | | ACCAAAATCAACGGGACTTTCCAAAATGTCGTAATAACCCCGCCCCGTTGACGCAAATGGGCGGTAGG | |
| | | CGTGTACGGTGGGAGGTCTATATAAGCAGAGCTCGTTTAGTGAACCGTC (SEQ ID NO: 20929) | |
| | 390 nt | TACGGTAAACTGCCCACTTGGCAGTACATCAAGTGTATCATATGCCAAGTCCGCCCCCTATTGACGTCA | 0 nt Homology 1 |
| | | ATGACGGTAAATGGCCCGCCTGGCATTATGCCCAGTACATGACCTTACGGGACTTTCCTACTTGGCAGT | |
| | | ACATCTACGTATTAGTCATCGCTATTACCATGGTGATGCGGTTTTGGCAGTACACCAATGGGCGTGGAT | |
| | | AGCGGTTTGACTCACGGGGATTTCCAAGTCTCCACCCCATTGACGTCAATGGGAGTTTGTTTTGGCACC | |
| | | AAAATCAACGGGACTTTCCAAAATGTCGTAATAACCCCGCCCCGTTGACGCAAATGGGCGGTAGGCGT | |
| | | GTACGGTGGGAGGTCTATATAAGCAGAGCTCGTTTAGTGAACCGTC (SEQ ID NO: 20930) | |
| | 389 nt | ACGGTAAACTGCCCACTTGGCAGTACATCAAGTGTATCATATGCCAAGTCCGCCCCCTATTGACGTCAA | 0 nt Homology 1 |
| | | TGACGGTAAATGGCCCGCCTGGCATTATGCCCAGTACATGACCTTACGGGACTTTCCTACTTGGCAGTA | |
| | | CATCTACGTATTAGTCATCGCTATTACCATGGTGATGCGGTTTTGGCAGTACACCAATGGGCGTGGATA | |
| | | GCGGTTTGACTCACGGGGATTTCCAAGTCTCCACCCCATTGACGTCAATGGGAGTTTGTTTTGGCACCA | |
| | | AAATCAACGGGACTTTCCAAAATGTCGTAATAACCCCGCCCCGTTGACGCAAATGGGCGGTAGGCGTG | |
| | | TACGGTGGGAGGTCTATATAAGCAGAGCTCGTTTAGTGAACCGTC (SEQ ID NO: 20931) | |
| | 388 nt | CGGTAAACTGCCCACTTGGCAGTACATCAAGTGTATCATATGCCAAGTCCGCCCCCTATTGACGTCAAT | 0 nt Homology 1 |
| | | GACGGTAAATGGCCCGCCTGGCATTATGCCCAGTACATGACCTTACGGGACTTTCCTACTTGGCAGTA | |
| | | CATCTACGTATTAGTCATCGCTATTACCATGGTGATGCGGTTTTGGCAGTACACCAATGGGCGTGGATA | |
| | | GCGGTTTGACTCACGGGGATTTCCAAGTCTCCACCCCATTGACGTCAATGGGAGTTTGTTTTGGCACCA | |
| | | AAATCAACGGGACTTTCCAAAATGTCGTAATAACCCCGCCCCGTTGACGCAAATGGGCGGTAGGCGTG | |
| | | TACGGTGGGAGGTCTATATAAGCAGAGCTCGTTTAGTGAACCGTC (SEQ ID NO: 20932) | |
| | 387 nt | GGTAAACTGCCCACTTGGCAGTACATCAAGTGTATCATATGCCAAGTCCGCCCCCTATTGACGTCAATG | 0 nt Homology 1 |
| | | ACGGTAAATGGCCCGCCTGGCATTATGCCCAGTACATGACCTTACGGGACTTTCCTACTTGGCAGTACA | |
| | | TCTACGTATTAGTCATCGCTATTACCATGGTGATGCGGTTTTGGCAGTACACCAATGGGCGTGGATAG | |
| | | CGGTTTGACTCACGGGGATTTCCAAGTCTCCACCCCATTGACGTCAATGGGAGTTTGTTTTGGCACCAA | |
| | | AATCAACGGGACTTTCCAAAATGTCGTAATAACCCCGCCCCGTTGACGCAAATGGGCGGTAGGCGTGT | |
| | | ACGGTGGGAGGTCTATATAAGCAGAGCTCGTTTAGTGAACCGTC (SEQ ID NO: 20933) | |
| | 386 nt | GTAAACTGCCCACTTGGCAGTACATCAAGTGTATCATATGCCAAGTCCGCCCCCTATTGACGTCAATGA | 0 nt Homology 1 |
| | | CGGTAAATGGCCCGCCTGGCATTATGCCCAGTACATGACCTTACGGGACTTTCCTACTTGGCAGTACAT | |
| | | CTACGTATTAGTCATCGCTATTACCATGGTGATGCGGTTTTGGCAGTACACCAATGGGCGTGGATAGC | |
| | | GGTTTGACTCACGGGGATTTCCAAGTCTCCACCCCATTGACGTCAATGGGAGTTTGTTTTGGCACCAAA | |
| | | ATCAACGGGACTTTCCAAAATGTCGTAATAACCCCGCCCCGTTGACGCAAATGGGCGGTAGGCGTGTA | |
| | | CGGTGGGAGGTCTATATAAGCAGAGCTCGTTTAGTGAACCGTC (SEQ ID NO: 20934) | |
| | 385 nt | TAAACTGCCCACTTGGCAGTACATCAAGTGTATCATATGCCAAGTCCGCCCCCTATTGACGTCAATGAC | 0 nt Homology 1 |
| | | GGTAAATGGCCCGCCTGGCATTATGCCCAGTACATGACCTTACGGGACTTTCCTACTTGGCAGTACATC | |
| | | TACGTATTAGTCATCGCTATTACCATGGTGATGCGGTTTTGGCAGTACACCAATGGGCGTGGATAGCG | |
| | | GTTTGACTCACGGGGATTTCCAAGTCTCCACCCCATTGACGTCAATGGGAGTTTGTTTTGGCACCAAAA | |
| | | TCAACGGGACTTTCCAAAATGTCGTAATAACCCCGCCCCGTTGACGCAAATGGGCGGTAGGCGTGTAC | |
| | | GGTGGGAGGTCTATATAAGCAGAGCTCGTTTAGTGAACCGTC (SEQ ID NO: 20935) | |
| | 384 nt | AAACTGCCCACTTGGCAGTACATCAAGTGTATCATATGCCAAGTCCGCCCCCTATTGACGTCAATGACG | 0 nt Homology 1 |
| | | GTAAATGGCCCGCCTGGCATTATGCCCAGTACATGACCTTACGGGACTTTCCTACTTGGCAGTACATCT | |
| | | ACGTATTAGTCATCGCTATTACCATGGTGATGCGGTTTTGGCAGTACACCAATGGGCGTGGATAGCGG | |
| | | TTTGACTCACGGGGATTTCCAAGTCTCCACCCCATTGACGTCAATGGGAGTTTGTTTTGGCACCAAAAT | |
| | | CAACGGGACTTTCCAAAATGTCGTAATAACCCCGCCCCGTTGACGCAAATGGGCGGTAGGCGTGTACG | |
| | | GTGGGAGGTCTATATAAGCAGAGCTCGTTTAGTGAACCGTC (SEQ ID NO: 20936) | |
| | 383 nt | AACTGCCCACTTGGCAGTACATCAAGTGTATCATATGCCAAGTCCGCCCCCTATTGACGTCAATGACGG | 0 nt Homology 1 |
| | | TAAATGGCCCGCCTGGCATTATGCCCAGTACATGACCTTACGGGACTTTCCTACTTGGCAGTACATCTA | |
| | | CGTATTAGTCATCGCTATTACCATGGTGATGCGGTTTTGGCAGTACACCAATGGGCGTGGATAGCGGT | |
| | | TTGACTCACGGGGATTTCCAAGTCTCCACCCCATTGACGTCAATGGGAGTTTGTTTTGGCACCAAAATC | |
| | | AACGGGACTTTCCAAAATGTCGTAATAACCCCGCCCCGTTGACGCAAATGGGCGGTAGGCGTGTACG | |
| | | GTGGGAGGTCTATATAAGCAGAGCTCGTTTAGTGAACCGTC (SEQ ID NO: 20937) | |
| | 382 nt | ACTGCCCACTTGGCAGTACATCAAGTGTATCATATGCCAAGTCCGCCCCCTATTGACGTCAATGACGGT | 0 nt Homology 1 |
| | | AAATGGCCCGCCTGGCATTATGCCCAGTACATGACCTTACGGGACTTTCCTACTTGGCAGTACATCTAC | |
| | | GTATTAGTCATCGCTATTACCATGGTGATGCGGTTTTGGCAGTACACCAATGGGCGTGGATAGCGGTT | |
| | | TGACTCACGGGGATTTCCAAGTCTCCACCCCATTGACGTCAATGGGAGTTTGTTTTGGCACCAAAATCA | |
| | | ACGGGACTTTCCAAAATGTCGTAATAACCCCGCCCCGTTGACGCAAATGGGCGGTAGGCGTGTACGGT | |
| | | GGGAGGTCTATATAAGCAGAGCTCGTTTAGTGAACCGTC (SEQ ID NO: 20938) | |
| | 381 nt | CTGCCCACTTGGCAGTACATCAAGTGTATCATATGCCAAGTCCGCCCCCTATTGACGTCAATGACGGTA | 0 nt Homology 1 |
| | | AATGGCCCGCCTGGCATTATGCCCAGTACATGACCTTACGGGACTTTCCTACTTGGCAGTACATCTACG | |
| | | TATTAGTCATCGCTATTACCATGGTGATGCGGTTTTGGCAGTACACCAATGGGCGTGGATAGCGGTTT | |
| | | GACTCACGGGGATTTCCAAGTCTCCACCCCATTGACGTCAATGGGAGTTTGTTTTGGCACCAAAATCAA | |
| | | CGGGACTTTCCAAAATGTCGTAATAACCCCGCCCCGTTGACGCAAATGGGCGGTAGGCGTGTACGGT | |
| | | GGGAGGTCTATATAAGCAGAGCTCGTTTAGTGAACCGTC (SEQ ID NO: 20939) | |
| | 380 nt | TGCCCACTTGGCAGTACATCAAGTGTATCATATGCCAAGTCCGCCCCCTATTGACGTCAATGACGGTAA | 0 nt Homology 1 |
| | | ATGGCCCGCCTGGCATTATGCCCAGTACATGACCTTACGGGACTTTCCTACTTGGCAGTACATCTACGT | |
| | | ATTAGTCATCGCTATTACCATGGTGATGCGGTTTTGGCAGTACACCAATGGGCGTGGATAGCGGTTTG | |
| | | ACTCACGGGGATTTCCAAGTCTCCACCCCATTGACGTCAATGGGAGTTTGTTTTGGCACCAAAATCAAC | |
| | | GGGACTTTCCAAAATGTCGTAATAACCCCGCCCCGTTGACGCAAATGGGCGGTAGGCGTGTACGGTG | |
| | | GGAGGTCTATATAAGCAGAGCTCGTTTAGTGAACCGTC (SEQ ID NO: 20940) | |
| | 379 nt | GCCCACTTGGCAGTACATCAAGTGTATCATATGCCAAGTCCGCCCCCTATTGACGTCAATGACGGTAAA | 0 nt Homology 1 |
| | | TGGCCCGCCTGGCATTATGCCCAGTACATGACCTTACGGGACTTTCCTACTTGGCAGTACATCTACGTA | |
| | | TTAGTCATCGCTATTACCATGGTGATGCGGTTTTGGCAGTACACCAATGGGCGTGGATAGCGGTTTGA | |
| | | CTCACGGGGATTTCCAAGTCTCCACCCCATTGACGTCAATGGGAGTTTGTTTTGGCACCAAAATCAACG | |
| | | GGACTTTCCAAAATGTCGTAATAACCCCGCCCCGTTGACGCAAATGGGCGGTAGGCGTGTACGGTGG | |
| | | GAGGTCTATATAAGCAGAGCTCGTTTAGTGAACCGTC (SEQ ID NO: 20941) | |
| | 378 nt | CCCACTTGGCAGTACATCAAGTGTATCATATGCCAAGTCCGCCCCCTATTGACGTCAATGACGGTAAAT | 0 nt Homology 1 |
| | | GGCCCGCCTGGCATTATGCCCAGTACATGACCTTACGGGACTTTCCTACTTGGCAGTACATCTACGTAT | |
| | | TAGTCATCGCTATTACCATGGTGATGCGGTTTTGGCAGTACACCAATGGGCGTGGATAGCGGTTTGAC | |
| | | TCACGGGGATTTCCAAGTCTCCACCCCATTGACGTCAATGGGAGTTTGTTTTGGCACCAAAATCAACGG | |
| | | GACTTTCCAAAATGTCGTAATAACCCCGCCCCGTTGACGCAAATGGGCGGTAGGCGTGTACGGTGGG | |
| | | AGGTCTATATAAGCAGAGCTCGTTTAGTGAACCGTC (SEQ ID NO: 20942) | |
| | 377 nt | CCACTTGGCAGTACATCAAGTGTATCATATGCCAAGTCCGCCCCCTATTGACGTCAATGACGGTAAATG | 0 nt Homology 1 |
| | | GCCCGCCTGGCATTATGCCCAGTACATGACCTTACGGGACTTTCCTACTTGGCAGTACATCTACGTATT | |
| | | AGTCATCGCTATTACCATGGTGATGCGGTTTTGGCAGTACACCAATGGGCGTGGATAGCGGTTTGACT | |
| | | CACGGGGATTTCCAAGTCTCCACCCCATTGACGTCAATGGGAGTTTGTTTTGGCACCAAAATCAACGG | |
| | | GACTTTCCAAAATGTCGTAATAACCCCGCCCCGTTGACGCAAATGGGCGGTAGGCGTGTACGGTGGG | |
| | | AGGTCTATATAAGCAGAGCTCGTTTAGTGAACCGTC (SEQ ID NO: 20943) | |
| | 376 nt | CACTTGGCAGTACATCAAGTGTATCATATGCCAAGTCCGCCCCCTATTGACGTCAATGACGGTAAATG | 0 nt Homology 1 |
| | | GCCCGCCTGGCATTATGCCCAGTACATGACCTTACGGGACTTTCCTACTTGGCAGTACATCTACGTATT | |
| | | AGTCATCGCTATTACCATGGTGATGCGGTTTTGGCAGTACACCAATGGGCGTGGATAGCGGTTTGACT | |
| | | CACGGGGATTTCCAAGTCTCCACCCCATTGACGTCAATGGGAGTTTGTTTTGGCACCAAAATCAACGG | |
| | | GACTTTCCAAAATGTCGTAATAACCCCGCCCCGTTGACGCAAATGGGCGGTAGGCGTGTACGGTGGG | |
| | | AGGTCTATATAAGCAGAGCTCGTTTAGTGAACCGTC (SEQ ID NO: 20944) | |
| | 375 nt | ACTTGGCAGTACATCAAGTGTATCATATGCCAAGTCCGCCCCCTATTGACGTCAATGACGGTAAATGG | 0 nt Homology 1 |
| | | CCCGCCTGGCATTATGCCCAGTACATGACCTTACGGGACTTTCCTACTTGGCAGTACATCTACGTATTA | |
| | | GTCATCGCTATTACCATGGTGATGCGGTTTTGGCAGTACACCAATGGGCGTGGATAGCGGTTTGACTC | |
| | | ACGGGGATTTCCAAGTCTCCACCCCATTGACGTCAATGGGAGTTTGTTTTGGCACCAAAATCAACGGG | |
| | | ACTTTCCAAAATGTCGTAATAACCCCGCCCCGTTGACGCAAATGGGCGGTAGGCGTGTACGGTGGGA | |
| | | GGTCTATATAAGCAGAGCTCGTTTAGTGAACCGTC (SEQ ID NO: 20945) | |
| | 374 nt | CTTGGCAGTACATCAAGTGTATCATATGCCAAGTCCGCCCCCTATTGACGTCAATGACGGTAAATGGCC | 0 nt Homology 1 |
| | | CGCCTGGCATTATGCCCAGTACATGACCTTACGGGACTTTCCTACTTGGCAGTACATCTACGTATTAGT | |
| | | CATCGCTATTACCATGGTGATGCGGTTTTGGCAGTACACCAATGGGCGTGGATAGCGGTTTGACTCAC | |
| | | GGGGATTTCCAAGTCTCCACCCCATTGACGTCAATGGGAGTTTGTTTTGGCACCAAAATCAACGGGAC | |
| | | TTTCCAAAATGTCGTAATAACCCCGCCCCGTTGACGCAAATGGGCGGTAGGCGTGTACGGTGGGAGG | |
| | | TCTATATAAGCAGAGCTCGTTTAGTGAACCGTC (SEQ ID NO: 20946) | |
| | 373 nt | TTGGCAGTACATCAAGTGTATCATATGCCAAGTCCGCCCCCTATTGACGTCAATGACGGTAAATGGCCC | 0 nt Homology 1 |
| | | GCCTGGCATTATGCCCAGTACATGACCTTACGGGACTTTCCTACTTGGCAGTACATCTACGTATTAGTC | |
| | | ATCGCTATTACCATGGTGATGCGGTTTTGGCAGTACACCAATGGGCGTGGATAGCGGTTTGACTCACG | |
| | | GGGATTTCCAAGTCTCCACCCCATTGACGTCAATGGGAGTTTGTTTTGGCACCAAAATCAACGGGACTT | |
| | | TCCAAAATGTCGTAATAACCCCGCCCCGTTGACGCAAATGGGCGGTAGGCGTGTACGGTGGGAGGTC | |
| | | TATATAAGCAGAGCTCGTTTAGTGAACCGTC (SEQ ID NO: 20947) | |
| | 372 nt | TGGCAGTACATCAAGTGTATCATATGCCAAGTCCGCCCCCTATTGACGTCAATGACGGTAAATGGCCC | 0 nt Homology 1 |
| | | GCCTGGCATTATGCCCAGTACATGACCTTACGGGACTTTCCTACTTGGCAGTACATCTACGTATTAGTC | |
| | | ATCGCTATTACCATGGTGATGCGGTTTTGGCAGTACACCAATGGGCGTGGATAGCGGTTTGACTCACG | |
| | | GGGATTTCCAAGTCTCCACCCCATTGACGTCAATGGGAGTTTGTTTTGGCACCAAAATCAACGGGACTT | |
| | | TCCAAAATGTCGTAATAACCCCGCCCCGTTGACGCAAATGGGGGTAGGCGTGTACGGTGGGAGGTC | |
| | | TATATAAGCAGAGCTCGTTTAGTGAACCGTC (SEQ ID NO: 20948) | |
| | 371 nt | GGCAGTACATCAAGTGTATCATATGCCAAGTCCGCCCCCTATTGACGTCAATGACGGTAAATGGCCCG | 0 nt Homology 1 |
| | | CCTGGCATTATGCCCAGTACATGACCTTACGGGACTTTCCTACTTGGCAGTACATCTACGTATTAGTCAT | |
| | | CGCTATTACCATGGTGATGCGGTTTTGGCAGTACACCAATGGGCGTGGATAGCGGTTTGACTCACGGG | |
| | | GATTTCCAAGTCTCCACCCCATTGACGTCAATGGGAGTTTGTTTTGGCACCAAAATCAACGGGACTTTC | |
| | | CAAAATGTCGTAATAACCCCGCCCCGTTGACGCAAATGGGCGGTAGGCGTGTACGGTGGGAGGTCTA | |
| | | TATAAGCAGAGCTCGTTTAGTGAACCGTC (SEQ ID NO: 20949) | |
| | 370 nt | GCAGTACATCAAGTGTATCATATGCCAAGTCCGCCCCCTATTGACGTCAATGACGGTAAATGGCCCGC | 0 nt Homology 1 |
| | | CTGGCATTATGCCCAGTACATGACCTTACGGGACTTTCCTACTTGGCAGTACATCTACGTATTAGTCATC | |
| | | GCTATTACCATGGTGATGCGGTTTTGGCAGTACACCAATGGGCGTGGATAGCGGTTTGACTCACGGG | |
| | | GATTTCCAAGTCTCCACCCCATTGACGTCAATGGGAGTTTGTTTTGGCACCAAAATCAACGGGACTTTC | |
| | | CAAAATGTCGTAATAACCCCGCCCCGTTGACGCAAATGGGCGGTAGGCGTGTACGGTGGGAGGTCTA | |
| | | TATAAGCAGAGCTCGTTTAGTGAACCGTC (SEQ ID NO: 20950) | |
| | 369 nt | CAGTACATCAAGTGTATCATATGCCAAGTCCGCCCCCTATTGACGTCAATGACGGTAAATGGCCCGCCT | 0 nt Homology 1 |
| | | GGCATTATGCCCAGTACATGACCTTACGGGACTTTCCTACTTGGCAGTACATCTACGTATTAGTCATCG | |
| | | CTATTACCATGGTGATGCGGTTTTGGCAGTACACCAATGGGCGTGGATAGCGGTTTGACTCACGGGGA | |
| | | TTTCCAAGTCTCCACCCCATTGACGTCAATGGGAGTTTGTTTTGGCACCAAAATCAACGGGACTTTCCA | |
| | | AAATGTCGTAATAACCCCGCCCCGTTGACGCAAATGGGCGGTAGGCGTGTACGGTGGGAGGTCTATA | |
| | | TAAGCAGAGCTCGTTTAGTGAACCGTC (SEQ ID NO: 20951) | |
| | 368 nt | AGTACATCAAGTGTATCATATGCCAAGTCCGCCCCCTATTGACGTCAATGACGGTAAATGGCCCGCCT | 0 nt Homology 1 |
| | | GGCATTATGCCCAGTACATGACCTTACGGGACTTTCCTACTTGGCAGTACATCTACGTATTAGTCATCG | |
| | | CTATTACCATGGTGATGCGGTTTTGGCAGTACACCAATGGGCGTGGATAGCGGTTTGACTCACGGGGA | |
| | | TTTCCAAGTCTCCACCCCATTGACGTCAATGGGAGTTTGTTTTGGCACCAAAATCAACGGGACTTTCCA | |
| | | AAATGTCGTAATAACCCCGCCCCGTTGACGCAAATGGGCGGTAGGCGTGTACGGTGGGAGGTCTATA | |
| | | TAAGCAGAGCTCGTTTAGTGAACCGTC (SEQ ID NO: 20952) | |
| | 367 nt | GTACATCAAGTGTATCATATGCCAAGTCCGCCCCCTATTGACGTCAATGACGGTAAATGGCCCGCCTG | 0 nt Homology 1 |
| | | GCATTATGCCCAGTACATGACCTTACGGGACTTTCCTACTTGGCAGTACATCTACGTATTAGTCATCGCT | |
| | | ATTACCATGGTGATGCGGTTTTGGCAGTACACCAATGGGCGTGGATAGCGGTTTGACTCACGGGGATT | |
| | | TCCAAGTCTCCACCCCATTGACGTCAATGGGAGTTTGTTTTGGCACCAAAATCAACGGGACTTTCCAAA | |
| | | ATGTCGTAATAACCCCGCCCCGTTGACGCAAATGGGCGGTAGGCGTGTACGGTGGGAGGTCTATATA | |
| | | AGCAGAGCTCGTTTAGTGAACCGTC (SEQ ID NO: 20953) | |
| | 366 nt | TACATCAAGTGTATCATATGCCAAGTCCGCCCCCTATTGACGTCAATGACGGTAAATGGCCCGCCTGGC | 0 nt Homology 1 |
| | | ATTATGCCCAGTACATGACCTTACGGGACTTTCCTACTTGGCAGTACATCTACGTATTAGTCATCGCTAT | |
| | | TACCATGGTGATGCGGTTTTGGCAGTACACCAATGGGCGTGGATAGCGGTTTGACTCACGGGGATTTC | |
| | | CAAGTCTCCACCCCATTGACGTCAATGGGAGTTTGTTTTGGCACCAAAATCAACGGGACTTTCCAAAAT | |
| | | GTCGTAATAACCCCGCCCCGTTGACGCAAATGGGGGTAGGCGTGTACGGTGGGAGGTCTATATAAG | |
| | | CAGAGCTCGTTTAGTGAACCGTC (SEQ ID NO: 20954) | |
| | 365 nt | ACATCAAGTGTATCATATGCCAAGTCCGCCCCCTATTGACGTCAATGACGGTAAATGGCCCGCCTGGC | 0 nt Homology 1 |
| | | ATTATGCCCAGTACATGACCTTACGGGACTTTCCTACTTGGCAGTACATCTACGTATTAGTCATCGCTAT | |
| | | TACCATGGTGATGCGGTTTTGGCAGTACACCAATGGGCGTGGATAGCGGTTTGACTCACGGGGATTTC | |
| | | CAAGTCTCCACCCCATTGACGTCAATGGGAGTTTGTTTTGGCACCAAAATCAACGGGACTTTCCAAAAT | |
| | | GTCGTAATAACCCCGCCCCGTTGACGCAAATGGGCGGTAGGCGTGTACGGTGGGAGGTCTATATAAG | |
| | | CAGAGCTCGTTTAGTGAACCGTC (SEQ ID NO: 20955) | |
| | 364 nt | CATCAAGTGTATCATATGCCAAGTCCGCCCCCTATTGACGTCAATGACGGTAAATGGCCCGCCTGGCAT | 0 nt Homology 1 |
| | | TATGCCCAGTACATGACCTTACGGGACTTTCCTACTTGGCAGTACATCTACGTATTAGTCATCGCTATTA | |
| | | CCATGGTGATGCGGTTTTGGCAGTACACCAATGGGCGTGGATAGCGGTTTGACTCACGGGGATTTCCA | |
| | | AGTCTCCACCCCATTGACGTCAATGGGAGTTTGTTTTGGCACCAAAATCAACGGGACTTTCCAAAATGT | |
| | | CGTAATAACCCCGCCCCGTTGACGCAAATGGGCGGTAGGCGTGTACGGTGGGAGGTCTATATAAGCA | |
| | | GAGCTCGTTTAGTGAACCGTC (SEQ ID NO: 20956) | |
| | 363 nt | ATCAAGTGTATCATATGCCAAGTCCGCCCCCTATTGACGTCAATGACGGTAAATGGCCCGCCTGGCATT | 0 nt Homology 1 |
| | | ATGCCCAGTACATGACCTTACGGGACTTTCCTACTTGGCAGTACATCTACGTATTAGTCATCGCTATTAC | |
| | | CATGGTGATGCGGTTTTGGCAGTACACCAATGGGCGTGGATAGCGGTTTGACTCACGGGGATTTCCAA | |
| | | GTCTCCACCCCATTGACGTCAATGGGAGTTTGTTTTGGCACCAAAATCAACGGGACTTTCCAAAATGTC | |
| | | GTAATAACCCCGCCCCGTTGACGCAAATGGGCGGTAGGCGTGTACGGTGGGAGGTCTATATAAGCAG | |
| | | AGCTCGTTTAGTGAACCGTC (SEQ ID NO: 20957) | |
| | 362 nt | TCAAGTGTATCATATGCCAAGTCCGCCCCCTATTGACGTCAATGACGGTAAATGGCCCGCCTGGCATTA | 0 nt Homology 1 |
| | | TGCCCAGTACATGACCTTACGGGACTTTCCTACTTGGCAGTACATCTACGTATTAGTCATCGCTATTACC | |
| | | ATGGTGATGCGGTTTTGGCAGTACACCAATGGGCGTGGATAGCGGTTTGACTCACGGGGATTTCCAA | |
| | | GTCTCCACCCCATTGACGTCAATGGGAGTTTGTTTTGGCACCAAAATCAACGGGACTTTCCAAAATGTC | |
| | | GTAATAACCCCGCCCCGTTGACGCAAATGGGCGGTAGGCGTGTACGGTGGGAGGTCTATATAAGCAG | |
| | | AGCTCGTTTAGTGAACCGTC (SEQ ID NO: 20958) | |
| | 361 nt | CAAGTGTATCATATGCCAAGTCCGCCCCCTATTGACGTCAATGACGGTAAATGGCCCGCCTGGCATTAT | 0 nt Homology 1 |
| | | GCCCAGTACATGACCTTACGGGACTTTCCTACTTGGCAGTACATCTACGTATTAGTCATCGCTATTACCA | |
| | | TGGTGATGCGGTTTTGGCAGTACACCAATGGGCGTGGATAGCGGTTTGACTCACGGGGATTTCCAAG | |
| | | TCTCCACCCCATTGACGTCAATGGGAGTTTGTTTTGGCACCAAAATCAACGGGACTTTCCAAAATGTCG | |
| | | TAATAACCCCGCCCCGTTGACGCAAATGGGCGGTAGGCGTGTACGGTGGGAGGTCTATATAAGCAGA | |
| | | GCTCGTTTAGTGAACCGTC (SEQ ID NO: 20959) | |
| | 360 nt | AAGTGTATCATATGCCAAGTCCGCCCCCTATTGACGTCAATGACGGTAAATGGCCCGCCTGGCATTAT | 0 nt Homology 1 |
| | | GCCCAGTACATGACCTTACGGGACTTTCCTACTTGGCAGTACATCTACGTATTAGTCATCGCTATTACCA | |
| | | TGGTGATGCGGTTTTGGCAGTACACCAATGGGCGTGGATAGCGGTTTGACTCACGGGGATTTCCAAG | |
| | | TCTCCACCCCATTGACGTCAATGGGAGTTTGTTTTGGCACCAAAATCAACGGGACTTTCCAAAATGTCG | |
| | | TAATAACCCCGCCCCGTTGACGCAAATGGGCGGTAGGCGTGTACGGTGGGAGGTCTATATAAGCAGA | |
| | | GCTCGTTTAGTGAACCGTC (SEQ ID NO: 20960) | |
| | 359 nt | AGTGTATCATATGCCAAGTCCGCCCCCTATTGACGTCAATGACGGTAAATGGCCCGCCTGGCATTATGC | 0 nt Homology 1 |
| | | CCAGTACATGACCTTACGGGACTTTCCTACTTGGCAGTACATCTACGTATTAGTCATCGCTATTACCATG | |
| | | GTGATGCGGTTTTGGCAGTACACCAATGGGCGTGGATAGCGGTTTGACTCACGGGGATTTCCAAGTCT | |
| | | CCACCCCATTGACGTCAATGGGAGTTTGTTTTGGCACCAAAATCAACGGGACTTTCCAAAATGTCGTAA | |
| | | TAACCCCGCCCCGTTGACGCAAATGGGCGGTAGGCGTGTACGGTGGGAGGTCTATATAAGCAGAGCT | |
| | | CGTTTAGTGAACCGTC (SEQ ID NO: 20961) | |
| | 358 nt | GTGTATCATATGCCAAGTCCGCCCCCTATTGACGTCAATGACGGTAAATGGCCCGCCTGGCATTATGCC | 0 nt Homology 1 |
| | | CAGTACATGACCTTACGGGACTTTCCTACTTGGCAGTACATCTACGTATTAGTCATCGCTATTACCATG | |
| | | GTGATGCGGTTTTGGCAGTACACCAATGGGCGTGGATAGCGGTTTGACTCACGGGGATTTCCAAGTCT | |
| | | CCACCCCATTGACGTCAATGGGAGTTTGTTTTGGCACCAAAATCAACGGGACTTTCCAAAATGTCGTAA | |
| | | TAACCCCGCCCCGTTGACGCAAATGGGCGGTAGGCGTGTACGGTGGGAGGTCTATATAAGCAGAGCT | |
| | | CGTTTAGTGAACCGTC (SEQ ID NO: 20962) | |
| | 357 nt | TGTATCATATGCCAAGTCCGCCCCCTATTGACGTCAATGACGGTAAATGGCCCGCCTGGCATTATGCCC | 0 nt Homology 1 |
| | | AGTACATGACCTTACGGGACTTTCCTACTTGGCAGTACATCTACGTATTAGTCATCGCTATTACCATGGT | |
| | | GATGCGGTTTTGGCAGTACACCAATGGGCGTGGATAGCGGTTTGACTCACGGGGATTTCCAAGTCTCC | |
| | | ACCCCATTGACGTCAATGGGAGTTTGTTTTGGCACCAAAATCAACGGGACTTTCCAAAATGTCGTAATA | |
| | | ACCCCGCCCCGTTGACGCAAATGGGCGGTAGGCGTGTACGGTGGGAGGTCTATATAAGCAGAGCTCG | |
| | | TTTAGTGAACCGTC (SEQ ID NO: 20963) | |
| | 356 nt | GTATCATATGCCAAGTCCGCCCCCTATTGACGTCAATGACGGTAAATGGCCCGCCTGGCATTATGCCCA | 0 nt Homology 1 |
| | | GTACATGACCTTACGGGACTTTCCTACTTGGCAGTACATCTACGTATTAGTCATCGCTATTACCATGGT | |
| | | GATGCGGTTTTGGCAGTACACCAATGGGCGTGGATAGCGGTTTGACTCACGGGGATTTCCAAGTCTCC | |
| | | ACCCCATTGACGTCAATGGGAGTTTGTTTTGGCACCAAAATCAACGGGACTTTCCAAAATGTCGTAATA | |
| | | ACCCCGCCCCGTTGACGCAAATGGGCGGTAGGCGTGTACGGTGGGAGGTCTATATAAGCAGAGCTCG | |
| | | TTTAGTGAACCGTC (SEQ ID NO: 20964) | |
| | 355 nt | TATCATATGCCAAGTCCGCCCCCTATTGACGTCAATGACGGTAAATGGCCCGCCTGGCATTATGCCCAG | 0 nt Homology 1 |
| | | TACATGACCTTACGGGACTTTCCTACTTGGCAGTACATCTACGTATTAGTCATCGCTATTACCATGGTGA | |
| | | TGCGGTTTTGGCAGTACACCAATGGGCGTGGATAGCGGTTTGACTCACGGGGATTTCCAAGTCTCCAC | |
| | | CCCATTGACGTCAATGGGAGTTTGTTTTGGCACCAAAATCAACGGGACTTTCCAAAATGTCGTAATAAC | |
| | | CCCGCCCCGTTGACGCAAATGGGCGGTAGGCGTGTACGGTGGGAGGTCTATATAAGCAGAGCTCGTT | |
| | | TAGTGAACCGTC (SEQ ID NO: 20965) | |
| | 354 nt | ATCATATGCCAAGTCCGCCCCCTATTGACGTCAATGACGGTAAATGGCCCGCCTGGCATTATGCCCAGT | 0 nt Homology 1 |
| | | ACATGACCTTACGGGACTTTCCTACTTGGCAGTACATCTACGTATTAGTCATCGCTATTACCATGGTGAT | |
| | | GCGGTTTTGGCAGTACACCAATGGGCGTGGATAGCGGTTTGACTCACGGGGATTTCCAAGTCTCCACC | |
| | | CCATTGACGTCAATGGGAGTTTGTTTTGGCACCAAAATCAACGGGACTTTCCAAAATGTCGTAATAACC | |
| | | CCGCCCCGTTGACGCAAATGGGCGGTAGGCGTGTACGGTGGGAGGTCTATATAAGCAGAGCTCGTTT | |
| | | AGTGAACCGTC (SEQ ID NO: 20966) | |
| | 353 nt | TCATATGCCAAGTCCGCCCCCTATTGACGTCAATGACGGTAAATGGCCCGCCTGGCATTATGCCCAGTA | 0 nt Homology 1 |
| | | CATGACCTTACGGGACTTTCCTACTTGGCAGTACATCTACGTATTAGTCATCGCTATTACCATGGTGAT | |
| | | GCGGTTTTGGCAGTACACCAATGGGCGTGGATAGCGGTTTGACTCACGGGGATTTCCAAGTCTCCACC | |
| | | CCATTGACGTCAATGGGAGTTTGTTTTGGCACCAAAATCAACGGGACTTTCCAAAATGTCGTAATAACC | |
| | | CCGCCCCGTTGACGCAAATGGGCGGTAGGCGTGTACGGTGGGAGGTCTATATAAGCAGAGCTCGTTT | |
| | | AGTGAACCGTC (SEQ ID NO: 20967) | |
| | 352 nt | CATATGCCAAGTCCGCCCCCTATTGACGTCAATGACGGTAAATGGCCCGCCTGGCATTATGCCCAGTAC | 0 nt Homology 1 |
| | | ATGACCTTACGGGACTTTCCTACTTGGCAGTACATCTACGTATTAGTCATCGCTATTACCATGGTGATG | |
| | | CGGTTTTGGCAGTACACCAATGGGCGTGGATAGCGGTTTGACTCACGGGGATTTCCAAGTCTCCACCC | |
| | | CATTGACGTCAATGGGAGTTTGTTTTGGCACCAAAATCAACGGGACTTTCCAAAATGTCGTAATAACCC | |
| | | CGCCCCGTTGACGCAAATGGGCGGTAGGCGTGTACGGTGGGAGGTCTATATAAGCAGAGCTCGTTTA | |
| | | GTGAACCGTC (SEQ ID NO: 20968) | |
| | 351 nt | ATATGCCAAGTCCGCCCCCTATTGACGTCAATGACGGTAAATGGCCCGCCTGGCATTATGCCCAGTAC | 0 nt Homology 1 |
| | | ATGACCTTACGGGACTTTCCTACTTGGCAGTACATCTACGTATTAGTCATCGCTATTACCATGGTGATG | |
| | | CGGTTTTGGCAGTACACCAATGGGCGTGGATAGCGGTTTGACTCACGGGGATTTCCAAGTCTCCACCC | |
| | | CATTGACGTCAATGGGAGTTTGTTTTGGCACCAAAATCAACGGGACTTTCCAAAATGTCGTAATAACCC | |
| | | CGCCCCGTTGACGCAAATGGGCGGTAGGCGTGTACGGTGGGAGGTCTATATAAGCAGAGCTCGTTTA | |
| | | GTGAACCGTC (SEQ ID NO: 20969) | |
| | 350 nt | TATGCCAAGTCCGCCCCCTATTGACGTCAATGACGGTAAATGGCCCGCCTGGCATTATGCCCAGTACAT | 0 nt Homology 1 |
| | | GACCTTACGGGACTTTCCTACTTGGCAGTACATCTACGTATTAGTCATCGCTATTACCATGGTGATGCG | |
| | | GTTTTGGCAGTACACCAATGGGCGTGGATAGCGGTTTGACTCACGGGGATTTCCAAGTCTCCACCCCA | |
| | | TTGACGTCAATGGGAGTTTGTTTTGGCACCAAAATCAACGGGACTTTCCAAAATGTCGTAATAACCCCG | |
| | | CCCCGTTGACGCAAATGGGCGGTAGGCGTGTACGGTGGGAGGTCTATATAAGCAGAGCTCGTTTAGT | |
| | | GAACCGTC (SEQ ID NO: 20970) | |
| | 349 nt | ATGCCAAGTCCGCCCCCTATTGACGTCAATGACGGTAAATGGCCCGCCTGGCATTATGCCCAGTACAT | 0 nt Homology 1 |
| | | GACCTTACGGGACTTTCCTACTTGGCAGTACATCTACGTATTAGTCATCGCTATTACCATGGTGATGCG | |
| | | GTTTTGGCAGTACACCAATGGGCGTGGATAGCGGTTTGACTCACGGGGATTTCCAAGTCTCCACCCCA | |
| | | TTGACGTCAATGGGAGTTTGTTTTGGCACCAAAATCAACGGGACTTTCCAAAATGTCGTAATAACCCCG | |
| | | CCCCGTTGACGCAAATGGGCGGTAGGCGTGTACGGTGGGAGGTCTATATAAGCAGAGCTCGTTTAGT | |
| | | GAACCGTC (SEQ ID NO: 20971) | |
| | 348 nt | TGCCAAGTCCGCCCCCTATTGACGTCAATGACGGTAAATGGCCCGCCTGGCATTATGCCCAGTACATG | 0 nt Homology 1 |
| | | ACCTTACGGGACTTTCCTACTTGGCAGTACATCTACGTATTAGTCATCGCTATTACCATGGTGATGCGG | |
| | | TTTTGGCAGTACACCAATGGGCGTGGATAGCGGTTTGACTCACGGGGATTTCCAAGTCTCCACCCCATT | |
| | | GACGTCAATGGGAGTTTGTTTTGGCACCAAAATCAACGGGACTTTCCAAAATGTCGTAATAACCCCGC | |
| | | CCCGTTGACGCAAATGGGCGGTAGGCGTGTACGGTGGGAGGTCTATATAAGCAGAGCTCGTTTAGTG | |
| | | AACCGTC (SEQ ID NO: 20972) | |
| | 347 nt | GCCAAGTCCGCCCCCTATTGACGTCAATGACGGTAAATGGCCCGCCTGGCATTATGCCCAGTACATGA | 0 nt Homology 1 |
| | | CCTTACGGGACTTTCCTACTTGGCAGTACATCTACGTATTAGTCATCGCTATTACCATGGTGATGCGGT | |
| | | TTTGGCAGTACACCAATGGGCGTGGATAGCGGTTTGACTCACGGGGATTTCCAAGTCTCCACCCCATT | |
| | | GACGTCAATGGGAGTTTGTTTTGGCACCAAAATCAACGGGACTTTCCAAAATGTCGTAATAACCCCGC | |
| | | CCCGTTGACGCAAATGGGCGGTAGGCGTGTACGGTGGGAGGTCTATATAAGCAGAGCTCGTTTAGTG | |
| | | AACCGTC (SEQ ID NO: 20973) | |
| | 346 nt | CCAAGTCCGCCCCCTATTGACGTCAATGACGGTAAATGGCCCGCCTGGCATTATGCCCAGTACATGAC | 0 nt Homology 1 |
| | | CTTACGGGACTTTCCTACTTGGCAGTACATCTACGTATTAGTCATCGCTATTACCATGGTGATGCGGTTT | |
| | | TGGCAGTACACCAATGGGCGTGGATAGCGGTTTGACTCACGGGGATTTCCAAGTCTCCACCCCATTGA | |
| | | CGTCAATGGGAGTTTGTTTTGGCACCAAAATCAACGGGACTTTCCAAAATGTCGTAATAACCCCGCCCC | |
| | | GTTGACGCAAATGGGCGGTAGGCGTGTACGGTGGGAGGTCTATATAAGCAGAGCTCGTTTAGTGAAC | |
| | | CGTC (SEQ ID NO: 20974) | |
| | 345 nt | CAAGTCCGCCCCCTATTGACGTCAATGACGGTAAATGGCCCGCCTGGCATTATGCCCAGTACATGACCT | 0 nt Homology 1 |
| | | TACGGGACTTTCCTACTTGGCAGTACATCTACGTATTAGTCATCGCTATTACCATGGTGATGCGGTTTT | |
| | | GGCAGTACACCAATGGGCGTGGATAGCGGTTTGACTCACGGGGATTTCCAAGTCTCCACCCCATTGAC | |
| | | GTCAATGGGAGTTTGTTTTGGCACCAAAATCAACGGGACTTTCCAAAATGTCGTAATAACCCCGCCCC | |
| | | GTTGACGCAAATGGGCGGTAGGCGTGTACGGTGGGAGGTCTATATAAGCAGAGCTCGTTTAGTGAAC | |
| | | CGTC (SEQ ID NO: 20975) | |
| | 344 nt | AAGTCCGCCCCCTATTGACGTCAATGACGGTAAATGGCCCGCCTGGCATTATGCCCAGTACATGACCTT | 0 nt Homology 1 |
| | | ACGGGACTTTCCTACTTGGCAGTACATCTACGTATTAGTCATCGCTATTACCATGGTGATGCGGTTTTG | |
| | | GCAGTACACCAATGGGCGTGGATAGCGGTTTGACTCACGGGGATTTCCAAGTCTCCACCCCATTGACG | |
| | | TCAATGGGAGTTTGTTTTGGCACCAAAATCAACGGGACTTTCCAAAATGTCGTAATAACCCCGCCCCGT | |
| | | TGACGCAAATGGGCGGTAGGCGTGTACGGTGGGAGGTCTATATAAGCAGAGCTCGTTTAGTGAACCG | |
| | | TC (SEQ ID NO: 20976) | |
| | 343 nt | AGTCCGCCCCCTATTGACGTCAATGACGGTAAATGGCCCGCCTGGCATTATGCCCAGTACATGACCTTA | 0 nt Homology 1 |
| | | CGGGACTTTCCTACTTGGCAGTACATCTACGTATTAGTCATCGCTATTACCATGGTGATGCGGTTTTGG | |
| | | CAGTACACCAATGGGCGTGGATAGCGGTTTGACTCACGGGGATTTCCAAGTCTCCACCCCATTGACGT | |
| | | CAATGGGAGTTTGTTTTGGCACCAAAATCAACGGGACTTTCCAAAATGTCGTAATAACCCCGCCCCGTT | |
| | | GACGCAAATGGGCGGTAGGCGTGTACGGTGGGAGGTCTATATAAGCAGAGCTCGTTTAGTGAACCGT | |
| | | C (SEQ ID NO: 20977) | |
| | 342 nt | GTCCGCCCCCTATTGACGTCAATGACGGTAAATGGCCCGCCTGGCATTATGCCCAGTACATGACCTTAC | 0 nt Homology 1 |
| | | GGGACTTTCCTACTTGGCAGTACATCTACGTATTAGTCATCGCTATTACCATGGTGATGCGGTTTTGGC | |
| | | AGTACACCAATGGGCGTGGATAGCGGTTTGACTCACGGGGATTTCCAAGTCTCCACCCCATTGACGTC | |
| | | AATGGGAGTTTGTTTTGGCACCAAAATCAACGGGACTTTCCAAAATGTCGTAATAACCCCGCCCCGTTG | |
| | | ACGCAAATGGGCGGTAGGCGTGTACGGTGGGAGGTCTATATAAGCAGAGCTCGTTTAGTGAACCGTC | |
| | | (SEQ ID NO: 20978) | |
| | 341 nt | TCCGCCCCCTATTGACGTCAATGACGGTAAATGGCCCGCCTGGCATTATGCCCAGTACATGACCTTACG | 0 nt Homology 1 |
| | | GGACTTTCCTACTTGGCAGTACATCTACGTATTAGTCATCGCTATTACCATGGTGATGCGGTTTTGGCA | |
| | | GTACACCAATGGGCGTGGATAGCGGTTTGACTCACGGGGATTTCCAAGTCTCCACCCCATTGACGTCA | |
| | | ATGGGAGTTTGTTTTGGCACCAAAATCAACGGGACTTTCCAAAATGTCGTAATAACCCCGCCCCGTTGA | |
| | | CGCAAATGGGCGGTAGGCGTGTACGGTGGGAGGTCTATATAAGCAGAGCTCGTTTAGTGAACCGTC | |
| | | (SEQ ID NO: 20979) | |
| | 340 nt | CCGCCCCCTATTGACGTCAATGACGGTAAATGGCCCGCCTGGCATTATGCCCAGTACATGACCTTACG | 0 nt Homology 1 |
| | | GGACTTTCCTACTTGGCAGTACATCTACGTATTAGTCATCGCTATTACCATGGTGATGCGGTTTTGGCA | |
| | | GTACACCAATGGGCGTGGATAGCGGTTTGACTCACGGGGATTTCCAAGTCTCCACCCCATTGACGTCA | |
| | | ATGGGAGTTTGTTTTGGCACCAAAATCAACGGGACTTTCCAAAATGTCGTAATAACCCCGCCCCGTTGA | |
| | | CGCAAATGGGCGGTAGGCGTGTACGGTGGGAGGTCTATATAAGCAGAGCTCGTTTAGTGAACCGTC | |
| | | (SEQ ID NO: 20980) | |
| | 339 nt | CGCCCCCTATTGACGTCAATGACGGTAAATGGCCCGCCTGGCATTATGCCCAGTACATGACCTTACGG | 0 nt Homology 1 |
| | | GACTTTCCTACTTGGCAGTACATCTACGTATTAGTCATCGCTATTACCATGGTGATGCGGTTTTGGCAG | |
| | | TACACCAATGGGCGTGGATAGCGGTTTGACTCACGGGGATTTCCAAGTCTCCACCCCATTGACGTCAA | |
| | | TGGGAGTTTGTTTTGGCACCAAAATCAACGGGACTTTCCAAAATGTCGTAATAACCCCGCCCCGTTGAC | |
| | | GCAAATGGGCGGTAGGCGTGTACGGTGGGAGGTCTATATAAGCAGAGCTCGTTTAGTGAACCGTC | |
| | | (SEQ ID NO: 20981) | |
| | 338 nt | GCCCCCTATTGACGTCAATGACGGTAAATGGCCCGCCTGGCATTATGCCCAGTACATGACCTTACGGG | 0 nt Homology 1 |
| | | ACTTTCCTACTTGGCAGTACATCTACGTATTAGTCATCGCTATTACCATGGTGATGCGGTTTTGGCAGT | |
| | | ACACCAATGGGCGTGGATAGCGGTTTGACTCACGGGGATTTCCAAGTCTCCACCCCATTGACGTCAAT | |
| | | GGGAGTTTGTTTTGGCACCAAAATCAACGGGACTTTCCAAAATGTCGTAATAACCCCGCCCCGTTGAC | |
| | | GCAAATGGGCGGTAGGCGTGTACGGTGGGAGGTCTATATAAGCAGAGCTCGTTTAGTGAACCGTC | |
| | | (SEQ ID NO: 20982) | |
| | 337 nt | CCCCCTATTGACGTCAATGACGGTAAATGGCCCGCCTGGCATTATGCCCAGTACATGACCTTACGGGA | 0 nt Homology 1 |
| | | CTTTCCTACTTGGCAGTACATCTACGTATTAGTCATCGCTATTACCATGGTGATGCGGTTTTGGCAGTAC | |
| | | ACCAATGGGCGTGGATAGCGGTTTGACTCACGGGGATTTCCAAGTCTCCACCCCATTGACGTCAATGG | |
| | | GAGTTTGTTTTGGCACCAAAATCAACGGGACTTTCCAAAATGTCGTAATAACCCCGCCCCGTTGACGCA | |
| | | AATGGGCGGTAGGCGTGTACGGTGGGAGGTCTATATAAGCAGAGCTCGTTTAGTGAACCGTC (SEQ | |
| | | ID NO: 20983) | |
| | 336 nt | CCCCTATTGACGTCAATGACGGTAAATGGCCCGCCTGGCATTATGCCCAGTACATGACCTTACGGGAC | 0 nt Homology 1 |
| | | TTTCCTACTTGGCAGTACATCTACGTATTAGTCATCGCTATTACCATGGTGATGCGGTTTTGGCAGTAC | |
| | | ACCAATGGGCGTGGATAGCGGTTTGACTCACGGGGATTTCCAAGTCTCCACCCCATTGACGTCAATGG | |
| | | GAGTTTGTTTTGGCACCAAAATCAACGGGACTTTCCAAAATGTCGTAATAACCCCGCCCCGTTGACGCA | |
| | | AATGGGCGGTAGGCGTGTACGGTGGGAGGTCTATATAAGCAGAGCTCGTTTAGTGAACCGTC (SEQ | |
| | | ID NO: 20984) | |
| | 335 nt | CCCTATTGACGTCAATGACGGTAAATGGCCCGCCTGGCATTATGCCCAGTACATGACCTTACGGGACTT | 0 nt Homology 1 |
| | | TCCTACTTGGCAGTACATCTACGTATTAGTCATCGCTATTACCATGGTGATGCGGTTTTGGCAGTACAC | |
| | | CAATGGGCGTGGATAGCGGTTTGACTCACGGGGATTTCCAAGTCTCCACCCCATTGACGTCAATGGGA | |
| | | GTTTGTTTTGGCACCAAAATCAACGGGACTTTCCAAAATGTCGTAATAACCCCGCCCCGTTGACGCAAA | |
| | | TGGGCGGTAGGCGTGTACGGTGGGAGGTCTATATAAGCAGAGCTCGTTTAGTGAACCGTC (SEQ ID | |
| | | NO: 20985) | |
| | 334 nt | CCTATTGACGTCAATGACGGTAAATGGCCCGCCTGGCATTATGCCCAGTACATGACCTTACGGGACTTT | 0 nt Homology 1 |
| | | CCTACTTGGCAGTACATCTACGTATTAGTCATCGCTATTACCATGGTGATGCGGTTTTGGCAGTACACC | |
| | | AATGGGCGTGGATAGCGGTTTGACTCACGGGGATTTCCAAGTCTCCACCCCATTGACGTCAATGGGAG | |
| | | TTTGTTTTGGCACCAAAATCAACGGGACTTTCCAAAATGTCGTAATAACCCCGCCCCGTTGACGCAAAT | |
| | | GGGCGGTAGGCGTGTACGGTGGGAGGTCTATATAAGCAGAGCTCGTTTAGTGAACCGTC (SEQ ID | |
| | | NO: 20986) | |
| | 333 nt | CTATTGACGTCAATGACGGTAAATGGCCCGCCTGGCATTATGCCCAGTACATGACCTTACGGGACTTTC | 0 nt Homology 1 |
| | | CTACTTGGCAGTACATCTACGTATTAGTCATCGCTATTACCATGGTGATGCGGTTTTGGCAGTACACCA | |
| | | ATGGGCGTGGATAGCGGTTTGACTCACGGGGATTTCCAAGTCTCCACCCCATTGACGTCAATGGGAGT | |
| | | TTGTTTTGGCACCAAAATCAACGGGACTTTCCAAAATGTCGTAATAACCCCGCCCCGTTGACGCAAATG | |
| | | GGCGGTAGGCGTGTACGGTGGGAGGTCTATATAAGCAGAGCTCGTTTAGTGAACCGTC (SEQ ID NO: | |
| | | 20987) | |
| | 332 nt | TATTGACGTCAATGACGGTAAATGGCCCGCCTGGCATTATGCCCAGTACATGACCTTACGGGACTTTCC | 0 nt Homology 1 |
| | | TACTTGGCAGTACATCTACGTATTAGTCATCGCTATTACCATGGTGATGCGGTTTTGGCAGTACACCAA | |
| | | TGGGCGTGGATAGCGGTTTGACTCACGGGGATTTCCAAGTCTCCACCCCATTGACGTCAATGGGAGTT | |
| | | TGTTTTGGCACCAAAATCAACGGGACTTTCCAAAATGTCGTAATAACCCCGCCCCGTTGACGCAAATG | |
| | | GGCGGTAGGCGTGTACGGTGGGAGGTCTATATAAGCAGAGCTCGTTTAGTGAACCGTC (SEQ ID NO: | |
| | | 20988) | |
| | 331 nt | ATTGACGTCAATGACGGTAAATGGCCCGCCTGGCATTATGCCCAGTACATGACCTTACGGGACTTTCCT | 0 nt Homology 1 |
| | | ACTTGGCAGTACATCTACGTATTAGTCATCGCTATTACCATGGTGATGCGGTTTTGGCAGTACACCAAT | |
| | | GGGCGTGGATAGCGGTTTGACTCACGGGGATTTCCAAGTCTCCACCCCATTGACGTCAATGGGAGTTT | |
| | | GTTTTGGCACCAAAATCAACGGGACTTTCCAAAATGTCGTAATAACCCCGCCCCGTTGACGCAAATGG | |
| | | GCGGTAGGCGTGTACGGTGGGAGGTCTATATAAGCAGAGCTCGTTTAGTGAACCGTC (SEQ ID NO: | |
| | | 20989) | |
| | 330 nt | TTGACGTCAATGACGGTAAATGGCCCGCCTGGCATTATGCCCAGTACATGACCTTACGGGACTTTCCTA | 0 nt Homology 1 |
| | | CTTGGCAGTACATCTACGTATTAGTCATCGCTATTACCATGGTGATGCGGTTTTGGCAGTACACCAATG | |
| | | GGCGTGGATAGCGGTTTGACTCACGGGGATTTCCAAGTCTCCACCCCATTGACGTCAATGGGAGTTTG | |
| | | TTTTGGCACCAAAATCAACGGGACTTTCCAAAATGTCGTAATAACCCCGCCCCGTTGACGCAAATGGG | |
| | | CGGTAGGCGTGTACGGTGGGAGGTCTATATAAGCAGAGCTCGTTTAGTGAACCGTC (SEQ ID NO: | |
| | | 20990) | |
| | 329 nt | TGACGTCAATGACGGTAAATGGCCCGCCTGGCATTATGCCCAGTACATGACCTTACGGGACTTTCCTAC | 0 nt Homology 1 |
| | | TTGGCAGTACATCTACGTATTAGTCATCGCTATTACCATGGTGATGCGGTTTTGGCAGTACACCAATGG | |
| | | GCGTGGATAGCGGTTTGACTCACGGGGATTTCCAAGTCTCCACCCCATTGACGTCAATGGGAGTTTGT | |
| | | TTTGGCACCAAAATCAACGGGACTTTCCAAAATGTCGTAATAACCCCGCCCCGTTGACGCAAATGGGC | |
| | | GGTAGGCGTGTACGGTGGGAGGTCTATATAAGCAGAGCTCGTTTAGTGAACCGTC (SEQ ID NO: | |
| | | 20991) | |
| | 328 nt | GACGTCAATGACGGTAAATGGCCCGCCTGGCATTATGCCCAGTACATGACCTTACGGGACTTTCCTACT | 0 nt Homology 1 |
| | | TGGCAGTACATCTACGTATTAGTCATCGCTATTACCATGGTGATGCGGTTTTGGCAGTACACCAATGGG | |
| | | CGTGGATAGCGGTTTGACTCACGGGGATTTCCAAGTCTCCACCCCATTGACGTCAATGGGAGTTTGTTT | |
| | | TGGCACCAAAATCAACGGGACTTTCCAAAATGTCGTAATAACCCCGCCCCGTTGACGCAAATGGGCGG | |
| | | TAGGCGTGTACGGTGGGAGGTCTATATAAGCAGAGCTCGTTTAGTGAACCGTC (SEQ ID NO: 20992) | |
| | 327 nt | ACGTCAATGACGGTAAATGGCCCGCCTGGCATTATGCCCAGTACATGACCTTACGGGACTTTCCTACTT | 0 nt Homology 1 |
| | | GGCAGTACATCTACGTATTAGTCATCGCTATTACCATGGTGATGCGGTTTTGGCAGTACACCAATGGG | |
| | | CGTGGATAGCGGTTTGACTCACGGGGATTTCCAAGTCTCCACCCCATTGACGTCAATGGGAGTTTGTTT | |
| | | TGGCACCAAAATCAACGGGACTTTCCAAAATGTCGTAATAACCCCGCCCCGTTGACGCAAATGGGCGG | |
| | | TAGGCGTGTACGGTGGGAGGTCTATATAAGCAGAGCTCGTTTAGTGAACCGTC (SEQ ID NO: 20993) | |
| | 326 nt | CGTCAATGACGGTAAATGGCCCGCCTGGCATTATGCCCAGTACATGACCTTACGGGACTTTCCTACTTG | 0 nt Homology 1 |
| | | GCAGTACATCTACGTATTAGTCATCGCTATTACCATGGTGATGCGGTTTTGGCAGTACACCAATGGGC | |
| | | GTGGATAGCGGTTTGACTCACGGGGATTTCCAAGTCTCCACCCCATTGACGTCAATGGGAGTTTGTTTT | |
| | | GGCACCAAAATCAACGGGACTTTCCAAAATGTCGTAATAACCCCGCCCCGTTGACGCAAATGGGCGGT | |
| | | AGGCGTGTACGGTGGGAGGTCTATATAAGCAGAGCTCGTTTAGTGAACCGTC (SEQ ID NO: 20994) | |
| | 325 nt | GTCAATGACGGTAAATGGCCCGCCTGGCATTATGCCCAGTACATGACCTTACGGGACTTTCCTACTTGG | 0 nt Homology 1 |
| | | CAGTACATCTACGTATTAGTCATCGCTATTACCATGGTGATGCGGTTTTGGCAGTACACCAATGGGCGT | |
| | | GGATAGCGGTTTGACTCACGGGGATTTCCAAGTCTCCACCCCATTGACGTCAATGGGAGTTTGTTTTG | |
| | | GCACCAAAATCAACGGGACTTTCCAAAATGTCGTAATAACCCCGCCCCGTTGACGCAAATGGGCGGTA | |
| | | GGCGTGTACGGTGGGAGGTCTATATAAGCAGAGCTCGTTTAGTGAACCGTC (SEQ ID NO: 20995) | |
| | 324 nt | TCAATGACGGTAAATGGCCCGCCTGGCATTATGCCCAGTACATGACCTTACGGGACTTTCCTACTTGGC | 0 nt Homology 1 |
| | | AGTACATCTACGTATTAGTCATCGCTATTACCATGGTGATGCGGTTTTGGCAGTACACCAATGGGCGTG | |
| | | GATAGCGGTTTGACTCACGGGGATTTCCAAGTCTCCACCCCATTGACGTCAATGGGAGTTTGTTTTGGC | |
| | | ACCAAAATCAACGGGACTTTCCAAAATGTCGTAATAACCCCGCCCCGTTGACGCAAATGGGCGGTAGG | |
| | | CGTGTACGGTGGGAGGTCTATATAAGCAGAGCTCGTTTAGTGAACCGTC (SEQ ID NO: 20996) | |
| | 323 nt | CAATGACGGTAAATGGCCCGCCTGGCATTATGCCCAGTACATGACCTTACGGGACTTTCCTACTTGGCA | 0 nt Homology 1 |
| | | GTACATCTACGTATTAGTCATCGCTATTACCATGGTGATGCGGTTTTGGCAGTACACCAATGGGCGTG | |
| | | GATAGCGGTTTGACTCACGGGGATTTCCAAGTCTCCACCCCATTGACGTCAATGGGAGTTTGTTTTGGC | |
| | | ACCAAAATCAACGGGACTTTCCAAAATGTCGTAATAACCCCGCCCCGTTGACGCAAATGGGCGGTAGG | |
| | | CGTGTACGGTGGGAGGTCTATATAAGCAGAGCTCGTTTAGTGAACCGTC (SEQ ID NO: 20997) | |
| | 322 nt | AATGACGGTAAATGGCCCGCCTGGCATTATGCCCAGTACATGACCTTACGGGACTTTCCTACTTGGCA | 0 nt Homology 1 |
| | | GTACATCTACGTATTAGTCATCGCTATTACCATGGTGATGCGGTTTTGGCAGTACACCAATGGGCGTG | |
| | | GATAGCGGTTTGACTCACGGGGATTTCCAAGTCTCCACCCCATTGACGTCAATGGGAGTTTGTTTTGGC | |
| | | ACCAAAATCAACGGGACTTTCCAAAATGTCGTAATAACCCCGCCCCGTTGACGCAAATGGGCGGTAGG | |
| | | CGTGTACGGTGGGAGGTCTATATAAGCAGAGCTCGTTTAGTGAACCGTC (SEQ ID NO: 20998) | |
| | 321 nt | ATGACGGTAAATGGCCCGCCTGGCATTATGCCCAGTACATGACCTTACGGGACTTTCCTACTTGGCAGT | 0 nt Homology 1 |
| | | ACATCTACGTATTAGTCATCGCTATTACCATGGTGATGCGGTTTTGGCAGTACACCAATGGGCGTGGAT | |
| | | AGCGGTTTGACTCACGGGGATTTCCAAGTCTCCACCCCATTGACGTCAATGGGAGTTTGTTTTGGCACC | |
| | | AAAATCAACGGGACTTTCCAAAATGTCGTAATAACCCCGCCCCGTTGACGCAAATGGGCGGTAGGCGT | |
| | | GTACGGTGGGAGGTCTATATAAGCAGAGCTCGTTTAGTGAACCGTC (SEQ ID NO: 20999) | |
| | 320 nt | TGACGGTAAATGGCCCGCCTGGCATTATGCCCAGTACATGACCTTACGGGACTTTCCTACTTGGCAGTA | 0 nt Homology 1 |
| | | CATCTACGTATTAGTCATCGCTATTACCATGGTGATGCGGTTTTGGCAGTACACCAATGGGCGTGGATA | |
| | | GCGGTTTGACTCACGGGGATTTCCAAGTCTCCACCCCATTGACGTCAATGGGAGTTTGTTTTGGCACCA | |
| | | AAATCAACGGGACTTTCCAAAATGTCGTAATAACCCCGCCCCGTTGACGCAAATGGGCGGTAGGCGTG | |
| | | TACGGTGGGAGGTCTATATAAGCAGAGCTCGTTTAGTGAACCGTC (SEQ ID NO: 21000) | |
| | 319 nt | GACGGTAAATGGCCCGCCTGGCATTATGCCCAGTACATGACCTTACGGGACTTTCCTACTTGGCAGTA | 0 nt Homology 1 |
| | | CATCTACGTATTAGTCATCGCTATTACCATGGTGATGCGGTTTTGGCAGTACACCAATGGGCGTGGATA | |
| | | GCGGTTTGACTCACGGGGATTTCCAAGTCTCCACCCCATTGACGTCAATGGGAGTTTGTTTTGGCACCA | |
| | | AAATCAACGGGACTTTCCAAAATGTCGTAATAACCCCGCCCCGTTGACGCAAATGGGCGGTAGGCGTG | |
| | | TACGGTGGGAGGTCTATATAAGCAGAGCTCGTTTAGTGAACCGTC (SEQ ID NO: 21001) | |
| | 318 nt | ACGGTAAATGGCCCGCCTGGCATTATGCCCAGTACATGACCTTACGGGACTTTCCTACTTGGCAGTACA | 0 nt Homology 1 |
| | | TCTACGTATTAGTCATCGCTATTACCATGGTGATGCGGTTTTGGCAGTACACCAATGGGCGTGGATAG | |
| | | CGGTTTGACTCACGGGGATTTCCAAGTCTCCACCCCATTGACGTCAATGGGAGTTTGTTTTGGCACCAA | |
| | | AATCAACGGGACTTTCCAAAATGTCGTAATAACCCCGCCCCGTTGACGCAAATGGGCGGTAGGCGTGT | |
| | | ACGGTGGGAGGTCTATATAAGCAGAGCTCGTTTAGTGAACCGTC (SEQ ID NO: 21002) | |
| | 317 nt | CGGTAAATGGCCCGCCTGGCATTATGCCCAGTACATGACCTTACGGGACTTTCCTACTTGGCAGTACAT | 0 nt Homology 1 |
| | | CTACGTATTAGTCATCGCTATTACCATGGTGATGCGGTTTTGGCAGTACACCAATGGGCGTGGATAGC | |
| | | GGTTTGACTCACGGGGATTTCCAAGTCTCCACCCCATTGACGTCAATGGGAGTTTGTTTTGGCACCAAA | |
| | | ATCAACGGGACTTTCCAAAATGTCGTAATAACCCCGCCCCGTTGACGCAAATGGGCGGTAGGCGTGTA | |
| | | CGGTGGGAGGTCTATATAAGCAGAGCTCGTTTAGTGAACCGTC (SEQ ID NO: 21003) | |
| | 316 nt | GGTAAATGGCCCGCCTGGCATTATGCCCAGTACATGACCTTACGGGACTTTCCTACTTGGCAGTACATC | 0 nt Homology 1 |
| | | TACGTATTAGTCATCGCTATTACCATGGTGATGCGGTTTTGGCAGTACACCAATGGGCGTGGATAGCG | |
| | | GTTTGACTCACGGGGATTTCCAAGTCTCCACCCCATTGACGTCAATGGGAGTTTGTTTTGGCACCAAAA | |
| | | TCAACGGGACTTTCCAAAATGTCGTAATAACCCCGCCCCGTTGACGCAAATGGGCGGTAGGCGTGTAC | |
| | | GGTGGGAGGTCTATATAAGCAGAGCTCGTTTAGTGAACCGTC (SEQ ID NO: 21004) | |
| | 315 nt | GTAAATGGCCCGCCTGGCATTATGCCCAGTACATGACCTTACGGGACTTTCCTACTTGGCAGTACATCT | 0 nt Homology 1 |
| | | ACGTATTAGTCATCGCTATTACCATGGTGATGCGGTTTTGGCAGTACACCAATGGGCGTGGATAGCGG | |
| | | TTTGACTCACGGGGATTTCCAAGTCTCCACCCCATTGACGTCAATGGGAGTTTGTTTTGGCACCAAAAT | |
| | | CAACGGGACTTTCCAAAATGTCGTAATAACCCCGCCCCGTTGACGCAAATGGGGGTAGGCGTGTACG | |
| | | GTGGGAGGTCTATATAAGCAGAGCTCGTTTAGTGAACCGTC (SEQ ID NO: 21005) | |
| | 314 nt | TAAATGGCCCGCCTGGCATTATGCCCAGTACATGACCTTACGGGACTTTCCTACTTGGCAGTACATCTA | 0 nt Homology 1 |
| | | CGTATTAGTCATCGCTATTACCATGGTGATGCGGTTTTGGCAGTACACCAATGGGCGTGGATAGCGGT | |
| | | TTGACTCACGGGGATTTCCAAGTCTCCACCCCATTGACGTCAATGGGAGTTTGTTTTGGCACCAAAATC | |
| | | AACGGGACTTTCCAAAATGTCGTAATAACCCCGCCCCGTTGACGCAAATGGGCGGTAGGCGTGTACG | |
| | | GTGGGAGGTCTATATAAGCAGAGCTCGTTTAGTGAACCGTC (SEQ ID NO: 21006) | |
| | 313 nt | AAATGGCCCGCCTGGCATTATGCCCAGTACATGACCTTACGGGACTTTCCTACTTGGCAGTACATCTAC | 0 nt Homology 1 |
| | | GTATTAGTCATCGCTATTACCATGGTGATGCGGTTTTGGCAGTACACCAATGGGCGTGGATAGCGGTT | |
| | | TGACTCACGGGGATTTCCAAGTCTCCACCCCATTGACGTCAATGGGAGTTTGTTTTGGCACCAAAATCA | |
| | | ACGGGACTTTCCAAAATGTCGTAATAACCCCGCCCCGTTGACGCAAATGGGCGGTAGGCGTGTACGGT | |
| | | GGGAGGTCTATATAAGCAGAGCTCGTTTAGTGAACCGTC (SEQ ID NO: 21007) | |
| | 312 nt | AATGGCCCGCCTGGCATTATGCCCAGTACATGACCTTACGGGACTTTCCTACTTGGCAGTACATCTACG | 0 nt Homology 1 |
| | | TATTAGTCATCGCTATTACCATGGTGATGCGGTTTTGGCAGTACACCAATGGGCGTGGATAGCGGTTT | |
| | | GACTCACGGGGATTTCCAAGTCTCCACCCCATTGACGTCAATGGGAGTTTGTTTTGGCACCAAAATCAA | |
| | | CGGGACTTTCCAAAATGTCGTAATAACCCCGCCCCGTTGACGCAAATGGGCGGTAGGCGTGTACGGT | |
| | | GGGAGGTCTATATAAGCAGAGCTCGTTTAGTGAACCGTC (SEQ ID NO: 21008) | |
| | 311 nt | ATGGCCCGCCTGGCATTATGCCCAGTACATGACCTTACGGGACTTTCCTACTTGGCAGTACATCTACGT | 0 nt Homology 1 |
| | | ATTAGTCATCGCTATTACCATGGTGATGCGGTTTTGGCAGTACACCAATGGGCGTGGATAGCGGTTTG | |
| | | ACTCACGGGGATTTCCAAGTCTCCACCCCATTGACGTCAATGGGAGTTTGTTTTGGCACCAAAATCAAC | |
| | | GGGACTTTCCAAAATGTCGTAATAACCCCGCCCCGTTGACGCAAATGGGCGGTAGGCGTGTACGGTG | |
| | | GGAGGTCTATATAAGCAGAGCTCGTTTAGTGAACCGTC (SEQ ID NO: 21009) | |
| | 310 nt | TGGCCCGCCTGGCATTATGCCCAGTACATGACCTTACGGGACTTTCCTACTTGGCAGTACATCTACGTA | 0 nt Homology 1 |
| | | TTAGTCATCGCTATTACCATGGTGATGCGGTTTTGGCAGTACACCAATGGGCGTGGATAGCGGTTTGA | |
| | | CTCACGGGGATTTCCAAGTCTCCACCCCATTGACGTCAATGGGAGTTTGTTTTGGCACCAAAATCAACG | |
| | | GGACTTTCCAAAATGTCGTAATAACCCCGCCCCGTTGACGCAAATGGGCGGTAGGCGTGTACGGTGG | |
| | | GAGGTCTATATAAGCAGAGCTCGTTTAGTGAACCGTC (SEQ ID NO: 21010) | |
| | 309 nt | GGCCCGCCTGGCATTATGCCCAGTACATGACCTTACGGGACTTTCCTACTTGGCAGTACATCTACGTAT | 0 nt Homology 1 |
| | | TAGTCATCGCTATTACCATGGTGATGCGGTTTTGGCAGTACACCAATGGGCGTGGATAGCGGTTTGAC | |
| | | TCACGGGGATTTCCAAGTCTCCACCCCATTGACGTCAATGGGAGTTTGTTTTGGCACCAAAATCAACGG | |
| | | GACTTTCCAAAATGTCGTAATAACCCCGCCCCGTTGACGCAAATGGGGGTAGGCGTGTACGGTGGG | |
| | | AGGTCTATATAAGCAGAGCTCGTTTAGTGAACCGTC (SEQ ID NO: 21011) | |
| | 308 nt | GCCCGCCTGGCATTATGCCCAGTACATGACCTTACGGGACTTTCCTACTTGGCAGTACATCTACGTATT | 0 nt Homology 1 |
| | | AGTCATCGCTATTACCATGGTGATGCGGTTTTGGCAGTACACCAATGGGCGTGGATAGCGGTTTGACT | |
| | | CACGGGGATTTCCAAGTCTCCACCCCATTGACGTCAATGGGAGTTTGTTTTGGCACCAAAATCAACGG | |
| | | GACTTTCCAAAATGTCGTAATAACCCCGCCCCGTTGACGCAAATGGGCGGTAGGCGTGTACGGTGGG | |
| | | AGGTCTATATAAGCAGAGCTCGTTTAGTGAACCGTC (SEQ ID NO: 21012) | |
| | 307 nt | CCCGCCTGGCATTATGCCCAGTACATGACCTTACGGGACTTTCCTACTTGGCAGTACATCTACGTATTA | 0 nt Homology 1 |
| | | GTCATCGCTATTACCATGGTGATGCGGTTTTGGCAGTACACCAATGGGCGTGGATAGCGGTTTGACTC | |
| | | ACGGGGATTTCCAAGTCTCCACCCCATTGACGTCAATGGGAGTTTGTTTTGGCACCAAAATCAACGGG | |
| | | ACTTTCCAAAATGTCGTAATAACCCCGCCCCGTTGACGCAAATGGGCGGTAGGCGTGTACGGTGGGA | |
| | | GGTCTATATAAGCAGAGCTCGTTTAGTGAACCGTC (SEQ ID NO: 21013) | |
| | 306 nt | CCGCCTGGCATTATGCCCAGTACATGACCTTACGGGACTTTCCTACTTGGCAGTACATCTACGTATTAG | 0 nt Homology 1 |
| | | TCATCGCTATTACCATGGTGATGCGGTTTTGGCAGTACACCAATGGGCGTGGATAGCGGTTTGACTCA | |
| | | CGGGGATTTCCAAGTCTCCACCCCATTGACGTCAATGGGAGTTTGTTTTGGCACCAAAATCAACGGGA | |
| | | CTTTCCAAAATGTCGTAATAACCCCGCCCCGTTGACGCAAATGGGCGGTAGGCGTGTACGGTGGGAG | |
| | | GTCTATATAAGCAGAGCTCGTTTAGTGAACCGTC (SEQ ID NO: 21014) | |
| | 305 nt | CGCCTGGCATTATGCCCAGTACATGACCTTACGGGACTTTCCTACTTGGCAGTACATCTACGTATTAGT | 0 nt Homology 1 |
| | | CATCGCTATTACCATGGTGATGCGGTTTTGGCAGTACACCAATGGGCGTGGATAGCGGTTTGACTCAC | |
| | | GGGGATTTCCAAGTCTCCACCCCATTGACGTCAATGGGAGTTTGTTTTGGCACCAAAATCAACGGGAC | |
| | | TTTCCAAAATGTCGTAATAACCCCGCCCCGTTGACGCAAATGGGCGGTAGGCGTGTACGGTGGGAGG | |
| | | TCTATATAAGCAGAGCTCGTTTAGTGAACCGTC (SEQ ID NO: 21015) | |
| | 304 nt | GCCTGGCATTATGCCCAGTACATGACCTTACGGGACTTTCCTACTTGGCAGTACATCTACGTATTAGTC | 0 nt Homology 1 |
| | | ATCGCTATTACCATGGTGATGCGGTTTTGGCAGTACACCAATGGGCGTGGATAGCGGTTTGACTCACG | |
| | | GGGATTTCCAAGTCTCCACCCCATTGACGTCAATGGGAGTTTGTTTTGGCACCAAAATCAACGGGACTT | |
| | | TCCAAAATGTCGTAATAACCCCGCCCCGTTGACGCAAATGGGCGGTAGGCGTGTACGGTGGGAGGTC | |
| | | TATATAAGCAGAGCTCGTTTAGTGAACCGTC (SEQ ID NO: 21016) | |
| | 303 nt | CCTGGCATTATGCCCAGTACATGACCTTACGGGACTTTCCTACTTGGCAGTACATCTACGTATTAGTCAT | 0 nt Homology 1 |
| | | CGCTATTACCATGGTGATGCGGTTTTGGCAGTACACCAATGGGCGTGGATAGCGGTTTGACTCACGGG | |
| | | GATTTCCAAGTCTCCACCCCATTGACGTCAATGGGAGTTTGTTTTGGCACCAAAATCAACGGGACTTTC | |
| | | CAAAATGTCGTAATAACCCCGCCCCGTTGACGCAAATGGGCGGTAGGCGTGTACGGTGGGAGGTCTA | |
| | | TATAAGCAGAGCTCGTTTAGTGAACCGTC (SEQ ID NO: 21017) | |
| | 302 nt | CTGGCATTATGCCCAGTACATGACCTTACGGGACTTTCCTACTTGGCAGTACATCTACGTATTAGTCATC | 0 nt Homology 1 |
| | | GCTATTACCATGGTGATGCGGTTTTGGCAGTACACCAATGGGCGTGGATAGCGGTTTGACTCACGGG | |
| | | GATTTCCAAGTCTCCACCCCATTGACGTCAATGGGAGTTTGTTTTGGCACCAAAATCAACGGGACTTTC | |
| | | CAAAATGTCGTAATAACCCCGCCCCGTTGACGCAAATGGGCGGTAGGCGTGTACGGTGGGAGGTCTA | |
| | | TATAAGCAGAGCTCGTTTAGTGAACCGTC (SEQ ID NO: 21018) | |
| | 301 nt | TGGCATTATGCCCAGTACATGACCTTACGGGACTTTCCTACTTGGCAGTACATCTACGTATTAGTCATC | 0 nt Homology 1 |
| | | GCTATTACCATGGTGATGCGGTTTTGGCAGTACACCAATGGGCGTGGATAGCGGTTTGACTCACGGG | |
| | | GATTTCCAAGTCTCCACCCCATTGACGTCAATGGGAGTTTGTTTTGGCACCAAAATCAACGGGACTTTC | |
| | | CAAAATGTCGTAATAACCCCGCCCCGTTGACGCAAATGGGCGGTAGGCGTGTACGGTGGGAGGTCTA | |
| | | TATAAGCAGAGCTCGTTTAGTGAACCGTC (SEQ ID NO: 21019) | |
| | 300 nt | GGCATTATGCCCAGTACATGACCTTACGGGACTTTCCTACTTGGCAGTACATCTACGTATTAGTCATCG | 0 nt Homology 1 |
| | | CTATTACCATGGTGATGCGGTTTTGGCAGTACACCAATGGGCGTGGATAGCGGTTTGACTCACGGGGA | |
| | | TTTCCAAGTCTCCACCCCATTGACGTCAATGGGAGTTTGTTTTGGCACCAAAATCAACGGGACTTTCCA | |
| | | AAATGTCGTAATAACCCCGCCCCGTTGACGCAAATGGGCGGTAGGCGTGTACGGTGGGAGGTCTATA | |
| | | TAAGCAGAGCTCGTTTAGTGAACCGTC (SEQ ID NO: 21020) | |
| | 299 nt | GCATTATGCCCAGTACATGACCTTACGGGACTTTCCTACTTGGCAGTACATCTACGTATTAGTCATCGCT | 0 nt Homology 1 |
| | | ATTACCATGGTGATGCGGTTTTGGCAGTACACCAATGGGCGTGGATAGCGGTTTGACTCACGGGGATT | |
| | | TCCAAGTCTCCACCCCATTGACGTCAATGGGAGTTTGTTTTGGCACCAAAATCAACGGGACTTTCCAAA | |
| | | ATGTCGTAATAACCCCGCCCCGTTGACGCAAATGGGCGGTAGGCGTGTACGGTGGGAGGTCTATATA | |
| | | AGCAGAGCTCGTTTAGTGAACCGTC (SEQ ID NO: 21021) | |
| | 298 nt | CATTATGCCCAGTACATGACCTTACGGGACTTTCCTACTTGGCAGTACATCTACGTATTAGTCATCGCTA | 0 nt Homology 1 |
| | | TTACCATGGTGATGCGGTTTTGGCAGTACACCAATGGGCGTGGATAGCGGTTTGACTCACGGGGATTT | |
| | | CCAAGTCTCCACCCCATTGACGTCAATGGGAGTTTGTTTTGGCACCAAAATCAACGGGACTTTCCAAAA | |
| | | TGTCGTAATAACCCCGCCCCGTTGACGCAAATGGGCGGTAGGCGTGTACGGTGGGAGGTCTATATAA | |
| | | GCAGAGCTCGTTTAGTGAACCGTC (SEQ ID NO: 21022) | |
| | 297 nt | ATTATGCCCAGTACATGACCTTACGGGACTTTCCTACTTGGCAGTACATCTACGTATTAGTCATCGCTAT | 0 nt Homology 1 |
| | | TACCATGGTGATGCGGTTTTGGCAGTACACCAATGGGCGTGGATAGCGGTTTGACTCACGGGGATTTC | |
| | | CAAGTCTCCACCCCATTGACGTCAATGGGAGTTTGTTTTGGCACCAAAATCAACGGGACTTTCCAAAAT | |
| | | GTCGTAATAACCCCGCCCCGTTGACGCAAATGGGCGGTAGGCGTGTACGGTGGGAGGTCTATATAAG | |
| | | CAGAGCTCGTTTAGTGAACCGTC (SEQ ID NO: 21023) | |
| | 296 nt | TTATGCCCAGTACATGACCTTACGGGACTTTCCTACTTGGCAGTACATCTACGTATTAGTCATCGCTATT | 0 nt Homology 1 |
| | | ACCATGGTGATGCGGTTTTGGCAGTACACCAATGGGCGTGGATAGCGGTTTGACTCACGGGGATTTCC | |
| | | AAGTCTCCACCCCATTGACGTCAATGGGAGTTTGTTTTGGCACCAAAATCAACGGGACTTTCCAAAATG | |
| | | TCGTAATAACCCCGCCCCGTTGACGCAAATGGGCGGTAGGCGTGTACGGTGGGAGGTCTATATAAGC | |
| | | AGAGCTCGTTTAGTGAACCGTC (SEQ ID NO: 21024) | |
| | 295 nt | TATGCCCAGTACATGACCTTACGGGACTTTCCTACTTGGCAGTACATCTACGTATTAGTCATCGCTATTA | 0 nt Homology 1 |
| | | CCATGGTGATGCGGTTTTGGCAGTACACCAATGGGCGTGGATAGCGGTTTGACTCACGGGGATTTCCA | |
| | | AGTCTCCACCCCATTGACGTCAATGGGAGTTTGTTTTGGCACCAAAATCAACGGGACTTTCCAAAATGT | |
| | | CGTAATAACCCCGCCCCGTTGACGCAAATGGGCGGTAGGCGTGTACGGTGGGAGGTCTATATAAGCA | |
| | | GAGCTCGTTTAGTGAACCGTC (SEQ ID NO: 21025) | |
| | 294 nt | ATGCCCAGTACATGACCTTACGGGACTTTCCTACTTGGCAGTACATCTACGTATTAGTCATCGCTATTAC | 0 nt Homology 1 |
| | | CATGGTGATGCGGTTTTGGCAGTACACCAATGGGCGTGGATAGCGGTTTGACTCACGGGGATTTCCAA | |
| | | GTCTCCACCCCATTGACGTCAATGGGAGTTTGTTTTGGCACCAAAATCAACGGGACTTTCCAAAATGTC | |
| | | GTAATAACCCCGCCCCGTTGACGCAAATGGGCGGTAGGCGTGTACGGTGGGAGGTCTATATAAGCAG | |
| | | AGCTCGTTTAGTGAACCGTC (SEQ ID NO: 21026) | |
| | 293 nt | TGCCCAGTACATGACCTTACGGGACTTTCCTACTTGGCAGTACATCTACGTATTAGTCATCGCTATTACC | 0 nt Homology 1 |
| | | ATGGTGATGCGGTTTTGGCAGTACACCAATGGGCGTGGATAGCGGTTTGACTCACGGGGATTTCCAA | |
| | | GTCTCCACCCCATTGACGTCAATGGGAGTTTGTTTTGGCACCAAAATCAACGGGACTTTCCAAAATGTC | |
| | | GTAATAACCCCGCCCCGTTGACGCAAATGGGCGGTAGGCGTGTACGGTGGGAGGTCTATATAAGCAG | |
| | | AGCTCGTTTAGTGAACCGTC (SEQ ID NO: 21027) | |
| | 292 nt | GCCCAGTACATGACCTTACGGGACTTTCCTACTTGGCAGTACATCTACGTATTAGTCATCGCTATTACCA | 0 nt Homology 1 |
| | | TGGTGATGCGGTTTTGGCAGTACACCAATGGGCGTGGATAGCGGTTTGACTCACGGGGATTTCCAAG | |
| | | TCTCCACCCCATTGACGTCAATGGGAGTTTGTTTTGGCACCAAAATCAACGGGACTTTCCAAAATGTCG | |
| | | TAATAACCCCGCCCCGTTGACGCAAATGGGCGGTAGGCGTGTACGGTGGGAGGTCTATATAAGCAGA | |
| | | GCTCGTTTAGTGAACCGTC (SEQ ID NO: 21028) | |
| | 291 nt | CCCAGTACATGACCTTACGGGACTTTCCTACTTGGCAGTACATCTACGTATTAGTCATCGCTATTACCAT | 0 nt Homology 1 |
| | | GGTGATGCGGTTTTGGCAGTACACCAATGGGCGTGGATAGCGGTTTGACTCACGGGGATTTCCAAGT | |
| | | CTCCACCCCATTGACGTCAATGGGAGTTTGTTTTGGCACCAAAATCAACGGGACTTTCCAAAATGTCGT | |
| | | AATAACCCCGCCCCGTTGACGCAAATGGGCGGTAGGCGTGTACGGTGGGAGGTCTATATAAGCAGAG | |
| | | CTCGTTTAGTGAACCGTC (SEQ ID NO: 21029) | |
| | 290 nt | CCAGTACATGACCTTACGGGACTTTCCTACTTGGCAGTACATCTACGTATTAGTCATCGCTATTACCATG | 0 nt Homology 1 |
| | | GTGATGCGGTTTTGGCAGTACACCAATGGGCGTGGATAGCGGTTTGACTCACGGGGATTTCCAAGTCT | |
| | | CCACCCCATTGACGTCAATGGGAGTTTGTTTTGGCACCAAAATCAACGGGACTTTCCAAAATGTCGTAA | |
| | | TAACCCCGCCCCGTTGACGCAAATGGGCGGTAGGCGTGTACGGTGGGAGGTCTATATAAGCAGAGCT | |
| | | CGTTTAGTGAACCGTC (SEQ ID NO: 21030) | |
| | 289 nt | CAGTACATGACCTTACGGGACTTTCCTACTTGGCAGTACATCTACGTATTAGTCATCGCTATTACCATG | 0 nt Homology 1 |
| | | GTGATGCGGTTTTGGCAGTACACCAATGGGCGTGGATAGCGGTTTGACTCACGGGGATTTCCAAGTCT | |
| | | CCACCCCATTGACGTCAATGGGAGTTTGTTTTGGCACCAAAATCAACGGGACTTTCCAAAATGTCGTAA | |
| | | TAACCCCGCCCCGTTGACGCAAATGGGCGGTAGGCGTGTACGGTGGGAGGTCTATATAAGCAGAGCT | |
| | | CGTTTAGTGAACCGTC (SEQ ID NO: 21031) | |
| | 288 nt | AGTACATGACCTTACGGGACTTTCCTACTTGGCAGTACATCTACGTATTAGTCATCGCTATTACCATGGT | 0 nt Homology 1 |
| | | GATGCGGTTTTGGCAGTACACCAATGGGCGTGGATAGCGGTTTGACTCACGGGGATTTCCAAGTCTCC | |
| | | ACCCCATTGACGTCAATGGGAGTTTGTTTTGGCACCAAAATCAACGGGACTTTCCAAAATGTCGTAATA | |
| | | ACCCCGCCCCGTTGACGCAAATGGGGGTAGGCGTGTACGGTGGGAGGTCTATATAAGCAGAGCTCG | |
| | | TTTAGTGAACCGTC (SEQ ID NO: 21032) | |
| | 287 nt | GTACATGACCTTACGGGACTTTCCTACTTGGCAGTACATCTACGTATTAGTCATCGCTATTACCATGGT | 0 nt Homology 1 |
| | | GATGCGGTTTTGGCAGTACACCAATGGGCGTGGATAGCGGTTTGACTCACGGGGATTTCCAAGTCTCC | |
| | | ACCCCATTGACGTCAATGGGAGTTTGTTTTGGCACCAAAATCAACGGGACTTTCCAAAATGTCGTAATA | |
| | | ACCCCGCCCCGTTGACGCAAATGGGCGGTAGGCGTGTACGGTGGGAGGTCTATATAAGCAGAGCTCG | |
| | | TTTAGTGAACCGTC (SEQ ID NO: 21033) | |
| | 286 nt | TACATGACCTTACGGGACTTTCCTACTTGGCAGTACATCTACGTATTAGTCATCGCTATTACCATGGTGA | 0 nt Homology 1 |
| | | TGCGGTTTTGGCAGTACACCAATGGGCGTGGATAGCGGTTTGACTCACGGGGATTTCCAAGTCTCCAC | |
| | | CCCATTGACGTCAATGGGAGTTTGTTTTGGCACCAAAATCAACGGGACTTTCCAAAATGTCGTAATAAC | |
| | | CCCGCCCCGTTGACGCAAATGGGCGGTAGGCGTGTACGGTGGGAGGTCTATATAAGCAGAGCTCGTT | |
| | | TAGTGAACCGTC (SEQ ID NO: 21034) | |
| | 285 nt | ACATGACCTTACGGGACTTTCCTACTTGGCAGTACATCTACGTATTAGTCATCGCTATTACCATGGTGAT | 0 nt Homology 1 |
| | | GCGGTTTTGGCAGTACACCAATGGGCGTGGATAGCGGTTTGACTCACGGGGATTTCCAAGTCTCCACC | |
| | | CCATTGACGTCAATGGGAGTTTGTTTTGGCACCAAAATCAACGGGACTTTCCAAAATGTCGTAATAACC | |
| | | CCGCCCCGTTGACGCAAATGGGCGGTAGGCGTGTACGGTGGGAGGTCTATATAAGCAGAGCTCGTTT | |
| | | AGTGAACCGTC (SEQ ID NO: 21035) | |
| | 284 nt | CATGACCTTACGGGACTTTCCTACTTGGCAGTACATCTACGTATTAGTCATCGCTATTACCATGGTGAT | 0 nt Homology 1 |
| | | GCGGTTTTGGCAGTACACCAATGGGCGTGGATAGCGGTTTGACTCACGGGGATTTCCAAGTCTCCACC | |
| | | CCATTGACGTCAATGGGAGTTTGTTTTGGCACCAAAATCAACGGGACTTTCCAAAATGTCGTAATAACC | |
| | | CCGCCCCGTTGACGCAAATGGGCGGTAGGCGTGTACGGTGGGAGGTCTATATAAGCAGAGCTCGTTT | |
| | | AGTGAACCGTC (SEQ ID NO: 21036) | |
| | 283 nt | ATGACCTTACGGGACTTTCCTACTTGGCAGTACATCTACGTATTAGTCATCGCTATTACCATGGTGATG | 0 nt Homology 1 |
| | | CGGTTTTGGCAGTACACCAATGGGCGTGGATAGCGGTTTGACTCACGGGGATTTCCAAGTCTCCACCC | |
| | | CATTGACGTCAATGGGAGTTTGTTTTGGCACCAAAATCAACGGGACTTTCCAAAATGTCGTAATAACCC | |
| | | CGCCCCGTTGACGCAAATGGGCGGTAGGCGTGTACGGTGGGAGGTCTATATAAGCAGAGCTCGTTTA | |
| | | GTGAACCGTC (SEQ ID NO: 21037) | |
| | 282 nt | TGACCTTACGGGACTTTCCTACTTGGCAGTACATCTACGTATTAGTCATCGCTATTACCATGGTGATGC | 0 nt Homology 1 |
| | | GGTTTTGGCAGTACACCAATGGGCGTGGATAGCGGTTTGACTCACGGGGATTTCCAAGTCTCCACCCC | |
| | | ATTGACGTCAATGGGAGTTTGTTTTGGCACCAAAATCAACGGGACTTTCCAAAATGTCGTAATAACCCC | |
| | | GCCCCGTTGACGCAAATGGGCGGTAGGCGTGTACGGTGGGAGGTCTATATAAGCAGAGCTCGTTTAG | |
| | | TGAACCGTC (SEQ ID NO: 21038) | |
| | 281 nt | GACCTTACGGGACTTTCCTACTTGGCAGTACATCTACGTATTAGTCATCGCTATTACCATGGTGATGCG | 0 nt Homology 1 |
| | | GTTTTGGCAGTACACCAATGGGCGTGGATAGCGGTTTGACTCACGGGGATTTCCAAGTCTCCACCCCA | |
| | | TTGACGTCAATGGGAGTTTGTTTTGGCACCAAAATCAACGGGACTTTCCAAAATGTCGTAATAACCCCG | |
| | | CCCCGTTGACGCAAATGGGCGGTAGGCGTGTACGGTGGGAGGTCTATATAAGCAGAGCTCGTTTAGT | |
| | | GAACCGTC (SEQ ID NO: 21039) | |
| | 280 nt | ACCTTACGGGACTTTCCTACTTGGCAGTACATCTACGTATTAGTCATCGCTATTACCATGGTGATGCGG | 0 nt Homology 1 |
| | | TTTTGGCAGTACACCAATGGGCGTGGATAGCGGTTTGACTCACGGGGATTTCCAAGTCTCCACCCCATT | |
| | | GACGTCAATGGGAGTTTGTTTTGGCACCAAAATCAACGGGACTTTCCAAAATGTCGTAATAACCCCGC | |
| | | CCCGTTGACGCAAATGGGCGGTAGGCGTGTACGGTGGGAGGTCTATATAAGCAGAGCTCGTTTAGTG | |
| | | AACCGTC (SEQ ID NO: 21040) | |
| | 279 nt | CCTTACGGGACTTTCCTACTTGGCAGTACATCTACGTATTAGTCATCGCTATTACCATGGTGATGCGGT | 0 nt Homology 1 |
| | | TTTGGCAGTACACCAATGGGCGTGGATAGCGGTTTGACTCACGGGGATTTCCAAGTCTCCACCCCATT | |
| | | GACGTCAATGGGAGTTTGTTTTGGCACCAAAATCAACGGGACTTTCCAAAATGTCGTAATAACCCCGC | |
| | | CCCGTTGACGCAAATGGGCGGTAGGCGTGTACGGTGGGAGGTCTATATAAGCAGAGCTCGTTTAGTG | |
| | | AACCGTC (SEQ ID NO: 21041) | |
| | 278 nt | CTTACGGGACTTTCCTACTTGGCAGTACATCTACGTATTAGTCATCGCTATTACCATGGTGATGCGGTTT | 0 nt Homology 1 |
| | | TGGCAGTACACCAATGGGCGTGGATAGCGGTTTGACTCACGGGGATTTCCAAGTCTCCACCCCATTGA | |
| | | CGTCAATGGGAGTTTGTTTTGGCACCAAAATCAACGGGACTTTCCAAAATGTCGTAATAACCCCGCCCC | |
| | | GTTGACGCAAATGGGCGGTAGGCGTGTACGGTGGGAGGTCTATATAAGCAGAGCTCGTTTAGTGAAC | |
| | | CGTC (SEQ ID NO: 21042) | |
| | 277 nt | TTACGGGACTTTCCTACTTGGCAGTACATCTACGTATTAGTCATCGCTATTACCATGGTGATGCGGTTTT | 0 nt Homology 1 |
| | | GGCAGTACACCAATGGGCGTGGATAGCGGTTTGACTCACGGGGATTTCCAAGTCTCCACCCCATTGAC | |
| | | GTCAATGGGAGTTTGTTTTGGCACCAAAATCAACGGGACTTTCCAAAATGTCGTAATAACCCCGCCCC | |
| | | GTTGACGCAAATGGGCGGTAGGCGTGTACGGTGGGAGGTCTATATAAGCAGAGCTCGTTTAGTGAAC | |
| | | CGTC (SEQ ID NO: 21043) | |
| | 276 nt | TACGGGACTTTCCTACTTGGCAGTACATCTACGTATTAGTCATCGCTATTACCATGGTGATGCGGTTTT | 0 nt Homology 1 |
| | | GGCAGTACACCAATGGGCGTGGATAGCGGTTTGACTCACGGGGATTTCCAAGTCTCCACCCCATTGAC | |
| | | GTCAATGGGAGTTTGTTTTGGCACCAAAATCAACGGGACTTTCCAAAATGTCGTAATAACCCCGCCCC | |
| | | GTTGACGCAAATGGGCGGTAGGCGTGTACGGTGGGAGGTCTATATAAGCAGAGCTCGTTTAGTGAAC | |
| | | CGTC (SEQ ID NO: 21044) | |
| | 275 nt | ACGGGACTTTCCTACTTGGCAGTACATCTACGTATTAGTCATCGCTATTACCATGGTGATGCGGTTTTG | 0 nt Homology 1 |
| | | GCAGTACACCAATGGGCGTGGATAGCGGTTTGACTCACGGGGATTTCCAAGTCTCCACCCCATTGACG | |
| | | TCAATGGGAGTTTGTTTTGGCACCAAAATCAACGGGACTTTCCAAAATGTCGTAATAACCCCGCCCCGT | |
| | | TGACGCAAATGGGCGGTAGGCGTGTACGGTGGGAGGTCTATATAAGCAGAGCTCGTTTAGTGAACCG | |
| | | TC (SEQ ID NO: 21045) | |
| | 274 nt | CGGGACTTTCCTACTTGGCAGTACATCTACGTATTAGTCATCGCTATTACCATGGTGATGCGGTTTTGG | 0 nt Homology 1 |
| | | CAGTACACCAATGGGCGTGGATAGCGGTTTGACTCACGGGGATTTCCAAGTCTCCACCCCATTGACGT | |
| | | CAATGGGAGTTTGTTTTGGCACCAAAATCAACGGGACTTTCCAAAATGTCGTAATAACCCCGCCCCGTT | |
| | | GACGCAAATGGGCGGTAGGCGTGTACGGTGGGAGGTCTATATAAGCAGAGCTCGTTTAGTGAACCGT | |
| | | C (SEQ ID NO: 21046) | |
| | 273 nt | GGGACTTTCCTACTTGGCAGTACATCTACGTATTAGTCATCGCTATTACCATGGTGATGCGGTTTTGGC | 0 nt Homology 1 |
| | | AGTACACCAATGGGCGTGGATAGCGGTTTGACTCACGGGGATTTCCAAGTCTCCACCCCATTGACGTC | |
| | | AATGGGAGTTTGTTTTGGCACCAAAATCAACGGGACTTTCCAAAATGTCGTAATAACCCCGCCCCGTTG | |
| | | ACGCAAATGGGCGGTAGGCGTGTACGGTGGGAGGTCTATATAAGCAGAGCTCGTTTAGTGAACCGTC | |
| | | (SEQ ID NO: 21047) | |
| | 272 nt | GGACTTTCCTACTTGGCAGTACATCTACGTATTAGTCATCGCTATTACCATGGTGATGCGGTTTTGGCA | 0 nt Homology 1 |
| | | GTACACCAATGGGCGTGGATAGCGGTTTGACTCACGGGGATTTCCAAGTCTCCACCCCATTGACGTCA | |
| | | ATGGGAGTTTGTTTTGGCACCAAAATCAACGGGACTTTCCAAAATGTCGTAATAACCCCGCCCCGTTGA | |
| | | CGCAAATGGGCGGTAGGCGTGTACGGTGGGAGGTCTATATAAGCAGAGCTCGTTTAGTGAACCGTC | |
| | | (SEQ ID NO: 21048) | |
| | 271 nt | GACTTTCCTACTTGGCAGTACATCTACGTATTAGTCATCGCTATTACCATGGTGATGCGGTTTTGGCAG | 0 nt Homology 1 |
| | | TACACCAATGGGCGTGGATAGCGGTTTGACTCACGGGGATTTCCAAGTCTCCACCCCATTGACGTCAA | |
| | | TGGGAGTTTGTTTTGGCACCAAAATCAACGGGACTTTCCAAAATGTCGTAATAACCCCGCCCCGTTGAC | |
| | | GCAAATGGGCGGTAGGCGTGTACGGTGGGAGGTCTATATAAGCAGAGCTCGTTTAGTGAACCGTC | |
| | | (SEQ ID NO: 21049) | |
| | 270 nt | ACTTTCCTACTTGGCAGTACATCTACGTATTAGTCATCGCTATTACCATGGTGATGCGGTTTTGGCAGT | 0 nt Homology 1 |
| | | ACACCAATGGGCGTGGATAGCGGTTTGACTCACGGGGATTTCCAAGTCTCCACCCCATTGACGTCAAT | |
| | | GGGAGTTTGTTTTGGCACCAAAATCAACGGGACTTTCCAAAATGTCGTAATAACCCCGCCCCGTTGAC | |
| | | GCAAATGGGCGGTAGGCGTGTACGGTGGGAGGTCTATATAAGCAGAGCTCGTTTAGTGAACCGTC | |
| | | (SEQ ID NO: 21050) | |
| | 269 nt | CTTTCCTACTTGGCAGTACATCTACGTATTAGTCATCGCTATTACCATGGTGATGCGGTTTTGGCAGTAC | 0 nt Homology 1 |
| | | ACCAATGGGCGTGGATAGCGGTTTGACTCACGGGGATTTCCAAGTCTCCACCCCATTGACGTCAATGG | |
| | | GAGTTTGTTTTGGCACCAAAATCAACGGGACTTTCCAAAATGTCGTAATAACCCCGCCCCGTTGACGCA | |
| | | AATGGGCGGTAGGCGTGTACGGTGGGAGGTCTATATAAGCAGAGCTCGTTTAGTGAACCGTC (SEQ | |
| | | ID NO: 21051) | |
| | 268 nt | TTTCCTACTTGGCAGTACATCTACGTATTAGTCATCGCTATTACCATGGTGATGCGGTTTTGGCAGTAC | 0 nt Homology 1 |
| | | ACCAATGGGCGTGGATAGCGGTTTGACTCACGGGGATTTCCAAGTCTCCACCCCATTGACGTCAATGG | |
| | | GAGTTTGTTTTGGCACCAAAATCAACGGGACTTTCCAAAATGTCGTAATAACCCCGCCCCGTTGACGCA | |
| | | AATGGGCGGTAGGCGTGTACGGTGGGAGGTCTATATAAGCAGAGCTCGTTTAGTGAACCGTC (SEQ | |
| | | ID NO: 21052) | |
| | 267 nt | TTCCTACTTGGCAGTACATCTACGTATTAGTCATCGCTATTACCATGGTGATGCGGTTTTGGCAGTACA | 0 nt Homology 1 |
| | | CCAATGGGCGTGGATAGCGGTTTGACTCACGGGGATTTCCAAGTCTCCACCCCATTGACGTCAATGGG | |
| | | AGTTTGTTTTGGCACCAAAATCAACGGGACTTTCCAAAATGTCGTAATAACCCCGCCCCGTTGACGCAA | |
| | | ATGGGCGGTAGGCGTGTACGGTGGGAGGTCTATATAAGCAGAGCTCGTTTAGTGAACCGTC (SEQ ID | |
| | | NO: 21053) | |
| | 266 nt | TCCTACTTGGCAGTACATCTACGTATTAGTCATCGCTATTACCATGGTGATGCGGTTTTGGCAGTACAC | 0 nt Homology 1 |
| | | CAATGGGCGTGGATAGCGGTTTGACTCACGGGGATTTCCAAGTCTCCACCCCATTGACGTCAATGGGA | |
| | | GTTTGTTTTGGCACCAAAATCAACGGGACTTTCCAAAATGTCGTAATAACCCCGCCCCGTTGACGCAAA | |
| | | TGGGCGGTAGGCGTGTACGGTGGGAGGTCTATATAAGCAGAGCTCGTTTAGTGAACCGTC (SEQ ID | |
| | | NO: 21054) | |
| | 265 nt | CCTACTTGGCAGTACATCTACGTATTAGTCATCGCTATTACCATGGTGATGCGGTTTTGGCAGTACACC | 0 nt Homology 1 |
| | | AATGGGCGTGGATAGCGGTTTGACTCACGGGGATTTCCAAGTCTCCACCCCATTGACGTCAATGGGAG | |
| | | TTTGTTTTGGCACCAAAATCAACGGGACTTTCCAAAATGTCGTAATAACCCCGCCCCGTTGACGCAAAT | |
| | | GGGCGGTAGGCGTGTACGGTGGGAGGTCTATATAAGCAGAGCTCGTTTAGTGAACCGTC (SEQ ID | |
| | | NO: 21055) | |
| | 264 nt | CTACTTGGCAGTACATCTACGTATTAGTCATCGCTATTACCATGGTGATGCGGTTTTGGCAGTACACCA | 0 nt Homology 1 |
| | | ATGGGCGTGGATAGCGGTTTGACTCACGGGGATTTCCAAGTCTCCACCCCATTGACGTCAATGGGAGT | |
| | | TTGTTTTGGCACCAAAATCAACGGGACTTTCCAAAATGTCGTAATAACCCCGCCCCGTTGACGCAAATG | |
| | | GGCGGTAGGCGTGTACGGTGGGAGGTCTATATAAGCAGAGCTCGTTTAGTGAACCGTC (SEQ ID NO: | |
| | | 21056) | |
| | 263 nt | TACTTGGCAGTACATCTACGTATTAGTCATCGCTATTACCATGGTGATGCGGTTTTGGCAGTACACCAA | 0 nt Homology 1 |
| | | TGGGCGTGGATAGCGGTTTGACTCACGGGGATTTCCAAGTCTCCACCCCATTGACGTCAATGGGAGTT | |
| | | TGTTTTGGCACCAAAATCAACGGGACTTTCCAAAATGTCGTAATAACCCCGCCCCGTTGACGCAAATG | |
| | | GGCGGTAGGCGTGTACGGTGGGAGGTCTATATAAGCAGAGCTCGTTTAGTGAACCGTC (SEQ ID NO: | |
| | | 21057) | |
| | 262 nt | ACTTGGCAGTACATCTACGTATTAGTCATCGCTATTACCATGGTGATGCGGTTTTGGCAGTACACCAAT | 0 nt Homology 1 |
| | | GGGCGTGGATAGCGGTTTGACTCACGGGGATTTCCAAGTCTCCACCCCATTGACGTCAATGGGAGTTT | |
| | | GTTTTGGCACCAAAATCAACGGGACTTTCCAAAATGTCGTAATAACCCCGCCCCGTTGACGCAAATGG | |
| | | GCGGTAGGCGTGTACGGTGGGAGGTCTATATAAGCAGAGCTCGTTTAGTGAACCGTC (SEQ ID NO: | |
| | | 21058) | |
| | 261 nt | CTTGGCAGTACATCTACGTATTAGTCATCGCTATTACCATGGTGATGCGGTTTTGGCAGTACACCAATG | 0 nt Homology 1 |
| | | GGCGTGGATAGCGGTTTGACTCACGGGGATTTCCAAGTCTCCACCCCATTGACGTCAATGGGAGTTTG | |
| | | TTTTGGCACCAAAATCAACGGGACTTTCCAAAATGTCGTAATAACCCCGCCCCGTTGACGCAAATGGG | |
| | | CGGTAGGCGTGTACGGTGGGAGGTCTATATAAGCAGAGCTCGTTTAGTGAACCGTC (SEQ ID NO: | |
| | | 21059) | |
| | 260 nt | TTGGCAGTACATCTACGTATTAGTCATCGCTATTACCATGGTGATGCGGTTTTGGCAGTACACCAATGG | 0 nt Homology 1 |
| | | GCGTGGATAGCGGTTTGACTCACGGGGATTTCCAAGTCTCCACCCCATTGACGTCAATGGGAGTTTGT | |
| | | TTTGGCACCAAAATCAACGGGACTTTCCAAAATGTCGTAATAACCCCGCCCCGTTGACGCAAATGGGC | |
| | | GGTAGGCGTGTACGGTGGGAGGTCTATATAAGCAGAGCTCGTTTAGTGAACCGTC (SEQ ID NO: | |
| | | 21060) | |
| | 259 nt | TGGCAGTACATCTACGTATTAGTCATCGCTATTACCATGGTGATGCGGTTTTGGCAGTACACCAATGGG | 0 nt Homology 1 |
| | | CGTGGATAGCGGTTTGACTCACGGGGATTTCCAAGTCTCCACCCCATTGACGTCAATGGGAGTTTGTTT | |
| | | TGGCACCAAAATCAACGGGACTTTCCAAAATGTCGTAATAACCCCGCCCCGTTGACGCAAATGGGCGG | |
| | | TAGGCGTGTACGGTGGGAGGTCTATATAAGCAGAGCTCGTTTAGTGAACCGTC (SEQ ID NO: 21061) | |
| | 258 nt | GGCAGTACATCTACGTATTAGTCATCGCTATTACCATGGTGATGCGGTTTTGGCAGTACACCAATGGG | 0 nt Homology 1 |
| | | CGTGGATAGCGGTTTGACTCACGGGGATTTCCAAGTCTCCACCCCATTGACGTCAATGGGAGTTTGTTT | |
| | | TGGCACCAAAATCAACGGGACTTTCCAAAATGTCGTAATAACCCCGCCCCGTTGACGCAAATGGGCGG | |
| | | TAGGCGTGTACGGTGGGAGGTCTATATAAGCAGAGCTCGTTTAGTGAACCGTC (SEQ ID NO: 21062) | |
| | 257 nt | GCAGTACATCTACGTATTAGTCATCGCTATTACCATGGTGATGCGGTTTTGGCAGTACACCAATGGGC | 0 nt Homology 1 |
| | | GTGGATAGCGGTTTGACTCACGGGGATTTCCAAGTCTCCACCCCATTGACGTCAATGGGAGTTTGTTTT | |
| | | GGCACCAAAATCAACGGGACTTTCCAAAATGTCGTAATAACCCCGCCCCGTTGACGCAAATGGGCGGT | |
| | | AGGCGTGTACGGTGGGAGGTCTATATAAGCAGAGCTCGTTTAGTGAACCGTC (SEQ ID NO: 21063) | |
| | 256 nt | CAGTACATCTACGTATTAGTCATCGCTATTACCATGGTGATGCGGTTTTGGCAGTACACCAATGGGCGT | 0 nt Homology 1 |
| | | GGATAGCGGTTTGACTCACGGGGATTTCCAAGTCTCCACCCCATTGACGTCAATGGGAGTTTGTTTTG | |
| | | GCACCAAAATCAACGGGACTTTCCAAAATGTCGTAATAACCCCGCCCCGTTGACGCAAATGGGCGGTA | |
| | | GGCGTGTACGGTGGGAGGTCTATATAAGCAGAGCTCGTTTAGTGAACCGTC (SEQ ID NO: 21064) | |
| | 255 nt | AGTACATCTACGTATTAGTCATCGCTATTACCATGGTGATGCGGTTTTGGCAGTACACCAATGGGCGTG | 0 nt Homology 1 |
| | | GATAGCGGTTTGACTCACGGGGATTTCCAAGTCTCCACCCCATTGACGTCAATGGGAGTTTGTTTTGGC | |
| | | ACCAAAATCAACGGGACTTTCCAAAATGTCGTAATAACCCCGCCCCGTTGACGCAAATGGGGGTAGG | |
| | | CGTGTACGGTGGGAGGTCTATATAAGCAGAGCTCGTTTAGTGAACCGTC (SEQ ID NO: 21065) | |
| | 254 nt | GTACATCTACGTATTAGTCATCGCTATTACCATGGTGATGCGGTTTTGGCAGTACACCAATGGGCGTG | 0 nt Homology 1 |
| | | GATAGCGGTTTGACTCACGGGGATTTCCAAGTCTCCACCCCATTGACGTCAATGGGAGTTTGTTTTGGC | |
| | | ACCAAAATCAACGGGACTTTCCAAAATGTCGTAATAACCCCGCCCCGTTGACGCAAATGGGCGGTAGG | |
| | | CGTGTACGGTGGGAGGTCTATATAAGCAGAGCTCGTTTAGTGAACCGTC (SEQ ID NO: 21066) | |
| | 253 nt | TACATCTACGTATTAGTCATCGCTATTACCATGGTGATGCGGTTTTGGCAGTACACCAATGGGCGTGGA | 0 nt Homology 1 |
| | | TAGCGGTTTGACTCACGGGGATTTCCAAGTCTCCACCCCATTGACGTCAATGGGAGTTTGTTTTGGCAC | |
| | | CAAAATCAACGGGACTTTCCAAAATGTCGTAATAACCCCGCCCCGTTGACGCAAATGGGCGGTAGGCG | |
| | | TGTACGGTGGGAGGTCTATATAAGCAGAGCTCGTTTAGTGAACCGTC (SEQ ID NO: 21067) | |
| | 252 nt | ACATCTACGTATTAGTCATCGCTATTACCATGGTGATGCGGTTTTGGCAGTACACCAATGGGCGTGGAT | 0 nt Homology 1 |
| | | AGCGGTTTGACTCACGGGGATTTCCAAGTCTCCACCCCATTGACGTCAATGGGAGTTTGTTTTGGCACC | |
| | | AAAATCAACGGGACTTTCCAAAATGTCGTAATAACCCCGCCCCGTTGACGCAAATGGGGGTAGGCGT | |
| | | GTACGGTGGGAGGTCTATATAAGCAGAGCTCGTTTAGTGAACCGTC (SEQ ID NO: 21068) | |
| | 251 nt | CATCTACGTATTAGTCATCGCTATTACCATGGTGATGCGGTTTTGGCAGTACACCAATGGGCGTGGATA | 0 nt Homology 1 |
| | | GCGGTTTGACTCACGGGGATTTCCAAGTCTCCACCCCATTGACGTCAATGGGAGTTTGTTTTGGCACCA | |
| | | AAATCAACGGGACTTTCCAAAATGTCGTAATAACCCCGCCCCGTTGACGCAAATGGGCGGTAGGCGTG | |
| | | TACGGTGGGAGGTCTATATAAGCAGAGCTCGTTTAGTGAACCGTC (SEQ ID NO: 21069) | |
| | 250 nt | ATCTACGTATTAGTCATCGCTATTACCATGGTGATGCGGTTTTGGCAGTACACCAATGGGCGTGGATA | 0 nt Homology 1 |
| | | GCGGTTTGACTCACGGGGATTTCCAAGTCTCCACCCCATTGACGTCAATGGGAGTTTGTTTTGGCACCA | |
| | | AAATCAACGGGACTTTCCAAAATGTCGTAATAACCCCGCCCCGTTGACGCAAATGGGCGGTAGGCGTG | |
| | | TACGGTGGGAGGTCTATATAAGCAGAGCTCGTTTAGTGAACCGTC (SEQ ID NO: 21070) | |
| | 249 nt | TCTACGTATTAGTCATCGCTATTACCATGGTGATGCGGTTTTGGCAGTACACCAATGGGCGTGGATAG | 0 nt Homology 1 |
| | | CGGTTTGACTCACGGGGATTTCCAAGTCTCCACCCCATTGACGTCAATGGGAGTTTGTTTTGGCACCAA | |
| | | AATCAACGGGACTTTCCAAAATGTCGTAATAACCCCGCCCCGTTGACGCAAATGGGCGGTAGGCGTGT | |
| | | ACGGTGGGAGGTCTATATAAGCAGAGCTCGTTTAGTGAACCGTC (SEQ ID NO: 21071) | |
| | 248 nt | CTACGTATTAGTCATCGCTATTACCATGGTGATGCGGTTTTGGCAGTACACCAATGGGCGTGGATAGC | 0 nt Homology 1 |
| | | GGTTTGACTCACGGGGATTTCCAAGTCTCCACCCCATTGACGTCAATGGGAGTTTGTTTTGGCACCAAA | |
| | | ATCAACGGGACTTTCCAAAATGTCGTAATAACCCCGCCCCGTTGACGCAAATGGGCGGTAGGCGTGTA | |
| | | CGGTGGGAGGTCTATATAAGCAGAGCTCGTTTAGTGAACCGTC (SEQ ID NO: 21072) | |
| | 247 nt | TACGTATTAGTCATCGCTATTACCATGGTGATGCGGTTTTGGCAGTACACCAATGGGCGTGGATAGCG | 0 nt Homology 1 |
| | | GTTTGACTCACGGGGATTTCCAAGTCTCCACCCCATTGACGTCAATGGGAGTTTGTTTTGGCACCAAAA | |
| | | TCAACGGGACTTTCCAAAATGTCGTAATAACCCCGCCCCGTTGACGCAAATGGGCGGTAGGCGTGTAC | |
| | | GGTGGGAGGTCTATATAAGCAGAGCTCGTTTAGTGAACCGTC (SEQ ID NO: 21073) | |
| | 246 nt | ACGTATTAGTCATCGCTATTACCATGGTGATGCGGTTTTGGCAGTACACCAATGGGCGTGGATAGCGG | 0 nt Homology 1 |
| | | TTTGACTCACGGGGATTTCCAAGTCTCCACCCCATTGACGTCAATGGGAGTTTGTTTTGGCACCAAAAT | |
| | | CAACGGGACTTTCCAAAATGTCGTAATAACCCCGCCCCGTTGACGCAAATGGGCGGTAGGCGTGTACG | |
| | | GTGGGAGGTCTATATAAGCAGAGCTCGTTTAGTGAACCGTC (SEQ ID NO: 21074) | |
| | 245 nt | CGTATTAGTCATCGCTATTACCATGGTGATGCGGTTTTGGCAGTACACCAATGGGCGTGGATAGCGGT | 0 nt Homology 1 |
| | | TTGACTCACGGGGATTTCCAAGTCTCCACCCCATTGACGTCAATGGGAGTTTGTTTTGGCACCAAAATC | |
| | | AACGGGACTTTCCAAAATGTCGTAATAACCCCGCCCCGTTGACGCAAATGGGCGGTAGGCGTGTACG | |
| | | GTGGGAGGTCTATATAAGCAGAGCTCGTTTAGTGAACCGTC (SEQ ID NO: 21075) | |
| | 244 nt | GTATTAGTCATCGCTATTACCATGGTGATGCGGTTTTGGCAGTACACCAATGGGCGTGGATAGCGGTT | 0 nt Homology 1 |
| | | TGACTCACGGGGATTTCCAAGTCTCCACCCCATTGACGTCAATGGGAGTTTGTTTTGGCACCAAAATCA | |
| | | ACGGGACTTTCCAAAATGTCGTAATAACCCCGCCCCGTTGACGCAAATGGGCGGTAGGCGTGTACGGT | |
| | | GGGAGGTCTATATAAGCAGAGCTCGTTTAGTGAACCGTC (SEQ ID NO: 21076) | |
| | 243 nt | TATTAGTCATCGCTATTACCATGGTGATGCGGTTTTGGCAGTACACCAATGGGCGTGGATAGCGGTTT | 0 nt Homology 1 |
| | | GACTCACGGGGATTTCCAAGTCTCCACCCCATTGACGTCAATGGGAGTTTGTTTTGGCACCAAAATCAA | |
| | | CGGGACTTTCCAAAATGTCGTAATAACCCCGCCCCGTTGACGCAAATGGGCGGTAGGCGTGTACGGT | |
| | | GGGAGGTCTATATAAGCAGAGCTCGTTTAGTGAACCGTC (SEQ ID NO: 21077) | |
| | 242 nt | ATTAGTCATCGCTATTACCATGGTGATGCGGTTTTGGCAGTACACCAATGGGCGTGGATAGCGGTTTG | 0 nt Homology 1 |
| | | ACTCACGGGGATTTCCAAGTCTCCACCCCATTGACGTCAATGGGAGTTTGTTTTGGCACCAAAATCAAC | |
| | | GGGACTTTCCAAAATGTCGTAATAACCCCGCCCCGTTGACGCAAATGGGCGGTAGGCGTGTACGGTG | |
| | | GGAGGTCTATATAAGCAGAGCTCGTTTAGTGAACCGTC (SEQ ID NO: 21078) | |
| | 241 nt | TTAGTCATCGCTATTACCATGGTGATGCGGTTTTGGCAGTACACCAATGGGCGTGGATAGCGGTTTGA | 0 nt Homology 1 |
| | | CTCACGGGGATTTCCAAGTCTCCACCCCATTGACGTCAATGGGAGTTTGTTTTGGCACCAAAATCAACG | |
| | | GGACTTTCCAAAATGTCGTAATAACCCCGCCCCGTTGACGCAAATGGGCGGTAGGCGTGTACGGTGG | |
| | | GAGGTCTATATAAGCAGAGCTCGTTTAGTGAACCGTC (SEQ ID NO: 21079) | |
| | 240 nt | TAGTCATCGCTATTACCATGGTGATGCGGTTTTGGCAGTACACCAATGGGCGTGGATAGCGGTTTGAC | 0 nt Homology 1 |
| | | TCACGGGGATTTCCAAGTCTCCACCCCATTGACGTCAATGGGAGTTTGTTTTGGCACCAAAATCAACGG | |
| | | GACTTTCCAAAATGTCGTAATAACCCCGCCCCGTTGACGCAAATGGGCGGTAGGCGTGTACGGTGGG | |
| | | AGGTCTATATAAGCAGAGCTCGTTTAGTGAACCGTC (SEQ ID NO: 21080) | |
| | 239 nt | AGTCATCGCTATTACCATGGTGATGCGGTTTTGGCAGTACACCAATGGGCGTGGATAGCGGTTTGACT | 0 nt Homology 1 |
| | | CACGGGGATTTCCAAGTCTCCACCCCATTGACGTCAATGGGAGTTTGTTTTGGCACCAAAATCAACGG | |
| | | GACTTTCCAAAATGTCGTAATAACCCCGCCCCGTTGACGCAAATGGGCGGTAGGCGTGTACGGTGGG | |
| | | AGGTCTATATAAGCAGAGCTCGTTTAGTGAACCGTC (SEQ ID NO: 21081) | |
| | 238 nt | GTCATCGCTATTACCATGGTGATGCGGTTTTGGCAGTACACCAATGGGCGTGGATAGCGGTTTGACTC | 0 nt Homology 1 |
| | | ACGGGGATTTCCAAGTCTCCACCCCATTGACGTCAATGGGAGTTTGTTTTGGCACCAAAATCAACGGG | |
| | | ACTTTCCAAAATGTCGTAATAACCCCGCCCCGTTGACGCAAATGGGCGGTAGGCGTGTACGGTGGGA | |
| | | GGTCTATATAAGCAGAGCTCGTTTAGTGAACCGTC (SEQ ID NO: 21082) | |
| | 237 nt | TCATCGCTATTACCATGGTGATGCGGTTTTGGCAGTACACCAATGGGCGTGGATAGCGGTTTGACTCA | 0 nt Homology 1 |
| | | CGGGGATTTCCAAGTCTCCACCCCATTGACGTCAATGGGAGTTTGTTTTGGCACCAAAATCAACGGGA | |
| | | CTTTCCAAAATGTCGTAATAACCCCGCCCCGTTGACGCAAATGGGCGGTAGGCGTGTACGGTGGGAG | |
| | | GTCTATATAAGCAGAGCTCGTTTAGTGAACCGTC (SEQ ID NO: 21083) | |
| | 236 nt | CATCGCTATTACCATGGTGATGCGGTTTTGGCAGTACACCAATGGGCGTGGATAGCGGTTTGACTCAC | 0 nt Homology 1 |
| | | GGGGATTTCCAAGTCTCCACCCCATTGACGTCAATGGGAGTTTGTTTTGGCACCAAAATCAACGGGAC | |
| | | TTTCCAAAATGTCGTAATAACCCCGCCCCGTTGACGCAAATGGGCGGTAGGCGTGTACGGTGGGAGG | |
| | | TCTATATAAGCAGAGCTCGTTTAGTGAACCGTC (SEQ ID NO: 21084) | |
| | 235 nt | ATCGCTATTACCATGGTGATGCGGTTTTGGCAGTACACCAATGGGCGTGGATAGCGGTTTGACTCACG | 0 nt Homology 1 |
| | | GGGATTTCCAAGTCTCCACCCCATTGACGTCAATGGGAGTTTGTTTTGGCACCAAAATCAACGGGACTT | |
| | | TCCAAAATGTCGTAATAACCCCGCCCCGTTGACGCAAATGGGCGGTAGGCGTGTACGGTGGGAGGTC | |
| | | TATATAAGCAGAGCTCGTTTAGTGAACCGTC (SEQ ID NO: 21085) | |
| | 234 nt | TCGCTATTACCATGGTGATGCGGTTTTGGCAGTACACCAATGGGCGTGGATAGCGGTTTGACTCACGG | 0 nt Homology 1 |
| | | GGATTTCCAAGTCTCCACCCCATTGACGTCAATGGGAGTTTGTTTTGGCACCAAAATCAACGGGACTTT | |
| | | CCAAAATGTCGTAATAACCCCGCCCCGTTGACGCAAATGGGCGGTAGGCGTGTACGGTGGGAGGTCT | |
| | | ATATAAGCAGAGCTCGTTTAGTGAACCGTC (SEQ ID NO: 21086) | |
| | 233 nt | CGCTATTACCATGGTGATGCGGTTTTGGCAGTACACCAATGGGCGTGGATAGCGGTTTGACTCACGGG | 0 nt Homology 1 |
| | | GATTTCCAAGTCTCCACCCCATTGACGTCAATGGGAGTTTGTTTTGGCACCAAAATCAACGGGACTTTC | |
| | | CAAAATGTCGTAATAACCCCGCCCCGTTGACGCAAATGGGCGGTAGGCGTGTACGGTGGGAGGTCTA | |
| | | TATAAGCAGAGCTCGTTTAGTGAACCGTC (SEQ ID NO: 21087) | |
| | 232 nt | GCTATTACCATGGTGATGCGGTTTTGGCAGTACACCAATGGGCGTGGATAGCGGTTTGACTCACGGG | 0 nt Homology 1 |
| | | GATTTCCAAGTCTCCACCCCATTGACGTCAATGGGAGTTTGTTTTGGCACCAAAATCAACGGGACTTTC | |
| | | CAAAATGTCGTAATAACCCCGCCCCGTTGACGCAAATGGGCGGTAGGCGTGTACGGTGGGAGGTCTA | |
| | | TATAAGCAGAGCTCGTTTAGTGAACCGTC (SEQ ID NO: 21088) | |
| | 231 nt | CTATTACCATGGTGATGCGGTTTTGGCAGTACACCAATGGGCGTGGATAGCGGTTTGACTCACGGGGA | 0 nt Homology 1 |
| | | TTTCCAAGTCTCCACCCCATTGACGTCAATGGGAGTTTGTTTTGGCACCAAAATCAACGGGACTTTCCA | |
| | | AAATGTCGTAATAACCCCGCCCCGTTGACGCAAATGGGCGGTAGGCGTGTACGGTGGGAGGTCTATA | |
| | | TAAGCAGAGCTCGTTTAGTGAACCGTC (SEQ ID NO: 21089) | |
| | 230 nt | TATTACCATGGTGATGCGGTTTTGGCAGTACACCAATGGGCGTGGATAGCGGTTTGACTCACGGGGAT | 0 nt Homology 1 |
| | | TTCCAAGTCTCCACCCCATTGACGTCAATGGGAGTTTGTTTTGGCACCAAAATCAACGGGACTTTCCAA | |
| | | AATGTCGTAATAACCCCGCCCCGTTGACGCAAATGGGCGGTAGGCGTGTACGGTGGGAGGTCTATAT | |
| | | AAGCAGAGCTCGTTTAGTGAACCGTC (SEQ ID NO: 21090) | |
| | 229 nt | ATTACCATGGTGATGCGGTTTTGGCAGTACACCAATGGGCGTGGATAGCGGTTTGACTCACGGGGATT | 0 nt Homology 1 |
| | | TCCAAGTCTCCACCCCATTGACGTCAATGGGAGTTTGTTTTGGCACCAAAATCAACGGGACTTTCCAAA | |
| | | ATGTCGTAATAACCCCGCCCCGTTGACGCAAATGGGCGGTAGGCGTGTACGGTGGGAGGTCTATATA | |
| | | AGCAGAGCTCGTTTAGTGAACCGTC (SEQ ID NO: 21091) | |
| | 228 nt | TTACCATGGTGATGCGGTTTTGGCAGTACACCAATGGGCGTGGATAGCGGTTTGACTCACGGGGATTT | 0 nt Homology 1 |
| | | CCAAGTCTCCACCCCATTGACGTCAATGGGAGTTTGTTTTGGCACCAAAATCAACGGGACTTTCCAAAA | |
| | | TGTCGTAATAACCCCGCCCCGTTGACGCAAATGGGCGGTAGGCGTGTACGGTGGGAGGTCTATATAA | |
| | | GCAGAGCTCGTTTAGTGAACCGTC (SEQ ID NO: 21092) | |
| | 227 nt | TACCATGGTGATGCGGTTTTGGCAGTACACCAATGGGCGTGGATAGCGGTTTGACTCACGGGGATTTC | 0 nt Homology 1 |
| | | CAAGTCTCCACCCCATTGACGTCAATGGGAGTTTGTTTTGGCACCAAAATCAACGGGACTTTCCAAAAT | |
| | | GTCGTAATAACCCCGCCCCGTTGACGCAAATGGGCGGTAGGCGTGTACGGTGGGAGGTCTATATAAG | |
| | | CAGAGCTCGTTTAGTGAACCGTC (SEQ ID NO: 21093) | |
| | 226 nt | ACCATGGTGATGCGGTTTTGGCAGTACACCAATGGGCGTGGATAGCGGTTTGACTCACGGGGATTTCC | 0 nt Homology 1 |
| | | AAGTCTCCACCCCATTGACGTCAATGGGAGTTTGTTTTGGCACCAAAATCAACGGGACTTTCCAAAATG | |
| | | TCGTAATAACCCCGCCCCGTTGACGCAAATGGGCGGTAGGCGTGTACGGTGGGAGGTCTATATAAGC | |
| | | AGAGCTCGTTTAGTGAACCGTC (SEQ ID NO: 21094) | |
| | 225 nt | CCATGGTGATGCGGTTTTGGCAGTACACCAATGGGCGTGGATAGCGGTTTGACTCACGGGGATTTCCA | 0 nt Homology 1 |
| | | AGTCTCCACCCCATTGACGTCAATGGGAGTTTGTTTTGGCACCAAAATCAACGGGACTTTCCAAAATGT | |
| | | CGTAATAACCCCGCCCCGTTGACGCAAATGGGCGGTAGGCGTGTACGGTGGGAGGTCTATATAAGCA | |
| | | GAGCTCGTTTAGTGAACCGTC (SEQ ID NO: 21095) | |
| | 224 nt | CATGGTGATGCGGTTTTGGCAGTACACCAATGGGCGTGGATAGCGGTTTGACTCACGGGGATTTCCAA | 0 nt Homology 1 |
| | | GTCTCCACCCCATTGACGTCAATGGGAGTTTGTTTTGGCACCAAAATCAACGGGACTTTCCAAAATGTC | |
| | | GTAATAACCCCGCCCCGTTGACGCAAATGGGCGGTAGGCGTGTACGGTGGGAGGTCTATATAAGCAG | |
| | | AGCTCGTTTAGTGAACCGTC (SEQ ID NO: 21096) | |
| | 223 nt | ATGGTGATGCGGTTTTGGCAGTACACCAATGGGCGTGGATAGCGGTTTGACTCACGGGGATTTCCAA | 0 nt Homology 1 |
| | | GTCTCCACCCCATTGACGTCAATGGGAGTTTGTTTTGGCACCAAAATCAACGGGACTTTCCAAAATGTC | |
| | | GTAATAACCCCGCCCCGTTGACGCAAATGGGCGGTAGGCGTGTACGGTGGGAGGTCTATATAAGCAG | |
| | | AGCTCGTTTAGTGAACCGTC (SEQ ID NO: 21097) | |
| | 222 nt | TGGTGATGCGGTTTTGGCAGTACACCAATGGGCGTGGATAGCGGTTTGACTCACGGGGATTTCCAAG | 0 nt Homology 1 |
| | | TCTCCACCCCATTGACGTCAATGGGAGTTTGTTTTGGCACCAAAATCAACGGGACTTTCCAAAATGTCG | |
| | | TAATAACCCCGCCCCGTTGACGCAAATGGGCGGTAGGCGTGTACGGTGGGAGGTCTATATAAGCAGA | |
| | | GCTCGTTTAGTGAACCGTC (SEQ ID NO: 21098) | |
| | 221 nt | GGTGATGCGGTTTTGGCAGTACACCAATGGGCGTGGATAGCGGTTTGACTCACGGGGATTTCCAAGT | 0 nt Homology 1 |
| | | CTCCACCCCATTGACGTCAATGGGAGTTTGTTTTGGCACCAAAATCAACGGGACTTTCCAAAATGTCGT | |
| | | AATAACCCCGCCCCGTTGACGCAAATGGGCGGTAGGCGTGTACGGTGGGAGGTCTATATAAGCAGAG | |
| | | CTCGTTTAGTGAACCGTC (SEQ ID NO: 21099) | |
| | 220 nt | GTGATGCGGTTTTGGCAGTACACCAATGGGCGTGGATAGCGGTTTGACTCACGGGGATTTCCAAGTCT | 0 nt Homology 1 |
| | | CCACCCCATTGACGTCAATGGGAGTTTGTTTTGGCACCAAAATCAACGGGACTTTCCAAAATGTCGTAA | |
| | | TAACCCCGCCCCGTTGACGCAAATGGGCGGTAGGCGTGTACGGTGGGAGGTCTATATAAGCAGAGCT | |
| | | CGTTTAGTGAACCGTC (SEQ ID NO: 21100) | |
| | 219 nt | TGATGCGGTTTTGGCAGTACACCAATGGGCGTGGATAGCGGTTTGACTCACGGGGATTTCCAAGTCTC | 0 nt Homology 1 |
| | | CACCCCATTGACGTCAATGGGAGTTTGTTTTGGCACCAAAATCAACGGGACTTTCCAAAATGTCGTAAT | |
| | | AACCCCGCCCCGTTGACGCAAATGGGCGGTAGGCGTGTACGGTGGGAGGTCTATATAAGCAGAGCTC | |
| | | GTTTAGTGAACCGTC (SEQ ID NO: 21101) | |
| | 218 nt | GATGCGGTTTTGGCAGTACACCAATGGGCGTGGATAGCGGTTTGACTCACGGGGATTTCCAAGTCTCC | 0 nt Homology 1 |
| | | ACCCCATTGACGTCAATGGGAGTTTGTTTTGGCACCAAAATCAACGGGACTTTCCAAAATGTCGTAATA | |
| | | ACCCCGCCCCGTTGACGCAAATGGGCGGTAGGCGTGTACGGTGGGAGGTCTATATAAGCAGAGCTCG | |
| | | TTTAGTGAACCGTC (SEQ ID NO: 21102) | |
| | 217 nt | ATGCGGTTTTGGCAGTACACCAATGGGCGTGGATAGCGGTTTGACTCACGGGGATTTCCAAGTCTCCA | 0 nt Homology 1 |
| | | CCCCATTGACGTCAATGGGAGTTTGTTTTGGCACCAAAATCAACGGGACTTTCCAAAATGTCGTAATAA | |
| | | CCCCGCCCCGTTGACGCAAATGGGCGGTAGGCGTGTACGGTGGGAGGTCTATATAAGCAGAGCTCGT | |
| | | TTAGTGAACCGTC (SEQ ID NO: 21103) | |
| | 216 nt | TGCGGTTTTGGCAGTACACCAATGGGCGTGGATAGCGGTTTGACTCACGGGGATTTCCAAGTCTCCAC | 0 nt Homology 1 |
| | | CCCATTGACGTCAATGGGAGTTTGTTTTGGCACCAAAATCAACGGGACTTTCCAAAATGTCGTAATAAC | |
| | | CCCGCCCCGTTGACGCAAATGGGCGGTAGGCGTGTACGGTGGGAGGTCTATATAAGCAGAGCTCGTT | |
| | | TAGTGAACCGTC (SEQ ID NO: 21104) | |
| | 215 nt | GCGGTTTTGGCAGTACACCAATGGGCGTGGATAGCGGTTTGACTCACGGGGATTTCCAAGTCTCCACC | 0 nt Homology 1 |
| | | CCATTGACGTCAATGGGAGTTTGTTTTGGCACCAAAATCAACGGGACTTTCCAAAATGTCGTAATAACC | |
| | | CCGCCCCGTTGACGCAAATGGGCGGTAGGCGTGTACGGTGGGAGGTCTATATAAGCAGAGCTCGTTT | |
| | | AGTGAACCGTC (SEQ ID NO: 21105) | |
| | 214 nt | CGGTTTTGGCAGTACACCAATGGGCGTGGATAGCGGTTTGACTCACGGGGATTTCCAAGTCTCCACCC | 0 nt Homology 1 |
| | | CATTGACGTCAATGGGAGTTTGTTTTGGCACCAAAATCAACGGGACTTTCCAAAATGTCGTAATAACCC | |
| | | CGCCCCGTTGACGCAAATGGGCGGTAGGCGTGTACGGTGGGAGGTCTATATAAGCAGAGCTCGTTTA | |
| | | GTGAACCGTC (SEQ ID NO: 21106) | |
| | 213 nt | GGTTTTGGCAGTACACCAATGGGCGTGGATAGCGGTTTGACTCACGGGGATTTCCAAGTCTCCACCCC | 0 nt Homology 1 |
| | | ATTGACGTCAATGGGAGTTTGTTTTGGCACCAAAATCAACGGGACTTTCCAAAATGTCGTAATAACCCC | |
| | | GCCCCGTTGACGCAAATGGGCGGTAGGCGTGTACGGTGGGAGGTCTATATAAGCAGAGCTCGTTTAG | |
| | | TGAACCGTC (SEQ ID NO: 21107) | |
| | 212 nt | GTTTTGGCAGTACACCAATGGGCGTGGATAGCGGTTTGACTCACGGGGATTTCCAAGTCTCCACCCCA | 0 nt Homology 1 |
| | | TTGACGTCAATGGGAGTTTGTTTTGGCACCAAAATCAACGGGACTTTCCAAAATGTCGTAATAACCCCG | |
| | | CCCCGTTGACGCAAATGGGCGGTAGGCGTGTACGGTGGGAGGTCTATATAAGCAGAGCTCGTTTAGT | |
| | | GAACCGTC (SEQ ID NO: 21108) | |
| | 211 nt | TTTTGGCAGTACACCAATGGGCGTGGATAGCGGTTTGACTCACGGGGATTTCCAAGTCTCCACCCCATT | 0 nt Homology 1 |
| | | GACGTCAATGGGAGTTTGTTTTGGCACCAAAATCAACGGGACTTTCCAAAATGTCGTAATAACCCCGC | |
| | | CCCGTTGACGCAAATGGGCGGTAGGCGTGTACGGTGGGAGGTCTATATAAGCAGAGCTCGTTTAGTG | |
| | | AACCGTC (SEQ ID NO: 21109) | |
| | 210 nt | TTTGGCAGTACACCAATGGGCGTGGATAGCGGTTTGACTCACGGGGATTTCCAAGTCTCCACCCCATT | 0 nt Homology 1 |
| | | GACGTCAATGGGAGTTTGTTTTGGCACCAAAATCAACGGGACTTTCCAAAATGTCGTAATAACCCCGC | |
| | | CCCGTTGACGCAAATGGGCGGTAGGCGTGTACGGTGGGAGGTCTATATAAGCAGAGCTCGTTTAGTG | |
| | | AACCGTC (SEQ ID NO: 21110) | |
| | 209 nt | TTGGCAGTACACCAATGGGCGTGGATAGCGGTTTGACTCACGGGGATTTCCAAGTCTCCACCCCATTG | 0 nt Homology 1 |
| | | ACGTCAATGGGAGTTTGTTTTGGCACCAAAATCAACGGGACTTTCCAAAATGTCGTAATAACCCCGCCC | |
| | | CGTTGACGCAAATGGGCGGTAGGCGTGTACGGTGGGAGGTCTATATAAGCAGAGCTCGTTTAGTGAA | |
| | | CCGTC (SEQ ID NO: 21111) | |
| | 208 nt | TGGCAGTACACCAATGGGCGTGGATAGCGGTTTGACTCACGGGGATTTCCAAGTCTCCACCCCATTGA | 0 nt Homology 1 |
| | | CGTCAATGGGAGTTTGTTTTGGCACCAAAATCAACGGGACTTTCCAAAATGTCGTAATAACCCCGCCCC | |
| | | GTTGACGCAAATGGGCGGTAGGCGTGTACGGTGGGAGGTCTATATAAGCAGAGCTCGTTTAGTGAAC | |
| | | CGTC (SEQ ID NO: 21112) | |
| | 207 nt | GGCAGTACACCAATGGGCGTGGATAGCGGTTTGACTCACGGGGATTTCCAAGTCTCCACCCCATTGAC | 0 nt Homology 1 |
| | | GTCAATGGGAGTTTGTTTTGGCACCAAAATCAACGGGACTTTCCAAAATGTCGTAATAACCCCGCCCC | |
| | | GTTGACGCAAATGGGCGGTAGGCGTGTACGGTGGGAGGTCTATATAAGCAGAGCTCGTTTAGTGAAC | |
| | | CGTC (SEQ ID NO: 21113) | |
| | 206 nt | GCAGTACACCAATGGGCGTGGATAGCGGTTTGACTCACGGGGATTTCCAAGTCTCCACCCCATTGACG | 0 nt Homology 1 |
| | | TCAATGGGAGTTTGTTTTGGCACCAAAATCAACGGGACTTTCCAAAATGTCGTAATAACCCCGCCCCGT | |
| | | TGACGCAAATGGGCGGTAGGCGTGTACGGTGGGAGGTCTATATAAGCAGAGCTCGTTTAGTGAACCG | |
| | | TC (SEQ ID NO: 21114) | |
| | 205 nt | CAGTACACCAATGGGCGTGGATAGCGGTTTGACTCACGGGGATTTCCAAGTCTCCACCCCATTGACGT | 0 nt Homology 1 |
| | | CAATGGGAGTTTGTTTTGGCACCAAAATCAACGGGACTTTCCAAAATGTCGTAATAACCCCGCCCCGTT | |
| | | GACGCAAATGGGCGGTAGGCGTGTACGGTGGGAGGTCTATATAAGCAGAGCTCGTTTAGTGAACCGT | |
| | | C (SEQ ID NO: 21115) | |
| | 204 nt | AGTACACCAATGGGCGTGGATAGCGGTTTGACTCACGGGGATTTCCAAGTCTCCACCCCATTGACGTC | 0 nt Homology 1 |
| | | AATGGGAGTTTGTTTTGGCACCAAAATCAACGGGACTTTCCAAAATGTCGTAATAACCCCGCCCCGTTG | |
| | | ACGCAAATGGGCGGTAGGCGTGTACGGTGGGAGGTCTATATAAGCAGAGCTCGTTTAGTGAACCGTC | |
| | | (SEQ ID NO: 21116) | |
| | 203 nt | GTACACCAATGGGCGTGGATAGCGGTTTGACTCACGGGGATTTCCAAGTCTCCACCCCATTGACGTCA | 0 nt Homology 1 |
| | | ATGGGAGTTTGTTTTGGCACCAAAATCAACGGGACTTTCCAAAATGTCGTAATAACCCCGCCCCGTTGA | |
| | | CGCAAATGGGCGGTAGGCGTGTACGGTGGGAGGTCTATATAAGCAGAGCTCGTTTAGTGAACCGTC | |
| | | (SEQ ID NO: 21117) | |
| | 202 nt | TACACCAATGGGCGTGGATAGCGGTTTGACTCACGGGGATTTCCAAGTCTCCACCCCATTGACGTCAA | 0 nt Homology 1 |
| | | TGGGAGTTTGTTTTGGCACCAAAATCAACGGGACTTTCCAAAATGTCGTAATAACCCCGCCCCGTTGAC | |
| | | GCAAATGGGCGGTAGGCGTGTACGGTGGGAGGTCTATATAAGCAGAGCTCGTTTAGTGAACCGTC | |
| | | (SEQ ID NO: 21118) | |
| | 201 nt | ACACCAATGGGCGTGGATAGCGGTTTGACTCACGGGGATTTCCAAGTCTCCACCCCATTGACGTCAAT | 0 nt Homology 1 |
| | | GGGAGTTTGTTTTGGCACCAAAATCAACGGGACTTTCCAAAATGTCGTAATAACCCCGCCCCGTTGAC | |
| | | GCAAATGGGCGGTAGGCGTGTACGGTGGGAGGTCTATATAAGCAGAGCTCGTTTAGTGAACCGTC | |
| | | (SEQ ID NO: 21119) | |
| | 200 nt | CACCAATGGGCGTGGATAGCGGTTTGACTCACGGGGATTTCCAAGTCTCCACCCCATTGACGTCAATG | 0 nt Homology 1 |
| | | GGAGTTTGTTTTGGCACCAAAATCAACGGGACTTTCCAAAATGTCGTAATAACCCCGCCCCGTTGACGC | |
| | | AAATGGGCGGTAGGCGTGTACGGTGGGAGGTCTATATAAGCAGAGCTCGTTTAGTGAACCGTC (SEQ | |
| | | ID NO: 21120) | |
| | 199 nt | ACCAATGGGCGTGGATAGCGGTTTGACTCACGGGGATTTCCAAGTCTCCACCCCATTGACGTCAATGG | 0 nt Homology 1 |
| | | GAGTTTGTTTTGGCACCAAAATCAACGGGACTTTCCAAAATGTCGTAATAACCCCGCCCCGTTGACGCA | |
| | | AATGGGCGGTAGGCGTGTACGGTGGGAGGTCTATATAAGCAGAGCTCGTTTAGTGAACCGTC (SEQ | |
| | | ID NO: 21121) | |
| | 198 nt | CCAATGGGCGTGGATAGCGGTTTGACTCACGGGGATTTCCAAGTCTCCACCCCATTGACGTCAATGGG | 0 nt Homology 1 |
| | | AGTTTGTTTTGGCACCAAAATCAACGGGACTTTCCAAAATGTCGTAATAACCCCGCCCCGTTGACGCAA | |
| | | ATGGGCGGTAGGCGTGTACGGTGGGAGGTCTATATAAGCAGAGCTCGTTTAGTGAACCGTC (SEQ ID | |
| | | NO: 21122) | |
| | 197 nt | CAATGGGCGTGGATAGCGGTTTGACTCACGGGGATTTCCAAGTCTCCACCCCATTGACGTCAATGGGA | 0 nt Homology 1 |
| | | GTTTGTTTTGGCACCAAAATCAACGGGACTTTCCAAAATGTCGTAATAACCCCGCCCCGTTGACGCAAA | |
| | | TGGGCGGTAGGCGTGTACGGTGGGAGGTCTATATAAGCAGAGCTCGTTTAGTGAACCGTC (SEQ ID | |
| | | NO: 21123) | |
| | 196 nt | AATGGGCGTGGATAGCGGTTTGACTCACGGGGATTTCCAAGTCTCCACCCCATTGACGTCAATGGGAG | 0 nt Homology 1 |
| | | TTTGTTTTGGCACCAAAATCAACGGGACTTTCCAAAATGTCGTAATAACCCCGCCCCGTTGACGCAAAT | |
| | | GGGCGGTAGGCGTGTACGGTGGGAGGTCTATATAAGCAGAGCTCGTTTAGTGAACCGTC (SEQ ID | |
| | | NO: 21124) | |
| | 195 nt | ATGGGCGTGGATAGCGGTTTGACTCACGGGGATTTCCAAGTCTCCACCCCATTGACGTCAATGGGAGT | 0 nt Homology 1 |
| | | TTGTTTTGGCACCAAAATCAACGGGACTTTCCAAAATGTCGTAATAACCCCGCCCCGTTGACGCAAATG | |
| | | GGCGGTAGGCGTGTACGGTGGGAGGTCTATATAAGCAGAGCTCGTTTAGTGAACCGTC (SEQ ID NO: | |
| | | 21125) | |
| | 194 nt | TGGGCGTGGATAGCGGTTTGACTCACGGGGATTTCCAAGTCTCCACCCCATTGACGTCAATGGGAGTT | 0 nt Homology 1 |
| | | TGTTTTGGCACCAAAATCAACGGGACTTTCCAAAATGTCGTAATAACCCCGCCCCGTTGACGCAAATG | |
| | | GGCGGTAGGCGTGTACGGTGGGAGGTCTATATAAGCAGAGCTCGTTTAGTGAACCGTC (SEQ ID NO: | |
| | | 21126) | |
| | 193 nt | GGGCGTGGATAGCGGTTTGACTCACGGGGATTTCCAAGTCTCCACCCCATTGACGTCAATGGGAGTTT | 0 nt Homology 1 |
| | | GTTTTGGCACCAAAATCAACGGGACTTTCCAAAATGTCGTAATAACCCCGCCCCGTTGACGCAAATGG | |
| | | GCGGTAGGCGTGTACGGTGGGAGGTCTATATAAGCAGAGCTCGTTTAGTGAACCGTC (SEQ ID NO: | |
| | | 21127) | |
| | 192 nt | GGCGTGGATAGCGGTTTGACTCACGGGGATTTCCAAGTCTCCACCCCATTGACGTCAATGGGAGTTTG | 0 nt Homology 1 |
| | | TTTTGGCACCAAAATCAACGGGACTTTCCAAAATGTCGTAATAACCCCGCCCCGTTGACGCAAATGGG | |
| | | CGGTAGGCGTGTACGGTGGGAGGTCTATATAAGCAGAGCTCGTTTAGTGAACCGTC (SEQ ID NO: | |
| | | 21128) | |
| | 191 nt | GCGTGGATAGCGGTTTGACTCACGGGGATTTCCAAGTCTCCACCCCATTGACGTCAATGGGAGTTTGT | 0 nt Homology 1 |
| | | TTTGGCACCAAAATCAACGGGACTTTCCAAAATGTCGTAATAACCCCGCCCCGTTGACGCAAATGGGC | |
| | | GGTAGGCGTGTACGGTGGGAGGTCTATATAAGCAGAGCTCGTTTAGTGAACCGTC (SEQ ID NO: | |
| | | 21129) | |
| | 190 nt | CGTGGATAGCGGTTTGACTCACGGGGATTTCCAAGTCTCCACCCCATTGACGTCAATGGGAGTTTGTTT | 0 nt Homology 1 |
| | | TGGCACCAAAATCAACGGGACTTTCCAAAATGTCGTAATAACCCCGCCCCGTTGACGCAAATGGGCGG | |
| | | TAGGCGTGTACGGTGGGAGGTCTATATAAGCAGAGCTCGTTTAGTGAACCGTC (SEQ ID NO: 21130) | |
| | 189 nt | GTGGATAGCGGTTTGACTCACGGGGATTTCCAAGTCTCCACCCCATTGACGTCAATGGGAGTTTGTTTT | 0 nt Homology 1 |
| | | GGCACCAAAATCAACGGGACTTTCCAAAATGTCGTAATAACCCCGCCCCGTTGACGCAAATGGGCGGT | |
| | | AGGCGTGTACGGTGGGAGGTCTATATAAGCAGAGCTCGTTTAGTGAACCGTC (SEQ ID NO: 21131) | |
| | 188 nt | TGGATAGCGGTTTGACTCACGGGGATTTCCAAGTCTCCACCCCATTGACGTCAATGGGAGTTTGTTTTG | 0 nt Homology 1 |
| | | GCACCAAAATCAACGGGACTTTCCAAAATGTCGTAATAACCCCGCCCCGTTGACGCAAATGGGCGGTA | |
| | | GGCGTGTACGGTGGGAGGTCTATATAAGCAGAGCTCGTTTAGTGAACCGTC (SEQ ID NO: 21132) | |
| | 187 nt | GGATAGCGGTTTGACTCACGGGGATTTCCAAGTCTCCACCCCATTGACGTCAATGGGAGTTTGTTTTG | 0 nt Homology 1 |
| | | GCACCAAAATCAACGGGACTTTCCAAAATGTCGTAATAACCCCGCCCCGTTGACGCAAATGGGCGGTA | |
| | | GGCGTGTACGGTGGGAGGTCTATATAAGCAGAGCTCGTTTAGTGAACCGTC (SEQ ID NO: 21133) | |
| | 186 nt | GATAGCGGTTTGACTCACGGGGATTTCCAAGTCTCCACCCCATTGACGTCAATGGGAGTTTGTTTTGGC | 0 nt Homology 1 |
| | | ACCAAAATCAACGGGACTTTCCAAAATGTCGTAATAACCCCGCCCCGTTGACGCAAATGGGCGGTAGG | |
| | | CGTGTACGGTGGGAGGTCTATATAAGCAGAGCTCGTTTAGTGAACCGTC (SEQ ID NO: 21134) | |
| | 185 nt | ATAGCGGTTTGACTCACGGGGATTTCCAAGTCTCCACCCCATTGACGTCAATGGGAGTTTGTTTTGGCA | 0 nt Homology 1 |
| | | CCAAAATCAACGGGACTTTCCAAAATGTCGTAATAACCCCGCCCCGTTGACGCAAATGGGCGGTAGGC | |
| | | GTGTACGGTGGGAGGTCTATATAAGCAGAGCTCGTTTAGTGAACCGTC (SEQ ID NO: 21135) | |
| | 184 nt | TAGCGGTTTGACTCACGGGGATTTCCAAGTCTCCACCCCATTGACGTCAATGGGAGTTTGTTTTGGCAC | 0 nt Homology 1 |
| | | CAAAATCAACGGGACTTTCCAAAATGTCGTAATAACCCCGCCCCGTTGACGCAAATGGGCGGTAGGCG | |
| | | TGTACGGTGGGAGGTCTATATAAGCAGAGCTCGTTTAGTGAACCGTC (SEQ ID NO: 21136) | |
| | 183 nt | AGCGGTTTGACTCACGGGGATTTCCAAGTCTCCACCCCATTGACGTCAATGGGAGTTTGTTTTGGCACC | 0 nt Homology 1 |
| | | AAAATCAACGGGACTTTCCAAAATGTCGTAATAACCCCGCCCCGTTGACGCAAATGGGCGGTAGGCGT | |
| | | GTACGGTGGGAGGTCTATATAAGCAGAGCTCGTTTAGTGAACCGTC (SEQ ID NO: 21137) | |
| | 182 nt | GCGGTTTGACTCACGGGGATTTCCAAGTCTCCACCCCATTGACGTCAATGGGAGTTTGTTTTGGCACCA | 0 nt Homology 1 |
| | | AAATCAACGGGACTTTCCAAAATGTCGTAATAACCCCGCCCCGTTGACGCAAATGGGCGGTAGGCGTG | |
| | | TACGGTGGGAGGTCTATATAAGCAGAGCTCGTTTAGTGAACCGTC (SEQ ID NO: 21138) | |
| | 181 nt | CGGTTTGACTCACGGGGATTTCCAAGTCTCCACCCCATTGACGTCAATGGGAGTTTGTTTTGGCACCAA | 0 nt Homology 1 |
| | | AATCAACGGGACTTTCCAAAATGTCGTAATAACCCCGCCCCGTTGACGCAAATGGGCGGTAGGCGTGT | |
| | | ACGGTGGGAGGTCTATATAAGCAGAGCTCGTTTAGTGAACCGTC (SEQ ID NO: 21139) | |
| | 180 nt | GGTTTGACTCACGGGGATTTCCAAGTCTCCACCCCATTGACGTCAATGGGAGTTTGTTTTGGCACCAAA | 0 nt Homology 1 |
| | | ATCAACGGGACTTTCCAAAATGTCGTAATAACCCCGCCCCGTTGACGCAAATGGGCGGTAGGCGTGTA | |
| | | CGGTGGGAGGTCTATATAAGCAGAGCTCGTTTAGTGAACCGTC (SEQ ID NO: 21140) | |
| | 179 nt | GTTTGACTCACGGGGATTTCCAAGTCTCCACCCCATTGACGTCAATGGGAGTTTGTTTTGGCACCAAAA | 0 nt Homology 1 |
| | | TCAACGGGACTTTCCAAAATGTCGTAATAACCCCGCCCCGTTGACGCAAATGGGCGGTAGGCGTGTAC | |
| | | GGTGGGAGGTCTATATAAGCAGAGCTCGTTTAGTGAACCGTC (SEQ ID NO: 21141) | |
| | 178 nt | TTTGACTCACGGGGATTTCCAAGTCTCCACCCCATTGACGTCAATGGGAGTTTGTTTTGGCACCAAAAT | 0 nt Homology 1 |
| | | CAACGGGACTTTCCAAAATGTCGTAATAACCCCGCCCCGTTGACGCAAATGGGCGGTAGGCGTGTACG | |
| | | GTGGGAGGTCTATATAAGCAGAGCTCGTTTAGTGAACCGTC (SEQ ID NO: 21142) | |
| | 177 nt | TTGACTCACGGGGATTTCCAAGTCTCCACCCCATTGACGTCAATGGGAGTTTGTTTTGGCACCAAAATC | 0 nt Homology 1 |
| | | AACGGGACTTTCCAAAATGTCGTAATAACCCCGCCCCGTTGACGCAAATGGGCGGTAGGCGTGTACG | |
| | | GTGGGAGGTCTATATAAGCAGAGCTCGTTTAGTGAACCGTC (SEQ ID NO: 21143) | |
| | 176 nt | TGACTCACGGGGATTTCCAAGTCTCCACCCCATTGACGTCAATGGGAGTTTGTTTTGGCACCAAAATCA | 0 nt Homology 1 |
| | | ACGGGACTTTCCAAAATGTCGTAATAACCCCGCCCCGTTGACGCAAATGGGCGGTAGGCGTGTACGGT | |
| | | GGGAGGTCTATATAAGCAGAGCTCGTTTAGTGAACCGTC (SEQ ID NO: 21144) | |
| | 175 nt | GACTCACGGGGATTTCCAAGTCTCCACCCCATTGACGTCAATGGGAGTTTGTTTTGGCACCAAAATCAA | 0 nt Homology 1 |
| | | CGGGACTTTCCAAAATGTCGTAATAACCCCGCCCCGTTGACGCAAATGGGCGGTAGGCGTGTACGGT | |
| | | GGGAGGTCTATATAAGCAGAGCTCGTTTAGTGAACCGTC (SEQ ID NO: 21145) | |
| | 174 nt | ACTCACGGGGATTTCCAAGTCTCCACCCCATTGACGTCAATGGGAGTTTGTTTTGGCACCAAAATCAAC | 0 nt Homology 1 |
| | | GGGACTTTCCAAAATGTCGTAATAACCCCGCCCCGTTGACGCAAATGGGCGGTAGGCGTGTACGGTG | |
| | | GGAGGTCTATATAAGCAGAGCTCGTTTAGTGAACCGTC (SEQ ID NO: 21146) | |
| | 173 nt | CTCACGGGGATTTCCAAGTCTCCACCCCATTGACGTCAATGGGAGTTTGTTTTGGCACCAAAATCAACG | 0 nt Homology 1 |
| | | GGACTTTCCAAAATGTCGTAATAACCCCGCCCCGTTGACGCAAATGGGCGGTAGGCGTGTACGGTGG | |
| | | GAGGTCTATATAAGCAGAGCTCGTTTAGTGAACCGTC (SEQ ID NO: 21147) | |
| | 172 nt | TCACGGGGATTTCCAAGTCTCCACCCCATTGACGTCAATGGGAGTTTGTTTTGGCACCAAAATCAACGG | 0 nt Homology 1 |
| | | GACTTTCCAAAATGTCGTAATAACCCCGCCCCGTTGACGCAAATGGGCGGTAGGCGTGTACGGTGGG | |
| | | AGGTCTATATAAGCAGAGCTCGTTTAGTGAACCGTC (SEQ ID NO: 21148) | |
| | 171 nt | CACGGGGATTTCCAAGTCTCCACCCCATTGACGTCAATGGGAGTTTGTTTTGGCACCAAAATCAACGG | 0 nt Homology 1 |
| | | GACTTTCCAAAATGTCGTAATAACCCCGCCCCGTTGACGCAAATGGGCGGTAGGCGTGTACGGTGGG | |
| | | AGGTCTATATAAGCAGAGCTCGTTTAGTGAACCGTC (SEQ ID NO: 21149) | |
| | 170 nt | ACGGGGATTTCCAAGTCTCCACCCCATTGACGTCAATGGGAGTTTGTTTTGGCACCAAAATCAACGGG | 0 nt Homology 1 |
| | | ACTTTCCAAAATGTCGTAATAACCCCGCCCCGTTGACGCAAATGGGCGGTAGGCGTGTACGGTGGGA | |
| | | GGTCTATATAAGCAGAGCTCGTTTAGTGAACCGTC (SEQ ID NO: 21150) | |
| | 169 nt | CGGGGATTTCCAAGTCTCCACCCCATTGACGTCAATGGGAGTTTGTTTTGGCACCAAAATCAACGGGA | 0 nt Homology 1 |
| | | CTTTCCAAAATGTCGTAATAACCCCGCCCCGTTGACGCAAATGGGCGGTAGGCGTGTACGGTGGGAG | |
| | | GTCTATATAAGCAGAGCTCGTTTAGTGAACCGTC (SEQ ID NO: 21151) | |
| | 168 nt | GGGGATTTCCAAGTCTCCACCCCATTGACGTCAATGGGAGTTTGTTTTGGCACCAAAATCAACGGGAC | 0 nt Homology 1 |
| | | TTTCCAAAATGTCGTAATAACCCCGCCCCGTTGACGCAAATGGGCGGTAGGCGTGTACGGTGGGAGG | |
| | | TCTATATAAGCAGAGCTCGTTTAGTGAACCGTC (SEQ ID NO: 21152) | |
| | 167 nt | GGGATTTCCAAGTCTCCACCCCATTGACGTCAATGGGAGTTTGTTTTGGCACCAAAATCAACGGGACTT | 0 nt Homology 1 |
| | | TCCAAAATGTCGTAATAACCCCGCCCCGTTGACGCAAATGGGCGGTAGGCGTGTACGGTGGGAGGTC | |
| | | TATATAAGCAGAGCTCGTTTAGTGAACCGTC (SEQ ID NO: 21153) | |
| | 166 nt | GGATTTCCAAGTCTCCACCCCATTGACGTCAATGGGAGTTTGTTTTGGCACCAAAATCAACGGGACTTT | 0 nt Homology 1 |
| | | CCAAAATGTCGTAATAACCCCGCCCCGTTGACGCAAATGGGCGGTAGGCGTGTACGGTGGGAGGTCT | |
| | | ATATAAGCAGAGCTCGTTTAGTGAACCGTC (SEQ ID NO: 21154) | |
| | 165 nt | GATTTCCAAGTCTCCACCCCATTGACGTCAATGGGAGTTTGTTTTGGCACCAAAATCAACGGGACTTTC | 0 nt Homology 1 |
| | | CAAAATGTCGTAATAACCCCGCCCCGTTGACGCAAATGGGCGGTAGGCGTGTACGGTGGGAGGTCTA | |
| | | TATAAGCAGAGCTCGTTTAGTGAACCGTC (SEQ ID NO: 21155) | |
| | 164 nt | ATTTCCAAGTCTCCACCCCATTGACGTCAATGGGAGTTTGTTTTGGCACCAAAATCAACGGGACTTTCC | 0 nt Homology 1 |
| | | AAAATGTCGTAATAACCCCGCCCCGTTGACGCAAATGGGCGGTAGGCGTGTACGGTGGGAGGTCTAT | |
| | | ATAAGCAGAGCTCGTTTAGTGAACCGTC (SEQ ID NO: 21156) | |
| | 163 nt | TTTCCAAGTCTCCACCCCATTGACGTCAATGGGAGTTTGTTTTGGCACCAAAATCAACGGGACTTTCCA | 0 nt Homology 1 |
| | | AAATGTCGTAATAACCCCGCCCCGTTGACGCAAATGGGCGGTAGGCGTGTACGGTGGGAGGTCTATA | |
| | | TAAGCAGAGCTCGTTTAGTGAACCGTC (SEQ ID NO: 21157) | |
| | 162 nt | TTCCAAGTCTCCACCCCATTGACGTCAATGGGAGTTTGTTTTGGCACCAAAATCAACGGGACTTTCCAA | 0 nt Homology 1 |
| | | AATGTCGTAATAACCCCGCCCCGTTGACGCAAATGGGCGGTAGGCGTGTACGGTGGGAGGTCTATAT | |
| | | AAGCAGAGCTCGTTTAGTGAACCGTC (SEQ ID NO: 21158) | |
| | 161 nt | TCCAAGTCTCCACCCCATTGACGTCAATGGGAGTTTGTTTTGGCACCAAAATCAACGGGACTTTCCAAA | 0 nt Homology 1 |
| | | ATGTCGTAATAACCCCGCCCCGTTGACGCAAATGGGCGGTAGGCGTGTACGGTGGGAGGTCTATATA | |
| | | AGCAGAGCTCGTTTAGTGAACCGTC (SEQ ID NO: 21159) | |
| | 160 nt | CCAAGTCTCCACCCCATTGACGTCAATGGGAGTTTGTTTTGGCACCAAAATCAACGGGACTTTCCAAAA | 0 nt Homology 1 |
| | | TGTCGTAATAACCCCGCCCCGTTGACGCAAATGGGCGGTAGGCGTGTACGGTGGGAGGTCTATATAA | |
| | | GCAGAGCTCGTTTAGTGAACCGTC (SEQ ID NO: 21160) | |
| | 159 nt | CAAGTCTCCACCCCATTGACGTCAATGGGAGTTTGTTTTGGCACCAAAATCAACGGGACTTTCCAAAAT | 0 nt Homology 1 |
| | | GTCGTAATAACCCCGCCCCGTTGACGCAAATGGGCGGTAGGCGTGTACGGTGGGAGGTCTATATAAG | |
| | | CAGAGCTCGTTTAGTGAACCGTC (SEQ ID NO: 21161) | |
| | 158 nt | AAGTCTCCACCCCATTGACGTCAATGGGAGTTTGTTTTGGCACCAAAATCAACGGGACTTTCCAAAATG | 0 nt Homology 1 |
| | | TCGTAATAACCCCGCCCCGTTGACGCAAATGGGCGGTAGGCGTGTACGGTGGGAGGTCTATATAAGC | |
| | | AGAGCTCGTTTAGTGAACCGTC (SEQ ID NO: 21162) | |
| | 157 nt | AGTCTCCACCCCATTGACGTCAATGGGAGTTTGTTTTGGCACCAAAATCAACGGGACTTTCCAAAATGT | 0 nt Homology 1 |
| | | CGTAATAACCCCGCCCCGTTGACGCAAATGGGCGGTAGGCGTGTACGGTGGGAGGTCTATATAAGCA | |
| | | GAGCTCGTTTAGTGAACCGTC (SEQ ID NO: 21163) | |
| | 156 nt | GTCTCCACCCCATTGACGTCAATGGGAGTTTGTTTTGGCACCAAAATCAACGGGACTTTCCAAAATGTC | 0 nt Homology 1 |
| | | GTAATAACCCCGCCCCGTTGACGCAAATGGGCGGTAGGCGTGTACGGTGGGAGGTCTATATAAGCAG | |
| | | AGCTCGTTTAGTGAACCGTC (SEQ ID NO: 21164) | |
| | 155 nt | TCTCCACCCCATTGACGTCAATGGGAGTTTGTTTTGGCACCAAAATCAACGGGACTTTCCAAAATGTCG | 0 nt Homology 1 |
| | | TAATAACCCCGCCCCGTTGACGCAAATGGGCGGTAGGCGTGTACGGTGGGAGGTCTATATAAGCAGA | |
| | | GCTCGTTTAGTGAACCGTC (SEQ ID NO: 21165) | |
| | 154 nt | CTCCACCCCATTGACGTCAATGGGAGTTTGTTTTGGCACCAAAATCAACGGGACTTTCCAAAATGTCGT | 0 nt Homology 1 |
| | | AATAACCCCGCCCCGTTGACGCAAATGGGCGGTAGGCGTGTACGGTGGGAGGTCTATATAAGCAGAG | |
| | | CTCGTTTAGTGAACCGTC (SEQ ID NO: 21166) | |
| | 153 nt | TCCACCCCATTGACGTCAATGGGAGTTTGTTTTGGCACCAAAATCAACGGGACTTTCCAAAATGTCGTA | 0 nt Homology 1 |
| | | ATAACCCCGCCCCGTTGACGCAAATGGGCGGTAGGCGTGTACGGTGGGAGGTCTATATAAGCAGAGC | |
| | | TCGTTTAGTGAACCGTC (SEQ ID NO: 21167) | |
| | 152 nt | CCACCCCATTGACGTCAATGGGAGTTTGTTTTGGCACCAAAATCAACGGGACTTTCCAAAATGTCGTAA | 0 nt Homology 1 |
| | | TAACCCCGCCCCGTTGACGCAAATGGGCGGTAGGCGTGTACGGTGGGAGGTCTATATAAGCAGAGCT | |
| | | CGTTTAGTGAACCGTC (SEQ ID NO: 21168) | |
| | 151 nt | CACCCCATTGACGTCAATGGGAGTTTGTTTTGGCACCAAAATCAACGGGACTTTCCAAAATGTCGTAAT | 0 nt Homology 1 |
| | | AACCCCGCCCCGTTGACGCAAATGGGCGGTAGGCGTGTACGGTGGGAGGTCTATATAAGCAGAGCTC | |
| | | GTTTAGTGAACCGTC (SEQ ID NO: 21169) | |
| | 150 nt | ACCCCATTGACGTCAATGGGAGTTTGTTTTGGCACCAAAATCAACGGGACTTTCCAAAATGTCGTAATA | 0 nt Homology 1 |
| | | ACCCCGCCCCGTTGACGCAAATGGGCGGTAGGCGTGTACGGTGGGAGGTCTATATAAGCAGAGCTCG | |
| | | TTTAGTGAACCGTC (SEQ ID NO: 21170) | |
| | 149 nt | CCCCATTGACGTCAATGGGAGTTTGTTTTGGCACCAAAATCAACGGGACTTTCCAAAATGTCGTAATAA | 0 nt Homology 1 |
| | | CCCCGCCCCGTTGACGCAAATGGGCGGTAGGCGTGTACGGTGGGAGGTCTATATAAGCAGAGCTCGT | |
| | | TTAGTGAACCGTC (SEQ ID NO: 21171) | |
| | 148 nt | CCCATTGACGTCAATGGGAGTTTGTTTTGGCACCAAAATCAACGGGACTTTCCAAAATGTCGTAATAAC | 0 nt Homology 1 |
| | | CCCGCCCCGTTGACGCAAATGGGCGGTAGGCGTGTACGGTGGGAGGTCTATATAAGCAGAGCTCGTT | |
| | | TAGTGAACCGTC (SEQ ID NO: 21172) | |
| | 147 nt | CCATTGACGTCAATGGGAGTTTGTTTTGGCACCAAAATCAACGGGACTTTCCAAAATGTCGTAATAACC | 0 nt Homology 1 |
| | | CCGCCCCGTTGACGCAAATGGGCGGTAGGCGTGTACGGTGGGAGGTCTATATAAGCAGAGCTCGTTT | |
| | | AGTGAACCGTC (SEQ ID NO: 21173) | |
| | 146 nt | CATTGACGTCAATGGGAGTTTGTTTTGGCACCAAAATCAACGGGACTTTCCAAAATGTCGTAATAACCC | 0 nt Homology 1 |
| | | CGCCCCGTTGACGCAAATGGGCGGTAGGCGTGTACGGTGGGAGGTCTATATAAGCAGAGCTCGTTTA | |
| | | GTGAACCGTC (SEQ ID NO: 21174) | |
| | 145 nt | ATTGACGTCAATGGGAGTTTGTTTTGGCACCAAAATCAACGGGACTTTCCAAAATGTCGTAATAACCCC | 0 nt Homology 1 |
| | | GCCCCGTTGACGCAAATGGGCGGTAGGCGTGTACGGTGGGAGGTCTATATAAGCAGAGCTCGTTTAG | |
| | | TGAACCGTC (SEQ ID NO: 21175) | |
| | 144 nt | TTGACGTCAATGGGAGTTTGTTTTGGCACCAAAATCAACGGGACTTTCCAAAATGTCGTAATAACCCCG | 0 nt Homology 1 |
| | | CCCCGTTGACGCAAATGGGCGGTAGGCGTGTACGGTGGGAGGTCTATATAAGCAGAGCTCGTTTAGT | |
| | | GAACCGTC (SEQ ID NO: 21176) | |
| | 143 nt | TGACGTCAATGGGAGTTTGTTTTGGCACCAAAATCAACGGGACTTTCCAAAATGTCGTAATAACCCCG | 0 nt Homology 1 |
| | | CCCCGTTGACGCAAATGGGCGGTAGGCGTGTACGGTGGGAGGTCTATATAAGCAGAGCTCGTTTAGT | |
| | | GAACCGTC (SEQ ID NO: 21177) | |
| | 142 nt | GACGTCAATGGGAGTTTGTTTTGGCACCAAAATCAACGGGACTTTCCAAAATGTCGTAATAACCCCGC | 0 nt Homology 1 |
| | | CCCGTTGACGCAAATGGGCGGTAGGCGTGTACGGTGGGAGGTCTATATAAGCAGAGCTCGTTTAGTG | |
| | | AACCGTC (SEQ ID NO: 21178) | |
| | 141 nt | ACGTCAATGGGAGTTTGTTTTGGCACCAAAATCAACGGGACTTTCCAAAATGTCGTAATAACCCCGCCC | 0 nt Homology 1 |
| | | CGTTGACGCAAATGGGCGGTAGGCGTGTACGGTGGGAGGTCTATATAAGCAGAGCTCGTTTAGTGAA | |
| | | CCGTC (SEQ ID NO: 21179) | |
| | 140 nt | CGTCAATGGGAGTTTGTTTTGGCACCAAAATCAACGGGACTTTCCAAAATGTCGTAATAACCCCGCCCC | 0 nt Homology 1 |
| | | GTTGACGCAAATGGGCGGTAGGCGTGTACGGTGGGAGGTCTATATAAGCAGAGCTCGTTTAGTGAAC | |
| | | CGTC (SEQ ID NO: 21180) | |
| | 139 nt | GTCAATGGGAGTTTGTTTTGGCACCAAAATCAACGGGACTTTCCAAAATGTCGTAATAACCCCGCCCC | 0 nt Homology 1 |
| | | GTTGACGCAAATGGGCGGTAGGCGTGTACGGTGGGAGGTCTATATAAGCAGAGCTCGTTTAGTGAAC | |
| | | CGTC (SEQ ID NO: 21181) | |
| | 138 nt | TCAATGGGAGTTTGTTTTGGCACCAAAATCAACGGGACTTTCCAAAATGTCGTAATAACCCCGCCCCGT | 0 nt Homology 1 |
| | | TGACGCAAATGGGCGGTAGGCGTGTACGGTGGGAGGTCTATATAAGCAGAGCTCGTTTAGTGAACCG | |
| | | TC (SEQ ID NO: 21182) | |
| | 137 nt | CAATGGGAGTTTGTTTTGGCACCAAAATCAACGGGACTTTCCAAAATGTCGTAATAACCCCGCCCCGTT | 0 nt Homology 1 |
| | | GACGCAAATGGGCGGTAGGCGTGTACGGTGGGAGGTCTATATAAGCAGAGCTCGTTTAGTGAACCGT | |
| | | C (SEQ ID NO: 21183) | |
| | 136 nt | AATGGGAGTTTGTTTTGGCACCAAAATCAACGGGACTTTCCAAAATGTCGTAATAACCCCGCCCCGTTG | 0 nt Homology 1 |
| | | ACGCAAATGGGCGGTAGGCGTGTACGGTGGGAGGTCTATATAAGCAGAGCTCGTTTAGTGAACCGTC | |
| | | (SEQ ID NO: 21184) | |
| | 135 nt | ATGGGAGTTTGTTTTGGCACCAAAATCAACGGGACTTTCCAAAATGTCGTAATAACCCCGCCCCGTTGA | 0 nt Homology 1 |
| | | CGCAAATGGGCGGTAGGCGTGTACGGTGGGAGGTCTATATAAGCAGAGCTCGTTTAGTGAACCGTC | |
| | | (SEQ ID NO: 21185) | |
| | 134 nt | TGGGAGTTTGTTTTGGCACCAAAATCAACGGGACTTTCCAAAATGTCGTAATAACCCCGCCCCGTTGAC | 0 nt Homology 1 |
| | | GCAAATGGGCGGTAGGCGTGTACGGTGGGAGGTCTATATAAGCAGAGCTCGTTTAGTGAACCGTC | |
| | | (SEQ ID NO: 21186) | |
| | 133 nt | GGGAGTTTGTTTTGGCACCAAAATCAACGGGACTTTCCAAAATGTCGTAATAACCCCGCCCCGTTGAC | 0 nt Homology 1 |
| | | GCAAATGGGCGGTAGGCGTGTACGGTGGGAGGTCTATATAAGCAGAGCTCGTTTAGTGAACCGTC | |
| | | (SEQ ID NO: 21187) | |
| | 132 nt | GGAGTTTGTTTTGGCACCAAAATCAACGGGACTTTCCAAAATGTCGTAATAACCCCGCCCCGTTGACGC | 0 nt Homology 1 |
| | | AAATGGGCGGTAGGCGTGTACGGTGGGAGGTCTATATAAGCAGAGCTCGTTTAGTGAACCGTC (SEQ | |
| | | ID NO: 21188) | |
| | 131 nt | GAGTTTGTTTTGGCACCAAAATCAACGGGACTTTCCAAAATGTCGTAATAACCCCGCCCCGTTGACGCA | 0 nt Homology 1 |
| | | AATGGGCGGTAGGCGTGTACGGTGGGAGGTCTATATAAGCAGAGCTCGTTTAGTGAACCGTC (SEQ | |
| | | ID NO: 21189) | |
| | 130 nt | AGTTTGTTTTGGCACCAAAATCAACGGGACTTTCCAAAATGTCGTAATAACCCCGCCCCGTTGACGCAA | 0 nt Homology 1 |
| | | ATGGGCGGTAGGCGTGTACGGTGGGAGGTCTATATAAGCAGAGCTCGTTTAGTGAACCGTC (SEQ ID | |
| | | NO: 21190) | |
| | 129 nt | GTTTGTTTTGGCACCAAAATCAACGGGACTTTCCAAAATGTCGTAATAACCCCGCCCCGTTGACGCAAA | 0 nt Homology 1 |
| | | TGGGCGGTAGGCGTGTACGGTGGGAGGTCTATATAAGCAGAGCTCGTTTAGTGAACCGTC (SEQ ID | |
| | | NO: 21191) | |
| | 128 nt | TTTGTTTTGGCACCAAAATCAACGGGACTTTCCAAAATGTCGTAATAACCCCGCCCCGTTGACGCAAAT | 0 nt Homology 1 |
| | | GGGCGGTAGGCGTGTACGGTGGGAGGTCTATATAAGCAGAGCTCGTTTAGTGAACCGTC (SEQ ID | |
| | | NO: 21192) | |
| | 127 nt | TTGTTTTGGCACCAAAATCAACGGGACTTTCCAAAATGTCGTAATAACCCCGCCCCGTTGACGCAAATG | 0 nt Homology 1 |
| | | GGCGGTAGGCGTGTACGGTGGGAGGTCTATATAAGCAGAGCTCGTTTAGTGAACCGTC (SEQ ID NO: | |
| | | 21193) | |
| | 126 nt | TGTTTTGGCACCAAAATCAACGGGACTTTCCAAAATGTCGTAATAACCCCGCCCCGTTGACGCAAATG | 0 nt Homology 1 |
| | | GGCGGTAGGCGTGTACGGTGGGAGGTCTATATAAGCAGAGCTCGTTTAGTGAACCGTC (SEQ ID NO: | |
| | | 21194) | |
| | 125 nt | GTTTTGGCACCAAAATCAACGGGACTTTCCAAAATGTCGTAATAACCCCGCCCCGTTGACGCAAATGG | 0 nt Homology 1 |
| | | GCGGTAGGCGTGTACGGTGGGAGGTCTATATAAGCAGAGCTCGTTTAGTGAACCGTC (SEQ ID NO: | |
| | | 21195) | |
| | 124 nt | TTTTGGCACCAAAATCAACGGGACTTTCCAAAATGTCGTAATAACCCCGCCCCGTTGACGCAAATGGG | 0 nt Homology 1 |
| | | CGGTAGGCGTGTACGGTGGGAGGTCTATATAAGCAGAGCTCGTTTAGTGAACCGTC (SEQ ID NO: | |
| | | 21196) | |
| | 123 nt | TTTGGCACCAAAATCAACGGGACTTTCCAAAATGTCGTAATAACCCCGCCCCGTTGACGCAAATGGGC | 0 nt Homology 1 |
| | | GGTAGGCGTGTACGGTGGGAGGTCTATATAAGCAGAGCTCGTTTAGTGAACCGTC (SEQ ID NO: | |
| | | 21197) | |
| | 122 nt | TTGGCACCAAAATCAACGGGACTTTCCAAAATGTCGTAATAACCCCGCCCCGTTGACGCAAATGGGCG | 0 nt Homology 1 |
| | | GTAGGCGTGTACGGTGGGAGGTCTATATAAGCAGAGCTCGTTTAGTGAACCGTC (SEQ ID NO: | |
| | | 21198) | |
| | 121 nt | TGGCACCAAAATCAACGGGACTTTCCAAAATGTCGTAATAACCCCGCCCCGTTGACGCAAATGGGCGG | 0 nt Homology 1 |
| | | TAGGCGTGTACGGTGGGAGGTCTATATAAGCAGAGCTCGTTTAGTGAACCGTC (SEQ ID NO: 21199) | |
| | 120 nt | GGCACCAAAATCAACGGGACTTTCCAAAATGTCGTAATAACCCCGCCCCGTTGACGCAAATGGGCGGT | 0 nt Homology 1 |
| | | AGGCGTGTACGGTGGGAGGTCTATATAAGCAGAGCTCGTTTAGTGAACCGTC (SEQ ID NO: 21200) | |
| | 119 nt | GCACCAAAATCAACGGGACTTTCCAAAATGTCGTAATAACCCCGCCCCGTTGACGCAAATGGGCGGTA | 0 nt Homology 1 |
| | | GGCGTGTACGGTGGGAGGTCTATATAAGCAGAGCTCGTTTAGTGAACCGTC (SEQ ID NO: 21201) | |
| | 118 nt | CACCAAAATCAACGGGACTTTCCAAAATGTCGTAATAACCCCGCCCCGTTGACGCAAATGGGCGGTAG | 0 nt Homology 1 |
| | | GCGTGTACGGTGGGAGGTCTATATAAGCAGAGCTCGTTTAGTGAACCGTC (SEQ ID NO: 21202) | |
| | 117 nt | ACCAAAATCAACGGGACTTTCCAAAATGTCGTAATAACCCCGCCCCGTTGACGCAAATGGGCGGTAGG | 0 nt Homology 1 |
| | | CGTGTACGGTGGGAGGTCTATATAAGCAGAGCTCGTTTAGTGAACCGTC (SEQ ID NO: 21203) | |
| | 116 nt | CCAAAATCAACGGGACTTTCCAAAATGTCGTAATAACCCCGCCCCGTTGACGCAAATGGGCGGTAGGC | 0 nt Homology 1 |
| | | GTGTACGGTGGGAGGTCTATATAAGCAGAGCTCGTTTAGTGAACCGTC (SEQ ID NO: 21204) | |
| | 115 nt | CAAAATCAACGGGACTTTCCAAAATGTCGTAATAACCCCGCCCCGTTGACGCAAATGGGCGGTAGGCG | 0 nt Homology 1 |
| | | TGTACGGTGGGAGGTCTATATAAGCAGAGCTCGTTTAGTGAACCGTC (SEQ ID NO: 21205) | |
| | 114 nt | AAAATCAACGGGACTTTCCAAAATGTCGTAATAACCCCGCCCCGTTGACGCAAATGGGCGGTAGGCGT | 0 nt Homology 1 |
| | | GTACGGTGGGAGGTCTATATAAGCAGAGCTCGTTTAGTGAACCGTC (SEQ ID NO: 21206) | |
| | 113 nt | AAATCAACGGGACTTTCCAAAATGTCGTAATAACCCCGCCCCGTTGACGCAAATGGGCGGTAGGCGTG | 0 nt Homology 1 |
| | | TACGGTGGGAGGTCTATATAAGCAGAGCTCGTTTAGTGAACCGTC (SEQ ID NO: 21207) | |
| | 112 nt | AATCAACGGGACTTTCCAAAATGTCGTAATAACCCCGCCCCGTTGACGCAAATGGGCGGTAGGCGTGT | 0 nt Homology 1 |
| | | ACGGTGGGAGGTCTATATAAGCAGAGCTCGTTTAGTGAACCGTC (SEQ ID NO: 21208) | |
| | 111 nt | ATCAACGGGACTTTCCAAAATGTCGTAATAACCCCGCCCCGTTGACGCAAATGGGCGGTAGGCGTGTA | 0 nt Homology 1 |
| | | CGGTGGGAGGTCTATATAAGCAGAGCTCGTTTAGTGAACCGTC (SEQ ID NO: 21209) | |
| | 110 nt | TCAACGGGACTTTCCAAAATGTCGTAATAACCCCGCCCCGTTGACGCAAATGGGCGGTAGGCGTGTAC | 0 nt Homology 1 |
| | | GGTGGGAGGTCTATATAAGCAGAGCTCGTTTAGTGAACCGTC (SEQ ID NO: 21210) | |
| | 109 nt | CAACGGGACTTTCCAAAATGTCGTAATAACCCCGCCCCGTTGACGCAAATGGGCGGTAGGCGTGTACG | 0 nt Homology 1 |
| | | GTGGGAGGTCTATATAAGCAGAGCTCGTTTAGTGAACCGTC (SEQ ID NO: 21211) | |
| | 108 nt | AACGGGACTTTCCAAAATGTCGTAATAACCCCGCCCCGTTGACGCAAATGGGGGTAGGCGTGTACG | 0 nt Homology 1 |
| | | GTGGGAGGTCTATATAAGCAGAGCTCGTTTAGTGAACCGTC (SEQ ID NO: 21212) | |
| | 107 nt | ACGGGACTTTCCAAAATGTCGTAATAACCCCGCCCCGTTGACGCAAATGGGCGGTAGGCGTGTACGGT | 0 nt Homology 1 |
| | | GGGAGGTCTATATAAGCAGAGCTCGTTTAGTGAACCGTC (SEQ ID NO: 21213) | |
| | 106 nt | CGGGACTTTCCAAAATGTCGTAATAACCCCGCCCCGTTGACGCAAATGGGCGGTAGGCGTGTACGGT | 0 nt Homology 1 |
| | | GGGAGGTCTATATAAGCAGAGCTCGTTTAGTGAACCGTC (SEQ ID NO: 21214) | |
| | 105 nt | GGGACTTTCCAAAATGTCGTAATAACCCCGCCCCGTTGACGCAAATGGGCGGTAGGCGTGTACGGTG | 0 nt Homology 1 |
| | | GGAGGTCTATATAAGCAGAGCTCGTTTAGTGAACCGTC (SEQ ID NO: 21215) | |
| | 104 nt | GGACTTTCCAAAATGTCGTAATAACCCCGCCCCGTTGACGCAAATGGGCGGTAGGCGTGTACGGTGG | 0 nt Homology 1 |
| | | GAGGTCTATATAAGCAGAGCTCGTTTAGTGAACCGTC (SEQ ID NO: 21216) | |
| | 103 nt | GACTTTCCAAAATGTCGTAATAACCCCGCCCCGTTGACGCAAATGGGCGGTAGGCGTGTACGGTGGG | 0 nt Homology 1 |
| | | AGGTCTATATAAGCAGAGCTCGTTTAGTGAACCGTC (SEQ ID NO: 21217) | |
| | 102 nt | ACTTTCCAAAATGTCGTAATAACCCCGCCCCGTTGACGCAAATGGGCGGTAGGCGTGTACGGTGGGA | 0 nt Homology 1 |
| | | GGTCTATATAAGCAGAGCTCGTTTAGTGAACCGTC (SEQ ID NO: 21218) | |
| | 101 nt | CTTTCCAAAATGTCGTAATAACCCCGCCCCGTTGACGCAAATGGGCGGTAGGCGTGTACGGTGGGAG | 0 nt Homology 1 |
| | | GTCTATATAAGCAGAGCTCGTTTAGTGAACCGTC (SEQ ID NO: 21219) | |
| | 100 nt | TTTCCAAAATGTCGTAATAACCCCGCCCCGTTGACGCAAATGGGCGGTAGGCGTGTACGGTGGGAGG | 0 nt Homology 1 |
| | | TCTATATAAGCAGAGCTCGTTTAGTGAACCGTC (SEQ ID NO: 21220) | |
| | 99 nt | TTCCAAAATGTCGTAATAACCCCGCCCCGTTGACGCAAATGGGCGGTAGGCGTGTACGGTGGGAGGT | 0 nt Homology 1 |
| | | CTATATAAGCAGAGCTCGTTTAGTGAACCGTC (SEQ ID NO: 21221) | |
| | 98 nt | TCCAAAATGTCGTAATAACCCCGCCCCGTTGACGCAAATGGGCGGTAGGCGTGTACGGTGGGAGGTC | 0 nt Homology 1 |
| | | TATATAAGCAGAGCTCGTTTAGTGAACCGTC (SEQ ID NO: 21222) | |
| | 97 nt | CCAAAATGTCGTAATAACCCCGCCCCGTTGACGCAAATGGGCGGTAGGCGTGTACGGTGGGAGGTCT | 0 nt Homology 1 |
| | | ATATAAGCAGAGCTCGTTTAGTGAACCGTC (SEQ ID NO: 21223) | |
| | 96 nt | CAAAATGTCGTAATAACCCCGCCCCGTTGACGCAAATGGGCGGTAGGCGTGTACGGTGGGAGGTCTA | 0 nt Homology 1 |
| | | TATAAGCAGAGCTCGTTTAGTGAACCGTC (SEQ ID NO: 21224) | |
| | 95 nt | AAAATGTCGTAATAACCCCGCCCCGTTGACGCAAATGGGCGGTAGGCGTGTACGGTGGGAGGTCTAT | 0 nt Homology 1 |
| | | ATAAGCAGAGCTCGTTTAGTGAACCGTC (SEQ ID NO: 21225) | |
| | 94 nt | AAATGTCGTAATAACCCCGCCCCGTTGACGCAAATGGGCGGTAGGCGTGTACGGTGGGAGGTCTATA | 0 nt Homology 1 |
| | | TAAGCAGAGCTCGTTTAGTGAACCGTC (SEQ ID NO: 21226) | |
| | 93 nt | AATGTCGTAATAACCCCGCCCCGTTGACGCAAATGGGCGGTAGGCGTGTACGGTGGGAGGTCTATAT | 0 nt Homology 1 |
| | | AAGCAGAGCTCGTTTAGTGAACCGTC (SEQ ID NO: 21227) | |
| | 92 nt | ATGTCGTAATAACCCCGCCCCGTTGACGCAAATGGGCGGTAGGCGTGTACGGTGGGAGGTCTATATA | 0 nt Homology 1 |
| | | AGCAGAGCTCGTTTAGTGAACCGTC (SEQ ID NO: 21228) | |
| | 91 nt | TGTCGTAATAACCCCGCCCCGTTGACGCAAATGGGCGGTAGGCGTGTACGGTGGGAGGTCTATATAA | 0 nt Homology 1 |
| | | GCAGAGCTCGTTTAGTGAACCGTC (SEQ ID NO: 21229) | |
| | 90 nt | GTCGTAATAACCCCGCCCCGTTGACGCAAATGGGCGGTAGGCGTGTACGGTGGGAGGTCTATATAAG | 0 nt Homology 1 |
| | | CAGAGCTCGTTTAGTGAACCGTC (SEQ ID NO: 21230) | |
| | 89 nt | TCGTAATAACCCCGCCCCGTTGACGCAAATGGGCGGTAGGCGTGTACGGTGGGAGGTCTATATAAGC | 0 nt Homology 1 |
| | | AGAGCTCGTTTAGTGAACCGTC (SEQ ID NO: 21231) | |
| | 88 nt | CGTAATAACCCCGCCCCGTTGACGCAAATGGGCGGTAGGCGTGTACGGTGGGAGGTCTATATAAGCA | 0 nt Homology 1 |
| | | GAGCTCGTTTAGTGAACCGTC (SEQ ID NO: 21232) | |
| | 87 nt | GTAATAACCCCGCCCCGTTGACGCAAATGGGCGGTAGGCGTGTACGGTGGGAGGTCTATATAAGCAG | 0 nt Homology 1 |
| | | AGCTCGTTTAGTGAACCGTC (SEQ ID NO: 21233) | |
| | 86 nt | TAATAACCCCGCCCCGTTGACGCAAATGGGCGGTAGGCGTGTACGGTGGGAGGTCTATATAAGCAGA | 0 nt Homology 1 |
| | | GCTCGTTTAGTGAACCGTC (SEQ ID NO: 21234) | |
| | 85 nt | AATAACCCCGCCCCGTTGACGCAAATGGGCGGTAGGCGTGTACGGTGGGAGGTCTATATAAGCAGAG | 0 nt Homology 1 |
| | | CTCGTTTAGTGAACCGTC (SEQ ID NO: 21235) | |
| | 84 nt | ATAACCCCGCCCCGTTGACGCAAATGGGCGGTAGGCGTGTACGGTGGGAGGTCTATATAAGCAGAGC | 0 nt Homology 1 |
| | | TCGTTTAGTGAACCGTC (SEQ ID NO: 21236) | |
| | 83 nt | TAACCCCGCCCCGTTGACGCAAATGGGCGGTAGGCGTGTACGGTGGGAGGTCTATATAAGCAGAGCT | 0 nt Homology 1 |
| | | CGTTTAGTGAACCGTC (SEQ ID NO: 21237) | |
| | 82 nt | AACCCCGCCCCGTTGACGCAAATGGGCGGTAGGCGTGTACGGTGGGAGGTCTATATAAGCAGAGCTC | 0 nt Homology 1 |
| | | GTTTAGTGAACCGTC (SEQ ID NO: 21238) | |
| | 81 nt | ACCCCGCCCCGTTGACGCAAATGGGCGGTAGGCGTGTACGGTGGGAGGTCTATATAAGCAGAGCTCG | 0 nt Homology 1 |
| | | TTTAGTGAACCGTC (SEQ ID NO: 21239) | |
| | 80 nt | CCCCGCCCCGTTGACGCAAATGGGGGTAGGCGTGTACGGTGGGAGGTCTATATAAGCAGAGCTCGT | 0 nt Homology 1 |
| | | TTAGTGAACCGTC (SEQ ID NO: 21240) | |
| | 79 nt | CCCGCCCCGTTGACGCAAATGGGCGGTAGGCGTGTACGGTGGGAGGTCTATATAAGCAGAGCTCGTT | 0 nt Homology 1 |
| | | TAGTGAACCGTC (SEQ ID NO: 21241) | |
| | 78 nt | CCGCCCCGTTGACGCAAATGGGCGGTAGGCGTGTACGGTGGGAGGTCTATATAAGCAGAGCTCGTTT | 0 nt Homology 1 |
| | | AGTGAACCGTC (SEQ ID NO: 21242) | |
| | 77 nt | CGCCCCGTTGACGCAAATGGGCGGTAGGCGTGTACGGTGGGAGGTCTATATAAGCAGAGCTCGTTTA | 0 nt Homology 1 |
| | | GTGAACCGTC (SEQ ID NO: 21243) | |
| | 76 nt | GCCCCGTTGACGCAAATGGGCGGTAGGCGTGTACGGTGGGAGGTCTATATAAGCAGAGCTCGTTTAG | 0 nt Homology 1 |
| | | TGAACCGTC (SEQ ID NO: 21244) | |
| | 75 nt | CCCCGTTGACGCAAATGGGCGGTAGGCGTGTACGGTGGGAGGTCTATATAAGCAGAGCTCGTTTAGT | 0 nt Homology 1 |
| | | GAACCGTC (SEQ ID NO: 21245) | |
| | 74 nt | CCCGTTGACGCAAATGGGCGGTAGGCGTGTACGGTGGGAGGTCTATATAAGCAGAGCTCGTTTAGTG | 0 nt Homology 1 |
| | | AACCGTC (SEQ ID NO: 21246) | |
| | 73 nt | CCGTTGACGCAAATGGGCGGTAGGCGTGTACGGTGGGAGGTCTATATAAGCAGAGCTCGTTTAGTGA | 0 nt Homology 1 |
| | | ACCGTC (SEQ ID NO: 21247) | |
| | 72 nt | CGTTGACGCAAATGGGCGGTAGGCGTGTACGGTGGGAGGTCTATATAAGCAGAGCTCGTTTAGTGAA | 0 nt Homology 1 |
| | | CCGTC (SEQ ID NO: 21248) | |
| | 71 nt | GTTGACGCAAATGGGCGGTAGGCGTGTACGGTGGGAGGTCTATATAAGCAGAGCTCGTTTAGTGAAC | 0 nt Homology 1 |
| | | CGTC (SEQ ID NO: 21249) | |
| | 70 nt | TTGACGCAAATGGGCGGTAGGCGTGTACGGTGGGAGGTCTATATAAGCAGAGCTCGTTTAGTGAACC | 0 nt Homology 1 |
| | | GTC (SEQ ID NO: 21250) | |
| | 69 nt | TGACGCAAATGGGCGGTAGGCGTGTACGGTGGGAGGTCTATATAAGCAGAGCTCGTTTAGTGAACCG | 0 nt Homology 1 |
| | | TC (SEQ ID NO: 21251) | |
| | 68 nt | GACGCAAATGGGCGGTAGGCGTGTACGGTGGGAGGTCTATATAAGCAGAGCTCGTTTAGTGAACCGT | 0 nt Homology 1 |
| | | C (SEQ ID NO: 21252) | |
| | 67 nt | ACGCAAATGGGCGGTAGGCGTGTACGGTGGGAGGTCTATATAAGCAGAGCTCGTTTAGTGAACCGTC | 0 nt Homology 1 |
| | | (SEQ ID NO: 21253) | |
| | 66 nt | CGCAAATGGGCGGTAGGCGTGTACGGTGGGAGGTCTATATAAGCAGAGCTCGTTTAGTGAACCGTC | 0 nt Homology 1 |
| | | (SEQ ID NO: 21254) | |
| | 65 nt | GCAAATGGGCGGTAGGCGTGTACGGTGGGAGGTCTATATAAGCAGAGCTCGTTTAGTGAACCGTC | 0 nt Homology 1 |
| | | (SEQ ID NO: 21255) | |
| | 64 nt | CAAATGGGCGGTAGGCGTGTACGGTGGGAGGTCTATATAAGCAGAGCTCGTTTAGTGAACCGTC | 0 nt Homology 1 |
| | | (SEQ ID NO: 21256) | |
| | 63 nt | AAATGGGCGGTAGGCGTGTACGGTGGGAGGTCTATATAAGCAGAGCTCGTTTAGTGAACCGTC (SEQ | 0 nt Homology 1 |
| | | ID NO: 21257) | |
| | 62 nt | AATGGGCGGTAGGCGTGTACGGTGGGAGGTCTATATAAGCAGAGCTCGTTTAGTGAACCGTC (SEQ | 0 nt Homology 1 |
| | | ID NO: 21258) | |
| | 61 nt | ATGGGCGGTAGGCGTGTACGGTGGGAGGTCTATATAAGCAGAGCTCGTTTAGTGAACCGTC (SEQ ID | 0 nt Homology 1 |
| | | NO: 21259) | |
| | 60 nt | TGGGCGGTAGGCGTGTACGGTGGGAGGTCTATATAAGCAGAGCTCGTTTAGTGAACCGTC (SEQ ID | 0 nt Homology 1 |
| | | NO: 21260) | |
| | 59 nt | GGGCGGTAGGCGTGTACGGTGGGAGGTCTATATAAGCAGAGCTCGTTTAGTGAACCGTC (SEQ ID | 0 nt Homology 1 |
| | | NO: 21261) | |
| | 58 nt | GGCGGTAGGCGTGTACGGTGGGAGGTCTATATAAGCAGAGCTCGTTTAGTGAACCGTC (SEQ ID NO: | 0 nt Homology 1 |
| | | 21262) | |
| | 57 nt | GCGGTAGGCGTGTACGGTGGGAGGTCTATATAAGCAGAGCTCGTTTAGTGAACCGTC (SEQ ID NO: | 0 nt Homology 1 |
| | | 21263) | |
| | 56 nt | CGGTAGGCGTGTACGGTGGGAGGTCTATATAAGCAGAGCTCGTTTAGTGAACCGTC (SEQ ID NO: | 0 nt Homology 1 |
| | | 21264) | |
| | 55 nt | GGTAGGCGTGTACGGTGGGAGGTCTATATAAGCAGAGCTCGTTTAGTGAACCGTC (SEQ ID NO: | 0 nt Homology 1 |
| | | 21265) | |
| | 54 nt | GTAGGCGTGTACGGTGGGAGGTCTATATAAGCAGAGCTCGTTTAGTGAACCGTC (SEQ ID NO: | 0 nt Homology 1 |
| | | 21266) | |
| | 53 nt | TAGGCGTGTACGGTGGGAGGTCTATATAAGCAGAGCTCGTTTAGTGAACCGTC (SEQ ID NO: 21267) | 0 nt Homology 1 |
| | 52 nt | AGGCGTGTACGGTGGGAGGTCTATATAAGCAGAGCTCGTTTAGTGAACCGTC (SEQ ID NO: 21268) | 0 nt Homology 1 |
| | 51 nt | GGCGTGTACGGTGGGAGGTCTATATAAGCAGAGCTCGTTTAGTGAACCGTC (SEQ ID NO: 21269) | 0 nt Homology 1 |
| | 50 nt | GCGTGTACGGTGGGAGGTCTATATAAGCAGAGCTCGTTTAGTGAACCGTC (SEQ ID NO: 21270) | 0 nt Homology 1 |
| | 49 nt | CGTGTACGGTGGGAGGTCTATATAAGCAGAGCTCGTTTAGTGAACCGTC (SEQ ID NO: 21271) | 0 nt Homology 1 |
| | 48 nt | GTGTACGGTGGGAGGTCTATATAAGCAGAGCTCGTTTAGTGAACCGTC (SEQ ID NO: 21272) | 0 nt Homology 1 |
| | 47 nt | TGTACGGTGGGAGGTCTATATAAGCAGAGCTCGTTTAGTGAACCGTC (SEQ ID NO: 21273) | 0 nt Homology 1 |
| | 46 nt | GTACGGTGGGAGGTCTATATAAGCAGAGCTCGTTTAGTGAACCGTC (SEQ ID NO: 21274) | 0 nt Homology 1 |
| | 45 nt | TACGGTGGGAGGTCTATATAAGCAGAGCTCGTTTAGTGAACCGTC (SEQ ID NO: 21275) | 0 nt Homology 1 |
| | 44 nt | ACGGTGGGAGGTCTATATAAGCAGAGCTCGTTTAGTGAACCGTC (SEQ ID NO: 21276) | 0 nt Homology 1 |
| | 43 nt | CGGTGGGAGGTCTATATAAGCAGAGCTCGTTTAGTGAACCGTC (SEQ ID NO: 21277) | 0 nt Homology 1 |
| | 42 nt | GGTGGGAGGTCTATATAAGCAGAGCTCGTTTAGTGAACCGTC (SEQ ID NO: 21278) | 0 nt Homology 1 |
| | 41 nt | GTGGGAGGTCTATATAAGCAGAGCTCGTTTAGTGAACCGTC (SEQ ID NO: 21279) | 0 nt Homology 1 |
| | 40 nt | TGGGAGGTCTATATAAGCAGAGCTCGTTTAGTGAACCGTC (SEQ ID NO: 21280) | 0 nt Homology 1 |
| | 39 nt | GGGAGGTCTATATAAGCAGAGCTCGTTTAGTGAACCGTC (SEQ ID NO: 21281) | 0 nt Homology 1 |
| | 38 nt | GGAGGTCTATATAAGCAGAGCTCGTTTAGTGAACCGTC (SEQ ID NO: 21282) | 0 nt Homology 1 |
| | 37 nt | GAGGTCTATATAAGCAGAGCTCGTTTAGTGAACCGTC (SEQ ID NO: 21283) | 0 nt Homology 1 |
| | 36 nt | AGGTCTATATAAGCAGAGCTCGTTTAGTGAACCGTC (SEQ ID NO: 21284) | 0 nt Homology 1 |
| | 35 nt | GGTCTATATAAGCAGAGCTCGTTTAGTGAACCGTC (SEQ ID NO: 21285) | 0 nt Homology 1 |
| | 34 nt | GTCTATATAAGCAGAGCTCGTTTAGTGAACCGTC (SEQ ID NO: 21286) | 0 nt Homology 1 |
| | 33 nt | TCTATATAAGCAGAGCTCGTTTAGTGAACCGTC (SEQ ID NO: 21287) | 0 nt Homology 1 |
| | 32 nt | CTATATAAGCAGAGCTCGTTTAGTGAACCGTC (SEQ ID NO: 21288) | 0 nt Homology 1 |
| | 31 nt | TATATAAGCAGAGCTCGTTTAGTGAACCGTC (SEQ ID NO: 21289) | 0 nt Homology 1 |
| | 30 nt | ATATAAGCAGAGCTCGTTTAGTGAACCGTC (SEQ ID NO: 21290) | 0 nt Homology 1 |
| | 29 nt | TATAAGCAGAGCTCGTTTAGTGAACCGTC (SEQ ID NO: 21291) | 0 nt Homology 1 |
| | 28 nt | ATAAGCAGAGCTCGTTTAGTGAACCGTC (SEQ ID NO: 21292) | 0 nt Homology 1 |
| | 27 nt | TAAGCAGAGCTCGTTTAGTGAACCGTC (SEQ ID NO: 21293) | 0 nt Homology 1 |
| | 26 nt | AAGCAGAGCTCGTTTAGTGAACCGTC (SEQ ID NO: 21294) | 0 nt Homology 1 |
| | 25 nt | AGCAGAGCTCGTTTAGTGAACCGTC (SEQ ID NO: 21295) | 0 nt Homology 1 |
| | 24 nt | GCAGAGCTCGTTTAGTGAACCGTC (SEQ ID NO: 21296) | 0 nt Homology 1 |
| | 23 nt | CAGAGCTCGTTTAGTGAACCGTC (SEQ ID NO: 21297) | 0 nt Homology 1 |
| | 22 nt | AGAGCTCGTTTAGTGAACCGTC (SEQ ID NO: 21298) | 0 nt Homology 1 |
| | 21 nt | GAGCTCGTTTAGTGAACCGTC (SEQ ID NO: 21299) | 0 nt Homology 1 |
| | 20 nt | AGCTCGTTTAGTGAACCGTC (SEQ ID NO: 21300) | 0 nt Homology 1 |
| | 19 nt | GCTCGTTTAGTGAACCGTC (SEQ ID NO: 21301) | 0 nt Homology 1 |
| | 18 nt | CTCGTTTAGTGAACCGTC (SEQ ID NO: 21302) | 0 nt Homology 1 |
| | 17 nt | TCGTTTAGTGAACCGTC (SEQ ID NO: 21303) | 0 nt Homology 1 |
| | 16 nt | CGTTTAGTGAACCGTC (SEQ ID NO: 21304) | 0 nt Homology 1 |
| | 15 nt | GTTTAGTGAACCGTC (SEQ ID NO: 21305) | 0 nt Homology 1 |
| | 14 nt | TTTAGTGAACCGTC (SEQ ID NO: 21306) | 0 nt Homology 1 |
| | 13 nt | TTAGTGAACCGTC (SEQ ID NO: 21307) | 0 nt Homology 1 |
| | 12 nt | TAGTGAACCGTC (SEQ ID NO: 21308) | 0 nt Homology 1 |
| | 11 nt | AGTGAACCGTC (SEQ ID NO: 21309) | 0 nt Homology 1 |
| | 10 nt | GTGAACCGTC (SEQ ID NO: 21310) | 0 nt Homology 1 |
| | 9 nt | TGAACCGTC | 0 nt Homology 1 |
| | 8 nt | GAACCGTC | 0 nt Homology 1 |
| | 7 nt | AACCGTC | O nt Homology 1 |
| | 6 nt | ACCGTC | 0 nt Homology 1 |
| | 5 nt | CCGTC | 0 nt Homology 1 |
| | 4 nt | CGTC | 0 nt Homology 1 |
| | 3 nt | GTC | 0 nt Homology 1 |
| | 2 nt | TC | 0 nt Homology 1 |
| | 1 nt | C | 0 nt Homology 1 |
| | 0 nt | | 0 nt Homology 1 |
| | (0-500 nt) | GCCCGCCTGGCTGACCGCCCAACGACCCCCGCCCATTGACGTCAATAATGACGTATGTTCCCATAGTAA | 1 nt Homology 1 |
| | | CGCCAATAGGGACTTTCCATTGACGTCAATGGGTGGAGTATTTACGGTAAACTGCCCACTTGGCAGTA | |
| | | CATCAAGTGTATCATATGCCAAGTCCGCCCCCTATTGACGTCAATGACGGTAAATGGCCCGCCTGGCAT | |
| | | TATGCCCAGTACATGACCTTACGGGACTTTCCTACTTGGCAGTACATCTACGTATTAGTCATCGCTATTA | |
| | | CCATGGTGATGCGGTTTTGGCAGTACACCAATGGGCGTGGATAGCGGTTTGACTCACGGGGATTTCCA | |
| | | AGTCTCCACCCCATTGACGTCAATGGGAGTTTGTTTTGGCACCAAAATCAACGGGACTTTCCAAAATGT | |
| | | CGTAATAACCCCGCCCCGTTGACGCAAATGGGCGGTAGGCGTGTACGGTGGGAGGTCTATATAAGCA | |
| | | GAGCTCGTTTAGTGAACCGT (SEQ ID NO: 21311) | |
| | (0-500 nt) | GGCCCGCCTGGCTGACCGCCCAACGACCCCCGCCCATTGACGTCAATAATGACGTATGTTCCCATAGT | 2 nt Homology 1 |
| | | AACGCCAATAGGGACTTTCCATTGACGTCAATGGGTGGAGTATTTACGGTAAACTGCCCACTTGGCAG | |
| | | TACATCAAGTGTATCATATGCCAAGTCCGCCCCCTATTGACGTCAATGACGGTAAATGGCCCGCCTGGC | |
| | | ATTATGCCCAGTACATGACCTTACGGGACTTTCCTACTTGGCAGTACATCTACGTATTAGTCATCGCTAT | |
| | | TACCATGGTGATGCGGTTTTGGCAGTACACCAATGGGCGTGGATAGCGGTTTGACTCACGGGGATTTC | |
| | | CAAGTCTCCACCCCATTGACGTCAATGGGAGTTTGTTTTGGCACCAAAATCAACGGGACTTTCCAAAAT | |
| | | GTCGTAATAACCCCGCCCCGTTGACGCAAATGGGGGTAGGCGTGTACGGTGGGAGGTCTATATAAG | |
| | | CAGAGCTCGTTTAGTGAACCG (SEQ ID NO: 21312) | |
| | (0-500 nt) | TGGCCCGCCTGGCTGACCGCCCAACGACCCCCGCCCATTGACGTCAATAATGACGTATGTTCCCATAGT | 3 nt Homology 1 |
| | | AACGCCAATAGGGACTTTCCATTGACGTCAATGGGTGGAGTATTTACGGTAAACTGCCCACTTGGCAG | |
| | | TACATCAAGTGTATCATATGCCAAGTCCGCCCCCTATTGACGTCAATGACGGTAAATGGCCCGCCTGGC | |
| | | ATTATGCCCAGTACATGACCTTACGGGACTTTCCTACTTGGCAGTACATCTACGTATTAGTCATCGCTAT | |
| | | TACCATGGTGATGCGGTTTTGGCAGTACACCAATGGGCGTGGATAGCGGTTTGACTCACGGGGATTTC | |
| | | CAAGTCTCCACCCCATTGACGTCAATGGGAGTTTGTTTTGGCACCAAAATCAACGGGACTTTCCAAAAT | |
| | | GTCGTAATAACCCCGCCCCGTTGACGCAAATGGGCGGTAGGCGTGTACGGTGGGAGGTCTATATAAG | |
| | | CAGAGCTCGTTTAGTGAACC (SEQ ID NO: 21313) | |
| | (0-500 nt) | ATGGCCCGCCTGGCTGACCGCCCAACGACCCCCGCCCATTGACGTCAATAATGACGTATGTTCCCATA | 4 nt Homology 1 |
| | | GTAACGCCAATAGGGACTTTCCATTGACGTCAATGGGTGGAGTATTTACGGTAAACTGCCCACTTGGC | |
| | | AGTACATCAAGTGTATCATATGCCAAGTCCGCCCCCTATTGACGTCAATGACGGTAAATGGCCCGCCT | |
| | | GGCATTATGCCCAGTACATGACCTTACGGGACTTTCCTACTTGGCAGTACATCTACGTATTAGTCATCG | |
| | | CTATTACCATGGTGATGCGGTTTTGGCAGTACACCAATGGGCGTGGATAGCGGTTTGACTCACGGGGA | |
| | | TTTCCAAGTCTCCACCCCATTGACGTCAATGGGAGTTTGTTTTGGCACCAAAATCAACGGGACTTTCCA | |
| | | AAATGTCGTAATAACCCCGCCCCGTTGACGCAAATGGGCGGTAGGCGTGTACGGTGGGAGGTCTATA | |
| | | TAAGCAGAGCTCGTTTAGTGAAC (SEQ ID NO: 21314) | |
| | (0-500 nt) | AATGGCCCGCCTGGCTGACCGCCCAACGACCCCCGCCCATTGACGTCAATAATGACGTATGTTCCCATA | 5 nt Homology 1 |
| | | GTAACGCCAATAGGGACTTTCCATTGACGTCAATGGGTGGAGTATTTACGGTAAACTGCCCACTTGGC | |
| | | AGTACATCAAGTGTATCATATGCCAAGTCCGCCCCCTATTGACGTCAATGACGGTAAATGGCCCGCCT | |
| | | GGCATTATGCCCAGTACATGACCTTACGGGACTTTCCTACTTGGCAGTACATCTACGTATTAGTCATCG | |
| | | CTATTACCATGGTGATGCGGTTTTGGCAGTACACCAATGGGCGTGGATAGCGGTTTGACTCACGGGGA | |
| | | TTTCCAAGTCTCCACCCCATTGACGTCAATGGGAGTTTGTTTTGGCACCAAAATCAACGGGACTTTCCA | |
| | | AAATGTCGTAATAACCCCGCCCCGTTGACGCAAATGGGCGGTAGGCGTGTACGGTGGGAGGTCTATA | |
| | | TAAGCAGAGCTCGTTTAGTGAA (SEQ ID NO: 21315) | |
| | (0-500 nt) | AAATGGCCCGCCTGGCTGACCGCCCAACGACCCCCGCCCATTGACGTCAATAATGACGTATGTTCCCAT | 6 nt Homology 1 |
| | | AGTAACGCCAATAGGGACTTTCCATTGACGTCAATGGGTGGAGTATTTACGGTAAACTGCCCACTTGG | |
| | | CAGTACATCAAGTGTATCATATGCCAAGTCCGCCCCCTATTGACGTCAATGACGGTAAATGGCCCGCCT | |
| | | GGCATTATGCCCAGTACATGACCTTACGGGACTTTCCTACTTGGCAGTACATCTACGTATTAGTCATCG | |
| | | CTATTACCATGGTGATGCGGTTTTGGCAGTACACCAATGGGCGTGGATAGCGGTTTGACTCACGGGGA | |
| | | TTTCCAAGTCTCCACCCCATTGACGTCAATGGGAGTTTGTTTTGGCACCAAAATCAACGGGACTTTCCA | |
| | | AAATGTCGTAATAACCCCGCCCCGTTGACGCAAATGGGGGTAGGCGTGTACGGTGGGAGGTCTATA | |
| | | TAAGCAGAGCTCGTTTAGTGA (SEQ ID NO: 21316) | |
| | (0-500 nt) | TAAATGGCCCGCCTGGCTGACCGCCCAACGACCCCCGCCCATTGACGTCAATAATGACGTATGTTCCCA | 7 nt Homology 1 |
| | | TAGTAACGCCAATAGGGACTTTCCATTGACGTCAATGGGTGGAGTATTTACGGTAAACTGCCCACTTG | |
| | | GCAGTACATCAAGTGTATCATATGCCAAGTCCGCCCCCTATTGACGTCAATGACGGTAAATGGCCCGC | |
| | | CTGGCATTATGCCCAGTACATGACCTTACGGGACTTTCCTACTTGGCAGTACATCTACGTATTAGTCATC | |
| | | GCTATTACCATGGTGATGCGGTTTTGGCAGTACACCAATGGGCGTGGATAGCGGTTTGACTCACGGG | |
| | | GATTTCCAAGTCTCCACCCCATTGACGTCAATGGGAGTTTGTTTTGGCACCAAAATCAACGGGACTTTC | |
| | | CAAAATGTCGTAATAACCCCGCCCCGTTGACGCAAATGGGCGGTAGGCGTGTACGGTGGGAGGTCTA | |
| | | TATAAGCAGAGCTCGTTTAGTG (SEQ ID NO: 21317) | |
| | (0-500 nt) | GTAAATGGCCCGCCTGGCTGACCGCCCAACGACCCCCGCCCATTGACGTCAATAATGACGTATGTTCC | 8 nt Homology 1 |
| | | CATAGTAACGCCAATAGGGACTTTCCATTGACGTCAATGGGTGGAGTATTTACGGTAAACTGCCCACT | |
| | | TGGCAGTACATCAAGTGTATCATATGCCAAGTCCGCCCCCTATTGACGTCAATGACGGTAAATGGCCC | |
| | | GCCTGGCATTATGCCCAGTACATGACCTTACGGGACTTTCCTACTTGGCAGTACATCTACGTATTAGTC | |
| | | ATCGCTATTACCATGGTGATGCGGTTTTGGCAGTACACCAATGGGCGTGGATAGCGGTTTGACTCACG | |
| | | GGGATTTCCAAGTCTCCACCCCATTGACGTCAATGGGAGTTTGTTTTGGCACCAAAATCAACGGGACTT | |
| | | TCCAAAATGTCGTAATAACCCCGCCCCGTTGACGCAAATGGGCGGTAGGCGTGTACGGTGGGAGGTC | |
| | | TATATAAGCAGAGCTCGTTTAGT (SEQ ID NO: 21318) | |
| | (0-500 nt) | GGTAAATGGCCCGCCTGGCTGACCGCCCAACGACCCCCGCCCATTGACGTCAATAATGACGTATGTTC | 9 nt Homology 1 |
| | | CCATAGTAACGCCAATAGGGACTTTCCATTGACGTCAATGGGTGGAGTATTTACGGTAAACTGCCCAC | |
| | | TTGGCAGTACATCAAGTGTATCATATGCCAAGTCCGCCCCCTATTGACGTCAATGACGGTAAATGGCCC | |
| | | GCCTGGCATTATGCCCAGTACATGACCTTACGGGACTTTCCTACTTGGCAGTACATCTACGTATTAGTC | |
| | | ATCGCTATTACCATGGTGATGCGGTTTTGGCAGTACACCAATGGGCGTGGATAGCGGTTTGACTCACG | |
| | | GGGATTTCCAAGTCTCCACCCCATTGACGTCAATGGGAGTTTGTTTTGGCACCAAAATCAACGGGACTT | |
| | | TCCAAAATGTCGTAATAACCCCGCCCCGTTGACGCAAATGGGCGGTAGGCGTGTACGGTGGGAGGTC | |
| | | TATATAAGCAGAGCTCGTTTAG (SEQ ID NO: 21319) | |
| | (0-500 nt) | CGGTAAATGGCCCGCCTGGCTGACCGCCCAACGACCCCCGCCCATTGACGTCAATAATGACGTATGTT | 10 nt Homology |
| | | CCCATAGTAACGCCAATAGGGACTTTCCATTGACGTCAATGGGTGGAGTATTTACGGTAAACTGCCCA | 1 |
| | | CTTGGCAGTACATCAAGTGTATCATATGCCAAGTCCGCCCCCTATTGACGTCAATGACGGTAAATGGCC | |
| | | CGCCTGGCATTATGCCCAGTACATGACCTTACGGGACTTTCCTACTTGGCAGTACATCTACGTATTAGT | |
| | | CATCGCTATTACCATGGTGATGCGGTTTTGGCAGTACACCAATGGGCGTGGATAGCGGTTTGACTCAC | |
| | | GGGGATTTCCAAGTCTCCACCCCATTGACGTCAATGGGAGTTTGTTTTGGCACCAAAATCAACGGGAC | |
| | | TTTCCAAAATGTCGTAATAACCCCGCCCCGTTGACGCAAATGGGCGGTAGGCGTGTACGGTGGGAGG | |
| | | TCTATATAAGCAGAGCTCGTTTA (SEQ ID NO: 21320) | |
| | (0-500 nt) | ACGGTAAATGGCCCGCCTGGCTGACCGCCCAACGACCCCCGCCCATTGACGTCAATAATGACGTATGT | 11 nt Homology |
| | | TCCCATAGTAACGCCAATAGGGACTTTCCATTGACGTCAATGGGTGGAGTATTTACGGTAAACTGCCC | 1 |
| | | ACTTGGCAGTACATCAAGTGTATCATATGCCAAGTCCGCCCCCTATTGACGTCAATGACGGTAAATGG | |
| | | CCCGCCTGGCATTATGCCCAGTACATGACCTTACGGGACTTTCCTACTTGGCAGTACATCTACGTATTA | |
| | | GTCATCGCTATTACCATGGTGATGCGGTTTTGGCAGTACACCAATGGGCGTGGATAGCGGTTTGACTC | |
| | | ACGGGGATTTCCAAGTCTCCACCCCATTGACGTCAATGGGAGTTTGTTTTGGCACCAAAATCAACGGG | |
| | | ACTTTCCAAAATGTCGTAATAACCCCGCCCCGTTGACGCAAATGGGCGGTAGGCGTGTACGGTGGGA | |
| | | GGTCTATATAAGCAGAGCTCGTTT (SEQ ID NO: 21321) | |
| | (0-500 nt) | TACGGTAAATGGCCCGCCTGGCTGACCGCCCAACGACCCCCGCCCATTGACGTCAATAATGACGTATG | 12 nt Homology |
| | | TTCCCATAGTAACGCCAATAGGGACTTTCCATTGACGTCAATGGGTGGAGTATTTACGGTAAACTGCCC | 1 |
| | | ACTTGGCAGTACATCAAGTGTATCATATGCCAAGTCCGCCCCCTATTGACGTCAATGACGGTAAATGG | |
| | | CCCGCCTGGCATTATGCCCAGTACATGACCTTACGGGACTTTCCTACTTGGCAGTACATCTACGTATTA | |
| | | GTCATCGCTATTACCATGGTGATGCGGTTTTGGCAGTACACCAATGGGCGTGGATAGCGGTTTGACTC | |
| | | ACGGGGATTTCCAAGTCTCCACCCCATTGACGTCAATGGGAGTTTGTTTTGGCACCAAAATCAACGGG | |
| | | ACTTTCCAAAATGTCGTAATAACCCCGCCCCGTTGACGCAAATGGGCGGTAGGCGTGTACGGTGGGA | |
| | | GGTCTATATAAGCAGAGCTCGTT (SEQ ID NO: 21322) | |
| | (0-500 nt) | TTACGGTAAATGGCCCGCCTGGCTGACCGCCCAACGACCCCCGCCCATTGACGTCAATAATGACGTAT | 13 nt Homology |
| | | GTTCCCATAGTAACGCCAATAGGGACTTTCCATTGACGTCAATGGGTGGAGTATTTACGGTAAACTGC | 1 |
| | | CCACTTGGCAGTACATCAAGTGTATCATATGCCAAGTCCGCCCCCTATTGACGTCAATGACGGTAAATG | |
| | | GCCCGCCTGGCATTATGCCCAGTACATGACCTTACGGGACTTTCCTACTTGGCAGTACATCTACGTATT | |
| | | AGTCATCGCTATTACCATGGTGATGCGGTTTTGGCAGTACACCAATGGGCGTGGATAGCGGTTTGACT | |
| | | CACGGGGATTTCCAAGTCTCCACCCCATTGACGTCAATGGGAGTTTGTTTTGGCACCAAAATCAACGG | |
| | | GACTTTCCAAAATGTCGTAATAACCCCGCCCCGTTGACGCAAATGGGCGGTAGGCGTGTACGGTGGG | |
| | | AGGTCTATATAAGCAGAGCTCGT (SEQ ID NO: 21323) | |
| | (0-500 nt) | CTTACGGTAAATGGCCCGCCTGGCTGACCGCCCAACGACCCCCGCCCATTGACGTCAATAATGACGTA | 14 nt Homology |
| | | TGTTCCCATAGTAACGCCAATAGGGACTTTCCATTGACGTCAATGGGTGGAGTATTTACGGTAAACTG | 1 |
| | | CCCACTTGGCAGTACATCAAGTGTATCATATGCCAAGTCCGCCCCCTATTGACGTCAATGACGGTAAAT | |
| | | GGCCCGCCTGGCATTATGCCCAGTACATGACCTTACGGGACTTTCCTACTTGGCAGTACATCTACGTAT | |
| | | TAGTCATCGCTATTACCATGGTGATGCGGTTTTGGCAGTACACCAATGGGCGTGGATAGCGGTTTGAC | |
| | | TCACGGGGATTTCCAAGTCTCCACCCCATTGACGTCAATGGGAGTTTGTTTTGGCACCAAAATCAACGG | |
| | | GACTTTCCAAAATGTCGTAATAACCCCGCCCCGTTGACGCAAATGGGCGGTAGGCGTGTACGGTGGG | |
| | | AGGTCTATATAAGCAGAGCTCG (SEQ ID NO: 21324) | |
| | (0-500 nt) | ACTTACGGTAAATGGCCCGCCTGGCTGACCGCCCAACGACCCCCGCCCATTGACGTCAATAATGACGT | 15 nt Homology |
| | | ATGTTCCCATAGTAACGCCAATAGGGACTTTCCATTGACGTCAATGGGTGGAGTATTTACGGTAAACT | 1 |
| | | GCCCACTTGGCAGTACATCAAGTGTATCATATGCCAAGTCCGCCCCCTATTGACGTCAATGACGGTAAA | |
| | | TGGCCCGCCTGGCATTATGCCCAGTACATGACCTTACGGGACTTTCCTACTTGGCAGTACATCTACGTA | |
| | | TTAGTCATCGCTATTACCATGGTGATGCGGTTTTGGCAGTACACCAATGGGCGTGGATAGCGGTTTGA | |
| | | CTCACGGGGATTTCCAAGTCTCCACCCCATTGACGTCAATGGGAGTTTGTTTTGGCACCAAAATCAACG | |
| | | GGACTTTCCAAAATGTCGTAATAACCCCGCCCCGTTGACGCAAATGGGCGGTAGGCGTGTACGGTGG | |
| | | GAGGTCTATATAAGCAGAGCTC (SEQ ID NO: 21325) | |
| | (0-500 nt) | AACTTACGGTAAATGGCCCGCCTGGCTGACCGCCCAACGACCCCCGCCCATTGACGTCAATAATGACG | 16 nt Homology |
| | | TATGTTCCCATAGTAACGCCAATAGGGACTTTCCATTGACGTCAATGGGTGGAGTATTTACGGTAAACT | 1 |
| | | GCCCACTTGGCAGTACATCAAGTGTATCATATGCCAAGTCCGCCCCCTATTGACGTCAATGACGGTAAA | |
| | | TGGCCCGCCTGGCATTATGCCCAGTACATGACCTTACGGGACTTTCCTACTTGGCAGTACATCTACGTA | |
| | | TTAGTCATCGCTATTACCATGGTGATGCGGTTTTGGCAGTACACCAATGGGCGTGGATAGCGGTTTGA | |
| | | CTCACGGGGATTTCCAAGTCTCCACCCCATTGACGTCAATGGGAGTTTGTTTTGGCACCAAAATCAACG | |
| | | GGACTTTCCAAAATGTCGTAATAACCCCGCCCCGTTGACGCAAATGGGCGGTAGGCGTGTACGGTGG | |
| | | GAGGTCTATATAAGCAGAGCT (SEQ ID NO: 21326) | |
| | (0-500 nt) | TAACTTACGGTAAATGGCCCGCCTGGCTGACCGCCCAACGACCCCCGCCCATTGACGTCAATAATGAC | 17 nt Homology |
| | | GTATGTTCCCATAGTAACGCCAATAGGGACTTTCCATTGACGTCAATGGGTGGAGTATTTACGGTAAA | 1 |
| | | CTGCCCACTTGGCAGTACATCAAGTGTATCATATGCCAAGTCCGCCCCCTATTGACGTCAATGACGGTA | |
| | | AATGGCCCGCCTGGCATTATGCCCAGTACATGACCTTACGGGACTTTCCTACTTGGCAGTACATCTACG | |
| | | TATTAGTCATCGCTATTACCATGGTGATGCGGTTTTGGCAGTACACCAATGGGCGTGGATAGCGGTTT | |
| | | GACTCACGGGGATTTCCAAGTCTCCACCCCATTGACGTCAATGGGAGTTTGTTTTGGCACCAAAATCAA | |
| | | CGGGACTTTCCAAAATGTCGTAATAACCCCGCCCCGTTGACGCAAATGGGCGGTAGGCGTGTACGGT | |
| | | GGGAGGTCTATATAAGCAGAGC (SEQ ID NO: 21327) | |
| | (0-500 nt) | ATAACTTACGGTAAATGGCCCGCCTGGCTGACCGCCCAACGACCCCCGCCCATTGACGTCAATAATGA | 18 nt Homology |
| | | CGTATGTTCCCATAGTAACGCCAATAGGGACTTTCCATTGACGTCAATGGGTGGAGTATTTACGGTAA | 1 |
| | | ACTGCCCACTTGGCAGTACATCAAGTGTATCATATGCCAAGTCCGCCCCCTATTGACGTCAATGACGGT | |
| | | AAATGGCCCGCCTGGCATTATGCCCAGTACATGACCTTACGGGACTTTCCTACTTGGCAGTACATCTAC | |
| | | GTATTAGTCATCGCTATTACCATGGTGATGCGGTTTTGGCAGTACACCAATGGGCGTGGATAGCGGTT | |
| | | TGACTCACGGGGATTTCCAAGTCTCCACCCCATTGACGTCAATGGGAGTTTGTTTTGGCACCAAAATCA | |
| | | ACGGGACTTTCCAAAATGTCGTAATAACCCCGCCCCGTTGACGCAAATGGGCGGTAGGCGTGTACGGT | |
| | | GGGAGGTCTATATAAGCAGAG (SEQ ID NO: 21328) | |
| | (0-500 nt) | CATAACTTACGGTAAATGGCCCGCCTGGCTGACCGCCCAACGACCCCCGCCCATTGACGTCAATAATG | 19 nt Homology |
| | | ACGTATGTTCCCATAGTAACGCCAATAGGGACTTTCCATTGACGTCAATGGGTGGAGTATTTACGGTA | 1 |
| | | AACTGCCCACTTGGCAGTACATCAAGTGTATCATATGCCAAGTCCGCCCCCTATTGACGTCAATGACGG | |
| | | TAAATGGCCCGCCTGGCATTATGCCCAGTACATGACCTTACGGGACTTTCCTACTTGGCAGTACATCTA | |
| | | CGTATTAGTCATCGCTATTACCATGGTGATGCGGTTTTGGCAGTACACCAATGGGCGTGGATAGCGGT | |
| | | TTGACTCACGGGGATTTCCAAGTCTCCACCCCATTGACGTCAATGGGAGTTTGTTTTGGCACCAAAATC | |
| | | AACGGGACTTTCCAAAATGTCGTAATAACCCCGCCCCGTTGACGCAAATGGGCGGTAGGCGTGTACG | |
| | | GTGGGAGGTCTATATAAGCAGA (SEQ ID NO: 21329) | |
| | (0-500 nt) | ACATAACTTACGGTAAATGGCCCGCCTGGCTGACCGCCCAACGACCCCCGCCCATTGACGTCAATAAT | 20 nt Homology |
| | | GACGTATGTTCCCATAGTAACGCCAATAGGGACTTTCCATTGACGTCAATGGGTGGAGTATTTACGGT | 1 |
| | | AAACTGCCCACTTGGCAGTACATCAAGTGTATCATATGCCAAGTCCGCCCCCTATTGACGTCAATGACG | |
| | | GTAAATGGCCCGCCTGGCATTATGCCCAGTACATGACCTTACGGGACTTTCCTACTTGGCAGTACATCT | |
| | | ACGTATTAGTCATCGCTATTACCATGGTGATGCGGTTTTGGCAGTACACCAATGGGCGTGGATAGCGG | |
| | | TTTGACTCACGGGGATTTCCAAGTCTCCACCCCATTGACGTCAATGGGAGTTTGTTTTGGCACCAAAAT | |
| | | CAACGGGACTTTCCAAAATGTCGTAATAACCCCGCCCCGTTGACGCAAATGGGCGGTAGGCGTGTACG | |
| | | GTGGGAGGTCTATATAAGCAG (SEQ ID NO: 21330) | |
| mCherry | (0-500 nt) | ATCTACGTATTAGTCATCGCTATTACCATGGTGATGCGGTTTTGGCAGTACACCAATGGGCGTGGATA | 0 nt Homology 1 |
| insertion | | GCGGTTTGACTCACGGGGATTTCCAAGTCTCCACCCCATTGACGTCAATGGGAGTTTGTTTTGGCACCA | |
| | | AAATCAACGGGACTTTCCAAAATGTCGTAATAACCCCGCCCCGTTGACGCAAATGGGCGGTAGGCGTG | |
| | | TACGGTGGGAGGTCTATATAAGCAGAGCTCGTTTAGTGAACCGTCAGAATTTTGTAATACGACTCACT | |
| | | ATAGGGCGGCCGGGAATTCGCCACCATGGTGAGCAAGGGCGAGGAGCTGTTCACCGGGGTGGTGCC | |
| | | CATCCTGGTCGAGCTGGACGGCGACGTAAACGGCCACAAGTTCAGCGTGTCCGGCGAGGGCGAGGG | |
| | | CGATGCCACCTACGGCAAGCTGACCCTGAAGTTCATCTGCACCACCGGCAAGCTGCCCGTGCCCTGGC | |
| | | CCACCCTCGTGACCACCCTGACGTACG (SEQ ID NO: 21331) | |
| | (0-500 nt) | CATCTACGTATTAGTCATCGCTATTACCATGGTGATGCGGTTTTGGCAGTACACCAATGGGCGTGGATA | 1 nt Homology 1 |
| | | GCGGTTTGACTCACGGGGATTTCCAAGTCTCCACCCCATTGACGTCAATGGGAGTTTGTTTTGGCACCA | |
| | | AAATCAACGGGACTTTCCAAAATGTCGTAATAACCCCGCCCCGTTGACGCAAATGGGGGTAGGCGTG | |
| | | TACGGTGGGAGGTCTATATAAGCAGAGCTCGTTTAGTGAACCGTCAGAATTTTGTAATACGACTCACT | |
| | | ATAGGGCGGCCGGGAATTCGCCACCATGGTGAGCAAGGGCGAGGAGCTGTTCACCGGGGTGGTGCC | |
| | | CATCCTGGTCGAGCTGGACGGCGACGTAAACGGCCACAAGTTCAGCGTGTCCGGCGAGGGCGAGGG | |
| | | CGATGCCACCTACGGCAAGCTGACCCTGAAGTTCATCTGCACCACCGGCAAGCTGCCCGTGCCCTGGC | |
| | | CCACCCTCGTGACCACCCTGACGTAC (SEQ ID NO: 21332) | |
| | (5-500 nt) | ACATCTACGTATTAGTCATCGCTATTACCATGGTGATGCGGTTTTGGCAGTACACCAATGGGCGTGGAT | 2 nt Homology 1 |
| | | AGCGGTTTGACTCACGGGGATTTCCAAGTCTCCACCCCATTGACGTCAATGGGAGTTTGTTTTGGCACC | |
| | | AAAATCAACGGGACTTTCCAAAATGTCGTAATAACCCCGCCCCGTTGACGCAAATGGGCGGTAGGCGT | |
| | | GTACGGTGGGAGGTCTATATAAGCAGAGCTCGTTTAGTGAACCGTCAGAATTTTGTAATACGACTCAC | |
| | | TATAGGGCGGCCGGGAATTCGCCACCATGGTGAGCAAGGGCGAGGAGCTGTTCACCGGGGTGGTGC | |
| | | CCATCCTGGTCGAGCTGGACGGCGACGTAAACGGCCACAAGTTCAGCGTGTCCGGCGAGGGCGAGG | |
| | | GCGATGCCACCTACGGCAAGCTGACCCTGAAGTTCATCTGCACCACCGGCAAGCTGCCCGTGCCCTGG | |
| | | CCCACCCTCGTGACCACCCTGACGTA (SEQ ID NO: 21333) | |
| | (5-500 nt) | TACATCTACGTATTAGTCATCGCTATTACCATGGTGATGCGGTTTTGGCAGTACACCAATGGGCGTGGA | 3 nt Homology 1 |
| | | TAGCGGTTTGACTCACGGGGATTTCCAAGTCTCCACCCCATTGACGTCAATGGGAGTTTGTTTTGGCAC | |
| | | CAAAATCAACGGGACTTTCCAAAATGTCGTAATAACCCCGCCCCGTTGACGCAAATGGGCGGTAGGCG | |
| | | TGTACGGTGGGAGGTCTATATAAGCAGAGCTCGTTTAGTGAACCGTCAGAATTTTGTAATACGACTCA | |
| | | CTATAGGGCGGCCGGGAATTCGCCACCATGGTGAGCAAGGGCGAGGAGCTGTTCACCGGGGTGGTG | |
| | | CCCATCCTGGTCGAGCTGGACGGCGACGTAAACGGCCACAAGTTCAGCGTGTCCGGCGAGGGCGAG | |
| | | GGCGATGCCACCTACGGCAAGCTGACCCTGAAGTTCATCTGCACCACCGGCAAGCTGCCCGTGCCCTG | |
| | | GCCCACCCTCGTGACCACCCTGACGT (SEQ ID NO: 21334) | |
| | (5-500 nt) | GTACATCTACGTATTAGTCATCGCTATTACCATGGTGATGCGGTTTTGGCAGTACACCAATGGGCGTG | 4 nt Homology 1 |
| | | GATAGCGGTTTGACTCACGGGGATTTCCAAGTCTCCACCCCATTGACGTCAATGGGAGTTTGTTTTGGC | |
| | | ACCAAAATCAACGGGACTTTCCAAAATGTCGTAATAACCCCGCCCCGTTGACGCAAATGGGCGGTAGG | |
| | | CGTGTACGGTGGGAGGTCTATATAAGCAGAGCTCGTTTAGTGAACCGTCAGAATTTTGTAATACGACT | |
| | | CACTATAGGGCGGCCGGGAATTCGCCACCATGGTGAGCAAGGGCGAGGAGCTGTTCACCGGGGTGG | |
| | | TGCCCATCCTGGTCGAGCTGGACGGCGACGTAAACGGCCACAAGTTCAGCGTGTCCGGCGAGGGCGA | |
| | | GGGCGATGCCACCTACGGCAAGCTGACCCTGAAGTTCATCTGCACCACCGGCAAGCTGCCCGTGCCCT | |
| | | GGCCCACCCTCGTGACCACCCTGACG (SEQ ID NO: 21335) | |
| | (5-500 nt) | AGTACATCTACGTATTAGTCATCGCTATTACCATGGTGATGCGGTTTTGGCAGTACACCAATGGGCGTG | 5 nt Homology 1 |
| | | GATAGCGGTTTGACTCACGGGGATTTCCAAGTCTCCACCCCATTGACGTCAATGGGAGTTTGTTTTGGC | |
| | | ACCAAAATCAACGGGACTTTCCAAAATGTCGTAATAACCCCGCCCCGTTGACGCAAATGGGCGGTAGG | |
| | | CGTGTACGGTGGGAGGTCTATATAAGCAGAGCTCGTTTAGTGAACCGTCAGAATTTTGTAATACGACT | |
| | | CACTATAGGGCGGCCGGGAATTCGCCACCATGGTGAGCAAGGGCGAGGAGCTGTTCACCGGGGTGG | |
| | | TGCCCATCCTGGTCGAGCTGGACGGCGACGTAAACGGCCACAAGTTCAGCGTGTCCGGCGAGGGCGA | |
| | | GGGCGATGCCACCTACGGCAAGCTGACCCTGAAGTTCATCTGCACCACCGGCAAGCTGCCCGTGCCCT | |
| | | GGCCCACCCTCGTGACCACCCTGAC (SEQ ID NO: 21336) | |
| | (5-500 nt) | CAGTACATCTACGTATTAGTCATCGCTATTACCATGGTGATGCGGTTTTGGCAGTACACCAATGGGCGT | 6 nt Homology 1 |
| | | GGATAGCGGTTTGACTCACGGGGATTTCCAAGTCTCCACCCCATTGACGTCAATGGGAGTTTGTTTTG | |
| | | GCACCAAAATCAACGGGACTTTCCAAAATGTCGTAATAACCCCGCCCCGTTGACGCAAATGGGCGGTA | |
| | | GGCGTGTACGGTGGGAGGTCTATATAAGCAGAGCTCGTTTAGTGAACCGTCAGAATTTTGTAATACGA | |
| | | CTCACTATAGGGCGGCCGGGAATTCGCCACCATGGTGAGCAAGGGCGAGGAGCTGTTCACCGGGGT | |
| | | GGTGCCCATCCTGGTCGAGCTGGACGGCGACGTAAACGGCCACAAGTTCAGCGTGTCCGGCGAGGGC | |
| | | GAGGGCGATGCCACCTACGGCAAGCTGACCCTGAAGTTCATCTGCACCACCGGCAAGCTGCCCGTGCC | |
| | | CTGGCCCACCCTCGTGACCACCCTGA (SEQ ID NO: 21337) | |
| | (5-500 nt) | GCAGTACATCTACGTATTAGTCATCGCTATTACCATGGTGATGCGGTTTTGGCAGTACACCAATGGGC | 7 nt Homology 1 |
| | | GTGGATAGCGGTTTGACTCACGGGGATTTCCAAGTCTCCACCCCATTGACGTCAATGGGAGTTTGTTTT | |
| | | GGCACCAAAATCAACGGGACTTTCCAAAATGTCGTAATAACCCCGCCCCGTTGACGCAAATGGGCGGT | |
| | | AGGCGTGTACGGTGGGAGGTCTATATAAGCAGAGCTCGTTTAGTGAACCGTCAGAATTTTGTAATACG | |
| | | ACTCACTATAGGGCGGCCGGGAATTCGCCACCATGGTGAGCAAGGGCGAGGAGCTGTTCACCGGGGT | |
| | | GGTGCCCATCCTGGTCGAGCTGGACGGCGACGTAAACGGCCACAAGTTCAGCGTGTCCGGCGAGGGC | |
| | | GAGGGCGATGCCACCTACGGCAAGCTGACCCTGAAGTTCATCTGCACCACCGGCAAGCTGCCCGTGCC | |
| | | CTGGCCCACCCTCGTGACCACCCTG (SEQ ID NO: 21338) | |
| | (5-500 nt) | GGCAGTACATCTACGTATTAGTCATCGCTATTACCATGGTGATGCGGTTTTGGCAGTACACCAATGGG | 8 nt Homology 1 |
| | | CGTGGATAGCGGTTTGACTCACGGGGATTTCCAAGTCTCCACCCCATTGACGTCAATGGGAGTTTGTTT | |
| | | TGGCACCAAAATCAACGGGACTTTCCAAAATGTCGTAATAACCCCGCCCCGTTGACGCAAATGGGCGG | |
| | | TAGGCGTGTACGGTGGGAGGTCTATATAAGCAGAGCTCGTTTAGTGAACCGTCAGAATTTTGTAATAC | |
| | | GACTCACTATAGGGCGGCCGGGAATTCGCCACCATGGTGAGCAAGGGCGAGGAGCTGTTCACCGGG | |
| | | GTGGTGCCCATCCTGGTCGAGCTGGACGGCGACGTAAACGGCCACAAGTTCAGCGTGTCCGGCGAGG | |
| | | GCGAGGGCGATGCCACCTACGGCAAGCTGACCCTGAAGTTCATCTGCACCACCGGCAAGCTGCCCGT | |
| | | GCCCTGGCCCACCCTCGTGACCACCCT (SEQ ID NO: 21339) | |
| | (5-500 nt) | TGGCAGTACATCTACGTATTAGTCATCGCTATTACCATGGTGATGCGGTTTTGGCAGTACACCAATGGG | 9 nt Homology 1 |
| | | CGTGGATAGCGGTTTGACTCACGGGGATTTCCAAGTCTCCACCCCATTGACGTCAATGGGAGTTTGTTT | |
| | | TGGCACCAAAATCAACGGGACTTTCCAAAATGTCGTAATAACCCCGCCCCGTTGACGCAAATGGGCGG | |
| | | TAGGCGTGTACGGTGGGAGGTCTATATAAGCAGAGCTCGTTTAGTGAACCGTCAGAATTTTGTAATAC | |
| | | GACTCACTATAGGGCGGCCGGGAATTCGCCACCATGGTGAGCAAGGGCGAGGAGCTGTTCACCGGG | |
| | | GTGGTGCCCATCCTGGTCGAGCTGGACGGCGACGTAAACGGCCACAAGTTCAGCGTGTCCGGCGAGG | |
| | | GCGAGGGCGATGCCACCTACGGCAAGCTGACCCTGAAGTTCATCTGCACCACCGGCAAGCTGCCCGT | |
| | | GCCCTGGCCCACCCTCGTGACCACCC (SEQ ID NO: 21340) | |
| | (5-500 nt) | TTGGCAGTACATCTACGTATTAGTCATCGCTATTACCATGGTGATGCGGTTTTGGCAGTACACCAATGG | 10 nt Homology |
| | | GCGTGGATAGCGGTTTGACTCACGGGGATTTCCAAGTCTCCACCCCATTGACGTCAATGGGAGTTTGT | 1 |
| | | TTTGGCACCAAAATCAACGGGACTTTCCAAAATGTCGTAATAACCCCGCCCCGTTGACGCAAATGGGC | |
| | | GGTAGGCGTGTACGGTGGGAGGTCTATATAAGCAGAGCTCGTTTAGTGAACCGTCAGAATTTTGTAAT | |
| | | ACGACTCACTATAGGGCGGCCGGGAATTCGCCACCATGGTGAGCAAGGGCGAGGAGCTGTTCACCGG | |
| | | GGTGGTGCCCATCCTGGTCGAGCTGGACGGCGACGTAAACGGCCACAAGTTCAGCGTGTCCGGCGAG | |
| | | GGCGAGGGCGATGCCACCTACGGCAAGCTGACCCTGAAGTTCATCTGCACCACCGGCAAGCTGCCCG | |
| | | TGCCCTGGCCCACCCTCGTGACCACC (SEQ ID NO: 21341) | |
| | (5-500 nt) | CTTGGCAGTACATCTACGTATTAGTCATCGCTATTACCATGGTGATGCGGTTTTGGCAGTACACCAATG | 11 nt Homology |
| | | GGCGTGGATAGCGGTTTGACTCACGGGGATTTCCAAGTCTCCACCCCATTGACGTCAATGGGAGTTTG | 1 |
| | | TTTTGGCACCAAAATCAACGGGACTTTCCAAAATGTCGTAATAACCCCGCCCCGTTGACGCAAATGGG | |
| | | CGGTAGGCGTGTACGGTGGGAGGTCTATATAAGCAGAGCTCGTTTAGTGAACCGTCAGAATTTTGTAA | |
| | | TACGACTCACTATAGGGCGGCCGGGAATTCGCCACCATGGTGAGCAAGGGCGAGGAGCTGTTCACCG | |
| | | GGGTGGTGCCCATCCTGGTCGAGCTGGACGGCGACGTAAACGGCCACAAGTTCAGCGTGTCCGGCGA | |
| | | GGGCGAGGGCGATGCCACCTACGGCAAGCTGACCCTGAAGTTCATCTGCACCACCGGCAAGCTGCCC | |
| | | GTGCCCTGGCCCACCCTCGTGACCAC (SEQ ID NO: 21342) | |
| | (5-500 nt) | ACTTGGCAGTACATCTACGTATTAGTCATCGCTATTACCATGGTGATGCGGTTTTGGCAGTACACCAAT | 12 nt Homology |
| | | GGGCGTGGATAGCGGTTTGACTCACGGGGATTTCCAAGTCTCCACCCCATTGACGTCAATGGGAGTTT | 1 |
| | | GTTTTGGCACCAAAATCAACGGGACTTTCCAAAATGTCGTAATAACCCCGCCCCGTTGACGCAAATGG | |
| | | GCGGTAGGCGTGTACGGTGGGAGGTCTATATAAGCAGAGCTCGTTTAGTGAACCGTCAGAATTTTGT | |
| | | AATACGACTCACTATAGGGCGGCCGGGAATTCGCCACCATGGTGAGCAAGGGCGAGGAGCTGTTCAC | |
| | | CGGGGTGGTGCCCATCCTGGTCGAGCTGGACGGCGACGTAAACGGCCACAAGTTCAGCGTGTCCGGC | |
| | | GAGGGCGAGGGCGATGCCACCTACGGCAAGCTGACCCTGAAGTTCATCTGCACCACCGGCAAGCTGC | |
| | | CCGTGCCCTGGCCCACCCTCGTGACCA (SEQ ID NO: 21343) | |
| | (5-500 nt) | TACTTGGCAGTACATCTACGTATTAGTCATCGCTATTACCATGGTGATGCGGTTTTGGCAGTACACCAA | 13 nt Homology |
| | | TGGGCGTGGATAGCGGTTTGACTCACGGGGATTTCCAAGTCTCCACCCCATTGACGTCAATGGGAGTT | 1 |
| | | TGTTTTGGCACCAAAATCAACGGGACTTTCCAAAATGTCGTAATAACCCCGCCCCGTTGACGCAAATG | |
| | | GGCGGTAGGCGTGTACGGTGGGAGGTCTATATAAGCAGAGCTCGTTTAGTGAACCGTCAGAATTTTG | |
| | | TAATACGACTCACTATAGGGCGGCCGGGAATTCGCCACCATGGTGAGCAAGGGCGAGGAGCTGTTCA | |
| | | CCGGGGTGGTGCCCATCCTGGTCGAGCTGGACGGCGACGTAAACGGCCACAAGTTCAGCGTGTCCGG | |
| | | CGAGGGCGAGGGCGATGCCACCTACGGCAAGCTGACCCTGAAGTTCATCTGCACCACCGGCAAGCTG | |
| | | CCCGTGCCCTGGCCCACCCTCGTGACC (SEQ ID NO: 21344) | |
| | (5-500 nt) | CTACTTGGCAGTACATCTACGTATTAGTCATCGCTATTACCATGGTGATGCGGTTTTGGCAGTACACCA | 14 nt Homology |
| | | ATGGGCGTGGATAGCGGTTTGACTCACGGGGATTTCCAAGTCTCCACCCCATTGACGTCAATGGGAGT | 1 |
| | | TTGTTTTGGCACCAAAATCAACGGGACTTTCCAAAATGTCGTAATAACCCCGCCCCGTTGACGCAAATG | |
| | | GGCGGTAGGCGTGTACGGTGGGAGGTCTATATAAGCAGAGCTCGTTTAGTGAACCGTCAGAATTTTG | |
| | | TAATACGACTCACTATAGGGCGGCCGGGAATTCGCCACCATGGTGAGCAAGGGCGAGGAGCTGTTCA | |
| | | CCGGGGTGGTGCCCATCCTGGTCGAGCTGGACGGCGACGTAAACGGCCACAAGTTCAGCGTGTCCGG | |
| | | CGAGGGCGAGGGCGATGCCACCTACGGCAAGCTGACCCTGAAGTTCATCTGCACCACCGGCAAGCTG | |
| | | CCCGTGCCCTGGCCCACCCTCGTGAC (SEQ ID NO: 21345) | |
| | (5-500 nt) | CCTACTTGGCAGTACATCTACGTATTAGTCATCGCTATTACCATGGTGATGCGGTTTTGGCAGTACACC | 15 nt Homology |
| | | AATGGGCGTGGATAGCGGTTTGACTCACGGGGATTTCCAAGTCTCCACCCCATTGACGTCAATGGGAG | 1 |
| | | TTTGTTTTGGCACCAAAATCAACGGGACTTTCCAAAATGTCGTAATAACCCCGCCCCGTTGACGCAAAT | |
| | | GGGCGGTAGGCGTGTACGGTGGGAGGTCTATATAAGCAGAGCTCGTTTAGTGAACCGTCAGAATTTT | |
| | | GTAATACGACTCACTATAGGGCGGCCGGGAATTCGCCACCATGGTGAGCAAGGGCGAGGAGCTGTTC | |
| | | ACCGGGGTGGTGCCCATCCTGGTCGAGCTGGACGGCGACGTAAACGGCCACAAGTTCAGCGTGTCCG | |
| | | GCGAGGGCGAGGGCGATGCCACCTACGGCAAGCTGACCCTGAAGTTCATCTGCACCACCGGCAAGCT | |
| | | GCCCGTGCCCTGGCCCACCCTCGTGA (SEQ ID NO: 21346) | |
| | (5-500 nt) | TCCTACTTGGCAGTACATCTACGTATTAGTCATCGCTATTACCATGGTGATGCGGTTTTGGCAGTACAC | 16 nt Homology |
| | | CAATGGGCGTGGATAGCGGTTTGACTCACGGGGATTTCCAAGTCTCCACCCCATTGACGTCAATGGGA | 1 |
| | | GTTTGTTTTGGCACCAAAATCAACGGGACTTTCCAAAATGTCGTAATAACCCCGCCCCGTTGACGCAAA | |
| | | TGGGCGGTAGGCGTGTACGGTGGGAGGTCTATATAAGCAGAGCTCGTTTAGTGAACCGTCAGAATTT | |
| | | TGTAATACGACTCACTATAGGGCGGCCGGGAATTCGCCACCATGGTGAGCAAGGGCGAGGAGCTGTT | |
| | | CACCGGGGTGGTGCCCATCCTGGTCGAGCTGGACGGCGACGTAAACGGCCACAAGTTCAGCGTGTCC | |
| | | GGCGAGGGCGAGGGCGATGCCACCTACGGCAAGCTGACCCTGAAGTTCATCTGCACCACCGGCAAGC | |
| | | TGCCCGTGCCCTGGCCCACCCTCGTG (SEQ ID NO: 21347) | |
| | (5-500 nt) | TTCCTACTTGGCAGTACATCTACGTATTAGTCATCGCTATTACCATGGTGATGCGGTTTTGGCAGTACA | 17 nt Homology |
| | | CCAATGGGCGTGGATAGCGGTTTGACTCACGGGGATTTCCAAGTCTCCACCCCATTGACGTCAATGGG | 1 |
| | | AGTTTGTTTTGGCACCAAAATCAACGGGACTTTCCAAAATGTCGTAATAACCCCGCCCCGTTGACGCAA | |
| | | ATGGGCGGTAGGCGTGTACGGTGGGAGGTCTATATAAGCAGAGCTCGTTTAGTGAACCGTCAGAATT | |
| | | TTGTAATACGACTCACTATAGGGCGGCCGGGAATTCGCCACCATGGTGAGCAAGGGCGAGGAGCTGT | |
| | | TCACCGGGGTGGTGCCCATCCTGGTCGAGCTGGACGGCGACGTAAACGGCCACAAGTTCAGCGTGTC | |
| | | CGGCGAGGGCGAGGGCGATGCCACCTACGGCAAGCTGACCCTGAAGTTCATCTGCACCACCGGCAAG | |
| | | CTGCCCGTGCCCTGGCCCACCCTCGT (SEQ ID NO: 21348) | |
| | (5-500 nt) | TTTCCTACTTGGCAGTACATCTACGTATTAGTCATCGCTATTACCATGGTGATGCGGTTTTGGCAGTAC | 18 nt Homology |
| | | ACCAATGGGCGTGGATAGCGGTTTGACTCACGGGGATTTCCAAGTCTCCACCCCATTGACGTCAATGG | 1 |
| | | GAGTTTGTTTTGGCACCAAAATCAACGGGACTTTCCAAAATGTCGTAATAACCCCGCCCCGTTGACGCA | |
| | | AATGGGCGGTAGGCGTGTACGGTGGGAGGTCTATATAAGCAGAGCTCGTTTAGTGAACCGTCAGAAT | |
| | | TTTGTAATACGACTCACTATAGGGCGGCCGGGAATTCGCCACCATGGTGAGCAAGGGCGAGGAGCTG | |
| | | TTCACCGGGGTGGTGCCCATCCTGGTCGAGCTGGACGGCGACGTAAACGGCCACAAGTTCAGCGTGT | |
| | | CCGGCGAGGGCGAGGGCGATGCCACCTACGGCAAGCTGACCCTGAAGTTCATCTGCACCACCGGCAA | |
| | | GCTGCCCGTGCCCTGGCCCACCCTCG (SEQ ID NO: 21349) | |
| | (5-500 nt) | CTTTCCTACTTGGCAGTACATCTACGTATTAGTCATCGCTATTACCATGGTGATGCGGTTTTGGCAGTAC | 19 nt Homology |
| | | ACCAATGGGCGTGGATAGCGGTTTGACTCACGGGGATTTCCAAGTCTCCACCCCATTGACGTCAATGG | 1 |
| | | GAGTTTGTTTTGGCACCAAAATCAACGGGACTTTCCAAAATGTCGTAATAACCCCGCCCCGTTGACGCA | |
| | | AATGGGCGGTAGGCGTGTACGGTGGGAGGTCTATATAAGCAGAGCTCGTTTAGTGAACCGTCAGAAT | |
| | | TTTGTAATACGACTCACTATAGGGCGGCCGGGAATTCGCCACCATGGTGAGCAAGGGCGAGGAGCTG | |
| | | TTCACCGGGGTGGTGCCCATCCTGGTCGAGCTGGACGGCGACGTAAACGGCCACAAGTTCAGCGTGT | |
| | | CCGGCGAGGGCGAGGGCGATGCCACCTACGGCAAGCTGACCCTGAAGTTCATCTGCACCACCGGCAA | |
| | | GCTGCCCGTGCCCTGGCCCACCCTC (SEQ ID NO: 21350) | |
| | (5-500 nt) | ACTTTCCTACTTGGCAGTACATCTACGTATTAGTCATCGCTATTACCATGGTGATGCGGTTTTGGCAGT | 20 nt Homology |
| | | ACACCAATGGGCGTGGATAGCGGTTTGACTCACGGGGATTTCCAAGTCTCCACCCCATTGACGTCAAT | 1 |
| | | GGGAGTTTGTTTTGGCACCAAAATCAACGGGACTTTCCAAAATGTCGTAATAACCCCGCCCCGTTGAC | |
| | | GCAAATGGGCGGTAGGCGTGTACGGTGGGAGGTCTATATAAGCAGAGCTCGTTTAGTGAACCGTCAG | |
| | | AATTTTGTAATACGACTCACTATAGGGCGGCCGGGAATTCGCCACCATGGTGAGCAAGGGCGAGGAG | |
| | | CTGTTCACCGGGGTGGTGCCCATCCTGGTCGAGCTGGACGGCGACGTAAACGGCCACAAGTTCAGCG | |
| | | TGTCCGGCGAGGGCGAGGGCGATGCCACCTACGGCAAGCTGACCCTGAAGTTCATCTGCACCACCGG | |
| | | CAAGCTGCCCGTGCCCTGGCCCACCCT (SEQ ID NO: 21351) | |

### PBS Sequence

[0472] In some embodiments, a template nucleic acid (e.g., template RNA) comprises a PBS sequence. In some embodiments, a PBS sequence is disposed 3′ of the heterologous object sequence and is complementary to a sequence adjacent to a site to be modified by a system described herein, or comprises no more than 1, 2, 3, 4, or 5 mismatches to a sequence complementary to the sequence adjacent to a site to be modified by the system/gene modifying polypeptide. In some embodiments, the PBS sequence binds within 1, 2, 3, 4, 5, 6, 7, 8, 9, or 10 nucleotides of a nick site in the target nucleic acid molecule. In some embodiments, binding of the PBS sequence to the target nucleic acid molecule permits initiation of target-primed reverse transcription (TPRT), e.g., with the 3′ homology domain acting as a primer for TPRT. In some embodiments, the PBS sequence is 3-5, 5-10, 10-30, 10-25, 10-20, 10-19, 10-18, 10-17, 10-16, 10-15, 10-14, 10-13, 10-12, 10-11, 11-30, 11-25, 11-20, 11-19, 11-18, 11-17, 11-16, 11-15, 11-14, 11-13, 11-12, 12-30, 12-25, 12-20, 12-19, 12-18, 12-17, 12-16, 12-15, 12-14, 12-13, 13-30, 13-25, 13-20, 13-19, 13-18, 13-17, 13-16, 13-15, 13-14, 14-30, 14-25, 14-20, 14-19, 14-18, 14-17, 14-16, 14-15, 15-30, 15-25, 15-20, 15-19, 15-18, 15-17, 15-16, 16-30, 16-25, 16-20, 16-19, 16-18, 16-17, 17-30, 17-25, 17-20, 17-19, 17-18, 18-30, 18-25, 18-20, 18-19, 19-30, 19-25, 19-20, 20-30, 20-25, or 25-30 nucleotides in length, e.g., 10-17, 12-16, or 12-14 nucleotides in length. In some embodiments, the PBS sequence is 5-20, 8-16, 8-14, 8-13, 9-13, 9-12, or 10-12 nucleotides in length, e.g., 9-12 nucleotides in length.

[0473] The template nucleic acid (e.g., template RNA) may have some homology to the target DNA. In some embodiments, the template nucleic acid (e.g., template RNA) PBS sequence domain may serve as an annealing region to the target DNA, such that the target DNA is positioned to prime the reverse transcription of the template nucleic acid (e.g., template RNA). In some embodiments the template nucleic acid (e.g., template RNA) has at least 2, 3, 4, 5, 6, 7, 8, 9, 10, 11, 12, 13, 14, 15, 20, 25, 30, 35, 40, 45, 50, 60, 70, 80, 90, 100, 110, 120, 130, 140, 150, 175, 200 or more bases of exact homology to the target DNA at the 3′ end of the RNA. In some embodiments the template nucleic acid (e.g., template RNA) has at least 2, 3, 4, 5, 6, 7, 8, 9, 10, 11, 12, 13, 14, 15, 20, 25, 30, 35, 40, 45, 50, 60, 70, 80, 90, 100, 110, 120, 130, 140, 150, 175, 200 or more bases of at least 50%, 60%, 70%, 80%, 85%, 90%, 95%, 97%, 98%, 99% or 100% homology to the target DNA, e.g., at the 5′ end of the template nucleic acid (e.g., template RNA).

[0474] In some embodiments, a PBS sequence comprises a nucleic acid sequence as listed in Table 37, or a nucleic acid sequence having at least 70%, 75%, 80%, 85%, 90%, 95%, 97%, 98%, or 99% identity thereto. In some embodiments, a PBS sequence comprises a nucleic acid sequence as listed in Table 37, or a nucleic acid sequence having no more than 1, 2, 3, 4, or 5 nucleotide differences thereto. Herein, when an RNA sequence (e.g., in a PBS sequence) is said to comprise a particular sequence (e.g., a sequence of Table 37 or a portion thereof) that comprises thymine (T), it is of course understood that the RNA sequence may (and frequently does) comprise uracil (U) in place of T. For instance, the RNA sequence may comprise U at every position shown as T in the sequence in Table 37. More specifically, the present disclosure provides an RNA sequence according to every PBS sequence of Table 37, wherein the RNA sequence has a U in place of each T in the sequence in Table 37. In certain embodiments, the PBS has a length between 1-3, 3-5, 5-8, 8-10, 10-12, 12-15, 15-17, 17-20, 20-25, 25-30, or 30-40 nucleotides. In certain embodiments, the PBS has a length of about 1, 2, 3, 4, 5, 6, 7, 8, 9, 10, 11, 12, 13, 14, 15, 16, 17, 18, 19, 20, 21, 22, 23, 24, or 25 nucleotides.

TABLE 37
Exemplary PBS sequences. The below sequences
are listed 5′ to 3′ direction.

| PBS length | Sequence (5′ to 3′) |
|---|---|
| 1 nt | G |
| 2 nt | GC |
| 3 nt | GCG |
| 4 nt | GCGT |
| 5 nt | GCGTG |
| 6 nt | GCGTGC |
| 7 nt | GCGTGCA |
| 8 nt | GCGTGCAG |
| 9 nt | GCGTGCAGT |
| 10 nt | GCGTGCAGTG |
| | (SEQ ID NO: 21352) |
| 11 nt | GCGTGCAGTGC |
| | (SEQ ID NO: 21353) |
| 12 nt | GCGTGCAGTGCT |
| | (SEQ ID NO: 21354) |
| 13 nt | GCGTGCAGTGCTT |
| | (SEQ ID NO: 21355) |
| 14 nt | GCGTGCAGTGCTTC |
| | (SEQ ID NO: 21356) |
| 15 nt | GCGTGCAGTGCTTCG |
| | (SEQ ID NO: 21357) |
| 16 nt | GCGTGCAGTGCTTCGG |
| | (SEQ ID NO: 21358) |
| 17 nt | GCGTGCAGTGCTTCGGC |
| | (SEQ ID NO: 21359) |

gRNAs with Inducible Activity

[0475] In some embodiments, a gRNA described herein (e.g., a gRNA that is part of a template RNA or a gRNA used for second strand nicking) has inducible activity. Inducible activity may be achieved by the template nucleic acid, e.g., template RNA, further comprising (in addition to the gRNA) a blocking domain, wherein the sequence of a portion of or all of the blocking domain is at least partially complementary to a portion or all of the gRNA. The blocking domain is thus capable of hybridizing or substantially hybridizing to a portion of or all of the gRNA. In some embodiments, the blocking domain and inducibly active gRNA are disposed on the template nucleic acid, e.g., template RNA, such that the gRNA can adopt a first conformation where the blocking domain is hybridized or substantially hybridized to the gRNA, and a second conformation where the blocking domain is not hybridized or not substantially hybridized to the gRNA. In some embodiments, in the first conformation the gRNA is unable to bind to the gene modifying polypeptide (e.g., the template nucleic acid binding domain, DNA binding domain, or endonuclease domain (e.g., a CRISPR/Cas protein)) or binds with substantially decreased affinity compared to an otherwise similar template RNA lacking the blocking domain. In some embodiments, in the second conformation the gRNA is able to bind to the gene modifying polypeptide (e.g., the template nucleic acid binding domain, DNA binding domain, or endonuclease domain (e.g., a CRISPR/Cas protein)). In some embodiments, whether the gRNA is in the first or second conformation can influence whether the DNA binding or endonuclease activities of the gene modifying polypeptide (e.g., of the CRISPR/Cas protein the gene modifying polypeptide comprises) are active.

[0476] In some embodiments, the gRNA that coordinates the second nick has inducible activity. In some embodiments, the gRNA that coordinates the second nick is induced after the template is reverse transcribed. In some embodiments, hybridization of the gRNA to the blocking domain can be disrupted using an opener molecule. In some embodiments, an opener molecule comprises an agent that binds to a portion or all of the gRNA or blocking domain and inhibits hybridization of the gRNA to the blocking domain. In some embodiments, the opener molecule comprises a nucleic acid, e.g., comprising a sequence that is partially or wholly complementary to the gRNA, blocking domain, or both. By choosing or designing an appropriate opener molecule, providing the opener molecule can promote a change in the conformation of the gRNA such that it can associate with a CRISPR/Cas protein and provide the associated functions of the CRISPR/Cas protein (e.g., DNA binding and/or endonuclease activity). Without wishing to be bound by theory, providing the opener molecule at a selected time and/or location may allow for spatial and temporal control of the activity of the gRNA, CRISPR/Cas protein, or gene modifying system comprising the same. In some embodiments, the opener molecule is exogenous to the cell comprising the gene modifying polypeptide and or template nucleic acid. In some embodiments, the opener molecule comprises an endogenous agent (e.g., endogenous to the cell comprising the gene modifying polypeptide and or template nucleic acid comprising the gRNA and blocking domain). For example, an inducible gRNA, blocking domain, and opener molecule may be chosen such that the opener molecule is an endogenous agent expressed in a target cell or tissue, e.g., thereby ensuring activity of a gene modifying system in the target cell or tissue. As a further example, an inducible gRNA, blocking domain, and opener molecule may be chosen such that the opener molecule is absent or not substantially expressed in one or more non-target cells or tissues, e.g., thereby ensuring that activity of a gene modifying system does not occur or substantially occur in the one or more non-target cells or tissues, or occurs at a reduced level compared to a target cell or tissue. Exemplary blocking domains, opener molecules, and uses thereof are described in PCT App. Publication WO2020044039A1, which is incorporated herein by reference in its entirety. In some embodiments, the template nucleic acid, e.g., template RNA, may comprise one or more sequences or structures for binding by one or more components of a gene modifying polypeptide, e.g., by a reverse transcriptase or RNA binding domain, and a gRNA. In some embodiments, the gRNA facilitates interaction with the template nucleic acid binding domain (e.g., RNA binding domain) of the gene modifying polypeptide. In some embodiments, the gRNA directs the gene modifying polypeptide to the matching target sequence, e.g., in a target cell genome.

### Additional Guide RNAs

[0477] In some embodiments, a gene modifying system as described herein comprises an additional guide RNA (gRNA), e.g., for unwinding or nicking of the target nucleic acid (e.g., nicking of the opposite strand of that recognized by a PBS sequence of the template RNA). In embodiments, a gene modifying system as described herein comprises 1, 2, 3, 4, or 5 additional distinct gRNAs. In certain embodiments, the additional guide RNA is a separate molecule from the template RNA. In other embodiments, the additional guide RNA is attached to or incorporated into the template RNA (e.g., at the 3′ end of the template RNA). In embodiments, the additional guide RNA is attached to the remainder of the template RNA by a linker region. In some embodiments, the additional guide RNA comprises a stem-loop sequence, e.g., as noted in Table 44.

[0478] In some embodiments, the additional gRNA comprises a pro-spacer, e.g., attached to an end block sequence of the template RNA (e.g., as described herein). In some embodiments, the pro-spacer is 17 nucleotides or longer (e.g., at least about 17, 18, 19, 20, 21, 22, 23, 24, 25, 30, 35, or 40 nucleotides). In embodiments, the pro-spacer directs nicking of the target nucleic acid by a Cas domain (e.g., a Cas9 domain, e.g., an nCas9 domain). In other embodiments, the pro-spacer is less than or equal to 17 nucleotides in length (e.g., about 5, 10, 11, 12, 13, 14, 15, 16, or 17 nucleotides long). In embodiments, the pro-spacer less than or equal to 17 nucleotides long directs unwinding of the target nucleic acid (e.g., by a Cas domain, e.g., a Cas9 domain, e.g., a dCas9 domain) but does not direct nicking of the target nucleic acid by a Cas domain (e.g., a Cas9 domain, e.g., an nCas9 domain).

[0479] In some embodiments, the additional gRNA comprises a scaffold sequence as listed in Table 44, or a nucleic acid sequence having at least 75%, 80%, 85%, 90%, 95%, 96%, 97%, 98%, or 99% identity thereto. In some embodiments, the additional gRNA comprises a scaffold sequence as listed in Table 44, or a nucleic acid sequence having no more than 1, 2, 3, 4, 5, 6, 7, 8, 9, 10, 15, 20, 25, 30, 40, or 50 nucleotide differences therefrom.

[0480] Herein, when an RNA sequence (e.g., a gRNA sequence) is said to comprise a particular sequence (e.g., a sequence of Table 44 or a portion thereof) that comprises thymine (T), it is of course understood that the RNA sequence may (and frequently does) comprise uracil (U) in place of T. For instance, the RNA sequence may comprise U at every position shown as T in the sequence in Table 44. More specifically, the present disclosure provides an RNA sequence according to every gRNA sequence of Table 44, wherein the RNA sequence has a U in place of each T in the sequence in Table 44.

TABLE 44
Exemplary additional guide RNA (gRNA) sequences

| Cas9 | Pro-spacer | |
|---|---|---|
| variant | sequence (5′ to 3′) | Scaffold Sequence (5′ to 3′) |
| Nme2Cas9 | | GTTGTAGCTCCCTTTCTCATTTCGGAAACGAAATGAGAACC |
| scaffold | | GTTGCTACAATAAGGCCGTCTGAAAAGATGTGCCGCAACG |
| | | CTCTGCCCCTTAAAGCTTCTGCTTTAAGGGGCATCGTTTA |
| | | (SEQ ID NO: 20766) |
| Nme2Cas9 | CAGTACATGACCTT | GTTGTAGCTCCCTTTCTCATTTCGGAAACGAAATGAGAACC |
| spacer + | ACGGGA (SEQ ID | GTTGCTACAATAAGGCCGTCTGAAAAGATGTGCCGCAACG |
| scaffold | NO: 21360) | CTCTGCCCCTTAAAGCTTCTGCTTTAAGGGGCATCGTTTA |
| | | (SEQ ID NO: 20766) |
| Nme2Cas9 | ACATGACCTTACGG | GTTGTAGCTCCCTTTCTCATTTCGGAAACGAAATGAGAACC |
| 16 nt | GA (SEQ ID NO: | GTTGCTACAATAAGGCCGTCTGAAAAGATGTGCCGCAACG |
| spacer + | 21361) | CTCTGCCCCTTAAAGCTTCTGCTTTAAGGGGCATCGTTTA |
| scaffold | | (SEQ ID NO: 20766) |
| BlatCas9 | | GCTATAGTTCCTTACTGAAAGGTAAGTTGCTATAGTAAGGG |
| scaffold | | CAACAGACCCGAGGCGTTGGGGATCGCCTAGCCCGTGTTT |
| | | ACGGGCTCTCCCCATATTCAAAATAATGACAGACGAGCACC |
| | | TTGGAGCATTTATCTCCGAGGTGCT (SEQ ID NO: 20769) |
| GeoCas9 | | GTCATAGTTCCCCTGAGAAATCAGGGTTACTATGATAAGGG |
| | | CTTTCTGCCTAAGGCAGACTGACCCGCGGCGTTGGGGATC |
| | | GCCTGTCGCCCGCTTTTGGCGGGCATTCCCCATCCTT (SEQ |
| | | ID NO: 20770) |
| PpnCas9 | | GTTGTAGCTCCCTTTTTCATTTCGCGAAAGCGAAATGAAAA |
| scaffold | | ACGTTGTTACAATAAGAGATGAATTTCTCGCAAAGCTCTGC |
| | | CTCTTGAAATTTCGGTTTCAAGAGGCATC (SEQ ID NO: |
| | | 20771) |
| CdiCas9scaf | | ACTGGGGTTCAGGAAACTGAACCTCAGTAAGCATTGGCTC |
| fold | | GTTTCCAATGTTGATTGCTCCGCCGGTGCTCCTTATTTTTAA |
| | | GGGCGCCGGC (SEQ ID NO: 20772) |
| SpyCas9+ | | GTTTTAGAGCTAGAAATAGCAAGTTAAAATAAGGCTAGTCC |
| hairpin | | GTTATCAACTTGAAAAAGTGGCACCGGGACTTCGGTC |
| scaffold | | CCGGTGC (SEQ ID NO: 20773) |
| St1Cas9 | | GTCTTTGTACTCTGGTACCAGAAGCTACAAAGATAAGGCTT |
| scaffold | | CATGCCGAAATCAACACCCTGTCATTTTATGGCAGGGTGTT |
| | | TT (SEQ ID NO: 20774) |
| cCas9-v16 | | GTCTTAGTACTCTGGAAACAGAATCTACTAAGACAAGGCAA |
| scaffold | | AATGCCGTGTTTATCTCGTCAACTTGTTGGCGAGA (SEQ ID |
| | | NO: 20775) |
| SpyCas9- | | GTTTAAGAGCTATGCTGGAAACAGCATAGCAAGTTTAAATA |
| 3var-NRRH | | AGGCTAGTCCGTTATCAACTTGAAAAAGTGGCACCGAGTC |
| scaffold | | GGTGC (SEQ ID NO: 20776) |
| SauCas9 | | GTTTTAGTACTCTGGAAACAGAATCTACTAAAACAAGGCAA |
| scaffold | | AATGCCGTGTTTATCTCGTCAACTTGTTGGCGAGA (SEQ ID |
| | | NO: 20777) |
| CjeCas9 | | GTTTTAGTCCCTGAAAAGGGACTAAAATAAAGAGTTTGCG |
| scaffold | | GGACTCTGCGGGGTTACAATCCCCTAAAACCGC (SEQ ID |
| | | NO: 20778) |
| SpyCas9 | | GTTTTAGAGCTAGAAATAGCAAGTTAAAATAAGGCTAGTCC |
| scaffold | | GTTATCAACTTGAAAAAGTGGCACCGAGTCGGTGC (SEQ ID |
| | | NO: 20779) |

### Circular RNAs and Ribozymes in Gene Modifying Systems

[0481] It is contemplated that it may be useful to employ circular and/or linear RNA states during the formulation, delivery, or gene modifying reaction within the target cell. Thus, in some embodiments of any of the aspects described herein, a gene modifying system comprises one or more circular RNAs (circRNAs). In some embodiments of any of the aspects described herein, a gene modifying system comprises one or more linear RNAs. In some embodiments, a nucleic acid as described herein (e.g., a template nucleic acid, a nucleic acid molecule encoding a gene modifying polypeptide, or both) is a circRNA. In some embodiments, a circular RNA molecule encodes the gene modifying polypeptide. In some embodiments, the circRNA molecule encoding the gene modifying polypeptide is delivered to a host cell. In some embodiments, a circular RNA molecule encodes a recombinase, e.g., as described herein. In some embodiments, the circRNA molecule encoding the recombinase is delivered to a host cell. In some embodiments, the circRNA molecule encoding the gene modifying polypeptide is linearized (e.g., in the host cell, e.g., in the nucleus of the host cell) prior to translation.

[0482] Circular RNAs (circRNAs) have been found to occur naturally in cells and have been found to have diverse functions, including both non-coding and protein coding roles in human cells. It has been shown that a circRNA can be engineered by incorporating a self-splicing intron into an RNA molecule (or DNA encoding the RNA molecule) that results in circularization of the RNA, and that an engineered circRNA can have enhanced protein production and stability (Wesselhoeft et al. Nature Communications 2018). In some embodiments, the gene modifying polypeptide is encoded as circRNA. In certain embodiments, the template nucleic acid is a DNA, such as a dsDNA or ssDNA. In certain embodiments, the circDNA comprises a template RNA.

[0483] In some embodiments, the circRNA comprises one or more ribozyme sequences. In some embodiments, the ribozyme sequence is activated for autocleavage, e.g., in a host cell, e.g., thereby resulting in linearization of the circRNA. In some embodiments, the ribozyme is activated when the concentration of magnesium reaches a sufficient level for cleavage, e.g., in a host cell. In some embodiments the circRNA is maintained in a low magnesium environment prior to delivery to the host cell. In some embodiments, the ribozyme is a protein-responsive ribozyme. In some embodiments, the ribozyme is a nucleic acid-responsive ribozyme. In some embodiments, the circRNA comprises a cleavage site. In some embodiments, the circRNA comprises a second cleavage site.

[0484] In some embodiments, the circRNA is linearized in the nucleus of a target cell. In some embodiments, linearization of a circRNA in the nucleus of a cell involves components present in the nucleus of the cell, e.g., to activate a cleavage event. In some embodiments, a ribozyme, e.g., a ribozyme from a B2 or ALU element, that is responsive to a nuclear element, e.g., a nuclear protein, e.g., a genome-interacting protein, e.g., an epigenetic modifier, e.g., EZH2, is incorporated into a circRNA, e.g., of a gene modifying system. In some embodiments, nuclear localization of the circRNA results in an increase in autocatalytic activity of the ribozyme and linearization of the circRNA.

[0485] In some embodiments, the ribozyme is heterologous to one or more of the other components of the gene modifying system. In some embodiments, an inducible ribozyme (e.g., in a circRNA as described herein) is created synthetically, for example, by utilizing a protein ligand-responsive aptamer design. A system for utilizing the satellite RNA of tobacco ringspot virus hammerhead ribozyme with an MS2 coat protein aptamer has been described (Kennedy et al. Nucleic Acids Res 42(19):12306-12321 (2014), incorporated herein by reference in its entirety) that results in activation of the ribozyme activity in the presence of the MS2 coat protein. In embodiments, such a system responds to protein ligand localized to the cytoplasm or the nucleus. In some embodiments the protein ligand is not MS2. Methods for generating RNA aptamers to target ligands have been described, for example, based on the systematic evolution of ligands by exponential enrichment (SELEX) (Tuerk and Gold, Science 249(4968):505-510 (1990); Ellington and Szostak, Nature 346(6287):818-822 (1990); the methods of each of which are incorporated herein by reference) and have, in some instances, been aided by in silico design (Bell et al. PNAS 117(15):8486-8493, the methods of which are incorporated herein by reference). Thus, in some embodiments, an aptamer for a target ligand is generated and incorporated into a synthetic ribozyme system, e.g., to trigger ribozyme-mediated cleavage and circRNA linearization, e.g., in the presence of the protein ligand. In some embodiments, circRNA linearization is triggered in the cytoplasm, e.g., using an aptamer that associates with a ligand in the cytoplasm. In some embodiments, circRNA linearization is triggered in the nucleus, e.g., using an aptamer that associates with a ligand in the nucleus. In embodiments, the ligand in the nucleus comprises an epigenetic modifier or a transcription factor. In some embodiments the ligand that triggers linearization is present at higher levels in on-target cells than off-target cells.

[0486] It is further contemplated that a nucleic acid-responsive ribozyme system can be employed for circRNA linearization. For example, biosensors that sense defined target nucleic acid molecules to trigger ribozyme activation are described, e.g., in Penchovsky (Biotechnology Advances 32(5):1015-1027 (2014), incorporated herein by reference). By these methods, a ribozyme naturally folds into an inactive state and is only activated in the presence of a defined target nucleic acid molecule (e.g., an RNA molecule). In some embodiments, a circRNA of a gene modifying system comprises a nucleic acid-responsive ribozyme that is activated in the presence of a defined target nucleic acid, e.g., an RNA, e.g., an mRNA, miRNA, guide RNA, gRNA, sgRNA, ncRNA, lncRNA, tRNA, snRNA, or mtRNA. In some embodiments the nucleic acid that triggers linearization is present at higher levels in on-target cells than off-target cells.

[0487] In some embodiments of any of the aspects herein, a gene modifying system incorporates one or more ribozymes with inducible specificity to a target tissue or target cell of interest, e.g., a ribozyme that is activated by a ligand or nucleic acid present at higher levels in a target tissue or target cell of interest. In some embodiments, the gene modifying system incorporates a ribozyme with inducible specificity to a subcellular compartment, e.g., the nucleus, nucleolus, cytoplasm, or mitochondria. In some embodiments, the ribozyme that is activated by a ligand or nucleic acid present at higher levels in the target subcellular compartment. In some embodiments, an RNA component of a gene modifying system is provided as circRNA, e.g., that is activated by linearization. In some embodiments, linearization of a circRNA encoding a gene modifying polypeptide activates the molecule for translation. In some embodiments, a signal that activates a circRNA component of a gene modifying system is present at higher levels in on-target cells or tissues, e.g., such that the system is specifically activated in these cells.

[0488] In some embodiments, an RNA component of a gene modifying system is provided as a circRNA that is inactivated by linearization. In some embodiments, a circRNA encoding the gene modifying polypeptide is inactivated by cleavage and degradation. In some embodiments, a circRNA encoding the gene modifying polypeptide is inactivated by cleavage that separates a translation signal from the coding sequence of the polypeptide. In some embodiments, a signal that inactivates a circRNA component of a gene modifying system is present at higher levels in off-target cells or tissues, such that the system is specifically inactivated in these cells.

### Target Nucleic Acid Site

[0489] In some embodiments, after gene modification, the target site surrounding the edited sequence contains a limited number of insertions or deletions, for example, in less than about 50% or 10% of editing events, e.g., as determined by long-read amplicon sequencing of the target site, e.g., as described in Karst et al. (2020) bioRxiv doi.org/10.1101/645903 (incorporated by reference herein in its entirety). In some embodiments, the target site does not show multiple consecutive editing events, e.g., head-to-tail or head-to-head duplications, e.g., as determined by long-read amplicon sequencing of the target site, e.g., as described in Karst et al. bioRxiv doi.org/10.1101/645903 (2020) (incorporated herein by reference in its entirety). In some embodiments, the target site contains an integrated sequence corresponding to the template RNA. In some embodiments, the target site does not contain insertions resulting from endogenous RNA in more than about 1% or 10% of events, e.g., as determined by long-read amplicon sequencing of the target site, e.g., as described in Karst et al. bioRxiv doi.org/10.1101/645903 (2020) (incorporated herein by reference in its entirety). In some embodiments, the target site contains the integrated sequence corresponding to the template RNA.

[0490] In certain aspects of the present invention, the host DNA-binding site integrated into by the gene modifying system can be in a gene, in an intron, in an exon, an ORF, outside of a coding region of any gene, in a regulatory region of a gene, or outside of a regulatory region of a gene. In other aspects, the polypeptide may bind to one or more than one host DNA sequence.

[0491] In some embodiments, a gene modifying system is used to edit a target locus in multiple alleles. In some embodiments, a gene modifying system is designed to edit a specific allele. For example, a gene modifying polypeptide may be directed to a specific sequence that is only present on one allele, e.g., comprises a template RNA with homology to a target allele, e.g., a gRNA or annealing domain, but not to a second cognate allele. In some embodiments, a gene modifying system can alter a haplotype-specific allele. In some embodiments, a gene modifying system that targets a specific allele preferentially targets that allele, e.g., has at least a 2, 4, 6, 8, or 10-fold preference for a target allele.

### Second Strand Nicking

[0492] In some embodiments, a gene modifying system described herein comprises a nickase activity (e.g., in the gene modifying polypeptide) that nicks the first strand, and a nickase activity (e.g., in a polypeptide separate from the gene modifying polypeptide) that nicks the second strand of target DNA. As discussed herein, without wishing to be bound by theory, nicking of the first strand of the target site DNA is thought to provide a 3′ OH that can be used by an RT domain to reverse transcribe a sequence of a template RNA, e.g., a heterologous object sequence. Without wishing to be bound by theory, it is thought that introducing an additional nick to the second strand may bias the cellular DNA repair machinery to adopt the heterologous object sequence-based sequence more frequently than the original genomic sequence. In some embodiments, the additional nick to the second strand is made by the same endonuclease domain (e.g., nickase domain) as the nick to the first strand. In some embodiments, the same gene modifying polypeptide performs both the nick to the first strand and the nick to the second strand. In some embodiments, the gene modifying polypeptide comprises a CRISPR/Cas domain and the additional nick to the second strand is directed by an additional nucleic acid, e.g., comprising a second gRNA directing the CRISPR/Cas domain to nick the second strand. In other embodiments, the additional second strand nick is made by a different endonuclease domain (e.g., nickase domain) than the nick to the first strand. In some embodiments, that different endonuclease domain is situated in an additional polypeptide (e.g., a system of the invention further comprises the additional polypeptide), separate from the gene modifying polypeptide. In some embodiments, the additional polypeptide comprises an endonuclease domain (e.g., nickase domain) described herein. In some embodiments, the additional polypeptide comprises a DNA binding domain, e.g., described herein.

[0493] It is contemplated herein that the position at which the second strand nick occurs relative to the first strand nick may influence the extent to which one or more of: desired gene modifying DNA modifications are obtained, undesired double-strand breaks (DSBs) occur, undesired insertions occur, or undesired deletions occur. Without wishing to be bound by theory, second strand nicking may occur in two general orientations: inward nicks and outward nicks.

[0494] In some embodiments, in the inward nick orientation, the RT domain polymerizes (e.g., using the template RNA (e.g., the heterologous object sequence)) away from the second strand nick. In some embodiments, in the inward nick orientation, the location of the nick to the first strand and the location of the nick to the second strand are positioned between the first PAM site and second PAM site (e.g., in a scenario wherein both nicks are made by a polypeptide (e.g., a gene modifying polypeptide) comprising a CRISPR/Cas domain). When there are two PAMs on the outside and two nicks on the inside, this inward nick orientation can also be referred to as “PAM-out”. In some embodiments, in the inward nick orientation, the location of the nick to the first strand and the location of the nick to the second strand are between the sites where the polypeptide and the additional polypeptide bind to the target DNA. In some embodiments, in the inward nick orientation, the location of the nick to the second strand is positioned between the binding sites of the polypeptide and additional polypeptide, and the nick to the first strand is also located between the binding sites of the polypeptide and additional polypeptide. In some embodiments, in the inward nick orientation, the location of the nick to the first strand and the location of the nick to the second strand are positioned between the PAM site and the binding site of the second polypeptide which is at a distance from the target site.

[0495] An example of a gene modifying system that provides an inward nick orientation comprises a gene modifying polypeptide comprising a CRISPR/Cas domain, a template RNA comprising a gRNA that directs nicking of the target site DNA on the first strand, and an additional nucleic acid comprising an additional gRNA that directs nicking at a site a distance from the location of the first nick, wherein the location of the first nick and the location of the second nick are between the PAM sites of the sites to which the two gRNAs direct the gene modifying polypeptide. As a further example, another gene modifying system that provides an inward nick orientation comprises a gene modifying polypeptide comprising a zinc finger molecule and a first nickase domain wherein the zinc finger molecule binds to the target DNA in a manner that directs the first nickase domain to nick the first strand of the target site; an additional polypeptide comprising a CRISPR/Cas domain, and an additional nucleic acid comprising a gRNA that directs the additional polypeptide to nick a site a distance from the target site DNA on the second strand, wherein the location of the first nick and the location of the second nick are between the PAM site and the site to which the zinc finger molecule binds. As a further example, another gene modifying system that provides an inward nick orientation comprises a gene modifying polypeptide comprising a zinc finger molecule and a first nickase domain wherein the zinc finger molecule binds to the target DNA in a manner that directs the first nickase domain to nick the first strand of the target site; an additional polypeptide comprising a TAL effector molecule and a second nickase domain wherein the TAL effector molecule binds to a site a distance from the target site in a manner that directs the additional polypeptide to nick the second strand, wherein the location of the first nick and the location of the second nick are between the site to which the TAL effector molecule binds and the site to which the zinc finger molecule binds.

[0496] In some embodiments, in the outward nick orientation, the RT domain polymerizes (e.g., using the template RNA (e.g., the heterologous object sequence)) toward the second strand nick. In some embodiments, in the outward nick orientation when both the first and second nicks are made by a polypeptide comprising a CRISPR/Cas domain (e.g., a gene modifying polypeptide), the first PAM site and second PAM site are positioned between the location of the nick to the first strand and the location of the nick to the second strand. When there are two PAMs on the inside and two nicks on the outside, this outward nick orientation also can be referred to as “PAM-in”. In some embodiments, in the outward nick orientation, the polypeptide (e.g., the gene modifying polypeptide) and the additional polypeptide bind to sites on the target DNA between the location of the nick to the first strand and the location of the nick to the second. In some embodiments, in the outward nick orientation, the location of the nick to the second strand is positioned on the opposite side of the binding sites of the polypeptide and additional polypeptide relative to the location of the nick to the first strand. In some embodiments, in the outward orientation, the PAM site and the binding site of the second polypeptide which is at a distance from the target site are positioned between the location of the nick to the first strand and the location of the nick to the second strand.

[0497] An example of a gene modifying system that provides an outward nick orientation comprises a gene modifying polypeptide comprising a CRISPR/Cas domain, a template RNA comprising a gRNA that directs nicking of the target site DNA on the first strand, and an additional nucleic acid comprising an additional gRNA that directs nicking at a site a distance from the location of the first nick, wherein the location of the first nick and the location of the second nick are outside of the PAM sites of the sites to which the two gRNAs direct the gene modifying polypeptide (i.e., the PAM sites are between the location of the first nick and the location of the second nick). As a further example, another gene modifying system that provides an outward nick orientation comprises a gene modifying polypeptide comprising a zinc finger molecule and a first nickase domain wherein the zinc finger molecule binds to the target DNA in a manner that directs the first nickase domain to nick the first strand of the target site; an additional polypeptide comprising a CRISPR/Cas domain, and an additional nucleic acid comprising a gRNA that directs the additional polypeptide to nick a site a distance from the target site DNA on the second strand, wherein the location of the first nick and the location of the second nick are outside the PAM site and the site to which the zinc finger molecule binds (i.e., the PAM site and the site to which the zinc finger molecule binds are between the location of the first nick and the location of the second nick). As a further example, another gene modifying system that provides an outward nick orientation comprises a gene modifying polypeptide comprising a zinc finger molecule and a first nickase domain wherein the zinc finger molecule binds to the target DNA in a manner that directs the first nickase domain to nick the first strand of the target site; an additional polypeptide comprising a TAL effector molecule and a second nickase domain wherein the TAL effector molecule binds to a site a distance from the target site in a manner that directs the additional polypeptide to nick the second strand, wherein the location of the first nick and the location of the second nick are outside the site to which the TAL effector molecule binds and the site to which the zinc finger molecule binds (i.e., the site to which the TAL effector molecule binds and the site to which the zinc finger molecule binds are between the location of the first nick and the location of the second nick).

[0498] Without wishing to be bound by theory, it is thought that, for gene modifying systems where a second strand nick is provided, an outward nick orientation is preferred in some embodiments. As is described herein, an inward nick may produce a higher number of double-strand breaks (DSBs) than an outward nick orientation. DSBs may be recognized by the DSB repair pathways in the nucleus of a cell, which can result in undesired insertions and deletions. An outward nick orientation may provide a decreased risk of DSB formation, and a corresponding lower amount of undesired insertions and deletions. In some embodiments, undesired insertions and deletions are insertions and deletions not encoded by the heterologous object sequence, e.g., an insertion or deletion produced by the double-strand break repair pathway unrelated to the modification encoded by the heterologous object sequence. In some embodiments, a desired gene modification comprises a change to the target DNA (e.g., a substitution, insertion, or deletion) encoded by the heterologous object sequence (e.g., and achieved by the gene modifying writing the heterologous object sequence into the target site). In some embodiments, the first strand nick and the second strand nick are in an outward orientation.

[0499] In addition, the distance between the first strand nick and second strand nick may influence the extent to which one or more of: desired gene modifying system DNA modifications are obtained, undesired double-strand breaks (DSBs) occur, undesired insertions occur, or undesired deletions occur. Without wishing to be bound by theory, it is thought the second strand nick benefit, the biasing of DNA repair toward incorporation of the heterologous object sequence into the target DNA, increases as the distance between the first strand nick and second strand nick decreases. However, it is thought that the risk of DSB formation also increases as the distance between the first strand nick and second strand nick decreases. Correspondingly, it is thought that the number of undesired insertions and/or deletions may increase as the distance between the first strand nick and second strand nick decreases. In some embodiments, the distance between the first strand nick and second strand nick is chosen to balance the benefit of biasing DNA repair toward incorporation of the heterologous object sequence into the target DNA and the risk of DSB formation and of undesired deletions and/or insertions. In some embodiments, a system where the first strand nick and the second strand nick are at least a threshold distance apart has an increased level of desired gene modifying system modification outcomes, a decreased level of undesired deletions, and/or a decreased level of undesired insertions relative to an otherwise similar inward nick orientation system where the first nick and the second nick are less than the a threshold distance apart. In some embodiments the threshold distance(s) is given below.

[0500] In some embodiments, the first nick and the second nick are at least 20, 25, 30, 35, 40, 45, 50, 55, 60, 65, 70, 75, 80, 85, 90, 95, 100, 110, 120, 130, 140, 150, 160, 170, 180, 190, or 200 nucleotides apart. In some embodiments, the first nick and the second nick are no more than 25, 30, 35, 40, 45, 50, 55, 60, 65, 70, 75, 80, 85, 90, 95, 100, 110, 120, 130, 140, 150, 160, 170, 180, 190, 200, or 250 nucleotides apart. In some embodiments, the first nick and the second nick are 20-200, 30-200, 40-200, 50-200, 60-200, 70-200, 80-200, 90-200, 100-200, 110-200, 120-200, 130-200, 140-200, 150-200, 160-200, 170-200, 180-200, 190-200, 20-190, 30-190, 40-190, 50-190, 60-190, 70-190, 80-190, 90-190, 100-190, 110-190, 120-190, 130-190, 140-190, 150-190, 160-190, 170-190, 180-190, 20-180, 30-180, 40-180, 50-180, 60-180, 70-180, 80-180, 90-180, 100-180, 110-180, 120-180, 130-180, 140-180, 150-180, 160-180, 170-180, 20-170, 30-170, 40-170, 50-170, 60-170, 70-170, 80-170, 90-170, 100-170, 110-170, 120-170, 130-170, 140-170, 150-170, 160-170, 20-160, 30-160, 40-160, 50-160, 60-160, 70-160, 80-160, 90-160, 100-160, 110-160, 120-160, 130-160, 140-160, 150-160, 20-150, 30-150, 40-150, 50-150, 60-150, 70-150, 80-150, 90-150, 100-150, 110-150, 120-150, 130-150, 140-150, 20-140, 30-140, 40-140, 50-140, 60-140, 70-140, 80-140, 90-140, 100-140, 110-140, 120-140, 130-140, 20-130, 30-130, 40-130, 50-130, 60-130, 70-130, 80-130, 90-130, 100-130, 110-130, 120-130, 20-120, 30-120, 40-120, 50-120, 60-120, 70-120, 80-120, 90-120, 100-120, 110-120, 20-110, 30-110, 40-110, 50-110, 60-110, 70-110, 80-110, 90-110, 100-110, 20-100, 30-100, 40-100, 50-100, 60-100, 70-100, 80-100, 90-100, 20-90, 30-90, 40-90, 50-90, 60-90, 70-90, 80-90, 20-80, 30-80, 40-80, 50-80, 60-80, 70-80, 20-70, 30-70, 40-70, 50-70, 60-70, 20-60, 30-60, 40-60, 50-60, 20-50, 30-50, 40-50, 20-40, 30-40, or 20-30 nucleotides apart. In some embodiments, the first nick and the second nick are 40-100 nucleotides apart.

[0501] Without wishing to be bound by theory, it is thought that, for gene modifying systems where a second strand nick is provided and an inward nick orientation is selected, increasing the distance between the first strand nick and second strand nick may be preferred. As is described herein, an inward nick orientation may produce a higher number of DSBs than an outward nick orientation, and may result in a higher amount of undesired insertions and deletions than an outward nick orientation, but increasing the distance between the nicks may mitigate that increase in DSBs, undesired deletions, and/or undesired insertions. In some embodiments, an inward nick orientation wherein the first nick and the second nick are at least a threshold distance apart has an increased level of desired gene modifying system modification outcomes, a decreased level of undesired deletions, and/or a decreased level of undesired insertions relative to an otherwise similar inward nick orientation system where the first nick and the second nick are less than the a threshold distance apart. In some embodiments the threshold distance is given below.

[0502] In some embodiments, the first strand nick and the second strand nick are in an inward orientation. In some embodiments, the first strand nick and the second strand nick are in an inward orientation and the first strand nick and second strand nick are at least 100, 110, 120, 130, 140, 150, 160, 170, 180, 190, 200, 220, 240, 260, 280, 300, 350, 400, 450, or 500 nucleotides apart, e.g., at least 100 nucleotides apart, (and optionally no more than 500, 400, 300, 200, 190, 180, 170, 160, 150, 140, 130, or 120 nucleotides apart). In some embodiments, the first strand nick and the second strand nick are in an inward orientation and the first strand nick and second strand nick are 100-200, 110-200, 120-200, 130-200, 140-200, 150-200, 160-200, 170-200, 180-200, 190-200, 100-190, 110-190, 120-190, 130-190, 140-190, 150-190, 160-190, 170-190, 180-190, 100-180, 110-180, 120-180, 130-180, 140-180, 150-180, 160-180, 170-180, 100-170, 110-170, 120-170, 130-170, 140-170, 150-170, 160-170, 100-160, 110-160, 120-160, 130-160, 140-160, 150-160, 100-150, 110-150, 120-150, 130-150, 140-150, 100-140, 110-140, 120-140, 130-140, 100-130, 110-130, 120-130, 100-120, 110-120, or 100-110 nucleotides apart.

### Chemically Modified Nucleic Acids and Nucleic Acid End Features

[0503] A nucleic acid described herein (e.g., a template nucleic acid, e.g., a template RNA; or a nucleic acid (e.g., mRNA) encoding a gene modifying polypeptide; or a gRNA) can comprise unmodified or modified nucleobases. Naturally occurring RNAs are synthesized from four basic ribonucleotides: ATP, CTP, UTP and GTP, but may contain post-transcriptionally modified nucleotides. Further, approximately one hundred different nucleoside modifications have been identified in RNA (Rozenski, J, Crain, P, and McCloskey, J. (1999). The RNA Modification Database: 1999 update. Nucl Acids Res 27: 196-197). An RNA can also comprise wholly synthetic nucleotides that do not occur in nature.

[0504] In some embodiments, the chemical modification is one provided in WO/2016/183482, US Pat. Pub. No. 20090286852, of International Application No. WO/2012/019168, WO/2012/045075, WO/2012/135805, WO/2012/158736, WO/2013/039857, WO/2013/039861, WO/2013/052523, WO/2013/090648, WO/2013/096709, WO/2013/101690, WO/2013/106496, WO/2013/130161, WO/2013/151669, WO/2013/151736, WO/2013/151672, WO/2013/151664, WO/2013/151665, WO/2013/151668, WO/2013/151671, WO/2013/151667, WO/2013/151670, WO/2013/151666, WO/2013/151663, WO/2014/028429, WO/2014/081507, WO/2014/093924, WO/2014/093574, WO/2014/113089, WO/2014/144711, WO/2014/144767, WO/2014/144039, WO/2014/152540, WO/2014/152030, WO/2014/152031, WO/2014/152027, WO/2014/152211, WO/2014/158795, WO/2014/159813, WO/2014/164253, WO/2015/006747, WO/2015/034928, WO/2015/034925, WO/2015/038892, WO/2015/048744, WO/2015/051214, WO/2015/051173, WO/2015/051169, WO/2015/058069, WO/2015/085318, WO/2015/089511, WO/2015/105926, WO/2015/164674, WO/2015/196130, WO/2015/196128, WO/2015/196118, WO/2016/011226, WO/2016/011222, WO/2016/011306, WO/2016/014846, WO/2016/022914, WO/2016/036902, WO/2016/077125, or WO/2016/077123, each of which is herein incorporated by reference in its entirety. It is understood that incorporation of a chemically modified nucleotide into a polynucleotide can result in the modification being incorporated into a nucleobase, the backbone, or both, depending on the location of the modification in the nucleotide. In some embodiments, the backbone modification is one provided in EP 2813570, which is herein incorporated by reference in its entirety. In some embodiments, the modified cap is one provided in US Pat. Pub. No. 20050287539, which is herein incorporated by reference in its entirety.

[0505] In some embodiments, the chemically modified nucleic acid (e.g., RNA, e.g., mRNA) comprises one or more of ARCA: anti-reverse cap analog (m27.3′-OGP3G), GP3G (Unmethylated Cap Analog), m7GP3G (Monomethylated Cap Analog), m32.2.7GP3G (Trimethylated Cap Analog), m5CTP (5′-methyl-cytidine triphosphate), m6ATP (N6-methyl-adenosine-5′-triphosphate), s2UTP (2-thio-uridine triphosphate), and Ψ (pseudouridine triphosphate).

[0506] In some embodiments, the chemically modified nucleic acid comprises a 5′ cap, e.g.: a 7-methylguanosine cap (e.g., a O-Me-m7G cap); a hypermethylated cap analog; an NAD+-derived cap analog (e.g., as described in Kiledjian, Trends in Cell Biology 28, 454-464 (2018)); or a modified, e.g., biotinylated, cap analog (e.g., as described in Bednarek et al., Phil Trans R Soc B 373, 20180167 (2018)).

[0507] In some embodiments, the chemically modified nucleic acid comprises a 3′ feature selected from one or more of: a polyA tail; a 16-nucleotide long stem-loop structure flanked by unpaired 5 nucleotides (e.g., as described by Mannironi et al., Nucleic Acid Research 17, 9113-9126 (1989)); a triple-helical structure (e.g., as described by Brown et al., PNAS 109, 19202-19207 (2012)); a tRNA, Y RNA, or vault RNA structure (e.g., as described by Labno et al., Biochemica et Biophysica Acta 1863, 3125-3147 (2016)); incorporation of one or more deoxyribonucleotide triphosphates (dNTPs), 2′O-Methylated NTPs, or phosphorothioate-NTPs; a single nucleotide chemical modification (e.g., oxidation of the 3′ terminal ribose to a reactive aldehyde followed by conjugation of the aldehyde-reactive modified nucleotide); or chemical ligation to another nucleic acid molecule.

[0508] In some embodiments, the nucleic acid (e.g., template nucleic acid) comprises one or more modified nucleotides, e.g., selected from dihydrouridine, inosine, 7-methylguanosine, 5-methylcytidine (5mC), 5′ Phosphate ribothymidine, 2′-O-methyl ribothymidine, 2′-O-ethyl ribothymidine, 2′-fluoro ribothymidine, C-5 propynyl-deoxycytidine (pdC), C-5 propynyl-deoxyuridine (pdU), C-5 propynyl-cytidine (pC), C-5 propynyl-uridine (pU), 5-methyl cytidine, 5-methyl uridine, 5-methyl deoxycytidine, 5-methyl deoxyuridine methoxy, 2,6-diaminopurine, 5′-Dimethoxytrityl-N4-ethyl-2′-deoxycytidine, C-5 propynyl-f-cytidine (pfC), C-5 propynyl-f-uridine (pfU), 5-methyl f-cytidine, 5-methyl f-uridine, C-5 propynyl-m-cytidine (pmC), C-5 propynyl-f-uridine (pmU), 5-methyl m-cytidine, 5-methyl m-uridine, LNA (locked nucleic acid), MGB (minor groove binder) pseudouridine (Ψ), 1-N-methylpseudouridine (1-Me-Ψ), or 5-methoxyuridine (5-MO-U).

[0509] In some embodiments, the nucleic acid comprises a backbone modification, e.g., a modification to a sugar or phosphate group in the backbone. In some embodiments, the nucleic acid comprises a nucleobase modification.

[0510] In some embodiments, the nucleic acid comprises one or more chemically modified nucleotides of Table 13, one or more chemical backbone modifications of Table 14, one or more chemically modified caps of Table 15. For instance, in some embodiments, the nucleic acid comprises two or more (e.g., 3, 4, 5, 6, 7, 8, 9, or 10 or more) different types of chemical modifications. As an example, the nucleic acid may comprise two or more (e.g., 3, 4, 5, 6, 7, 8, 9, or 10 or more) different types of modified nucleobases, e.g., as described herein, e.g., in Table 13. Alternatively or in combination, the nucleic acid may comprise two or more (e.g., 3, 4, 5, 6, 7, 8, 9, or 10 or more) different types of backbone modifications, e.g., as described herein, e.g., in Table 14. Alternatively or in combination, the nucleic acid may comprise one or more modified cap, e.g., as described herein, e.g., in Table 15. For instance, in some embodiments, the nucleic acid comprises one or more type of modified nucleobase and one or more type of backbone modification; one or more type of modified nucleobase and one or more modified cap; one or more type of modified cap and one or more type of backbone modification; or one or more type of modified nucleobase, one or more type of backbone modification, and one or more type of modified cap.

[0511] In some embodiments, the nucleic acid comprises one or more (e.g., 2, 3, 4, 5, 6, 7, 8, 9, 10, 20, 30, 40, 50, 60, 70, 80, 90, 100, 150, 200, 250, 300, 350, 400, 450, 500, 600, 700, 800, 900, 1000, or more) modified nucleobases. In some embodiments, all nucleobases of the nucleic acid are modified. In some embodiments, the nucleic acid is modified at one or more (e.g., 2, 3, 4, 5, 6, 7, 8, 9, 10, 20, 30, 40, 50, 60, 70, 80, 90, 100, 150, 200, 250, 300, 350, 400, 450, 500, 600, 700, 800, 900, 1000, or more) positions in the backbone. In some embodiments, all backbone positions of the nucleic acid are modified.

TABLE 13
Modified nucleotides

| | |
|---|---|
| 5-aza-uridine | N2-methyl-6-thio-guanosine |
| 2-thio-5-aza-midine | N2,N2-dimethyl-6-thio-guanosine |
| 2-thiouridine | pyridin-4-one ribonucleoside |
| 4-thio-pseudouridine | 2-thio-5-aza-uridine |
| 2-thio-pseudouridine | 2-thiomidine |
| 5-hydroxyuridine | 4-thio-pseudomidine |
| 3-methyluridine | 2-thio-pseudowidine |
| 5-carboxymethyl-uridine | 3-methylmidine |
| 1-carboxymethyl-pseudouridine | 1-propynyl-pseudomidine |
| 5-propynyl-uridine | 1-methyl-1-deaza-pseudomidine |
| 1-propynyl-pseudouridine | 2-thio-1-methyl-1-deaza-pseudouridine |
| 5-taurinomethyluridine | 4-methoxy-pseudomidine |
| 1-taurinomethyl-pseudouridine | 5′-O-(1-Thiophosphate)-Adenosine |
| 5-taurinomethyl-2-thio-uridine | 5′-O-(1-Thiophosphate)-Cytidine |
| 1-taurinomethyl-4-thio-uridine | 5′-O-(1-thiophosphate)-Guanosine |
| 5-methyl-uridine | 5′-O-(1-Thiophophate)-Uridine |
| 1-methyl-pseudouridine | 5′-O-(1-Thiophosphate)-Pseudouridine |
| 4-thio-1-methyl-pseudouridine | 2′-O-methyl-Adenosine |
| 2-thio-1-methyl-pseudouridine | 2′-O-methyl-Cytidine |
| 1-methyl-1-deaza-pseudouridine | 2′-O-methyl-Guanosine |
| 2-thio-1-methyl-1-deaza-pseudomidine | 2′-O-methyl-Uridine |
| dihydrouridine | 2′-O-methyl-Pseudouridine |
| dihydropseudouridine | 2′-O-methyl-Inosine |
| 2-thio-dihydromidine | 2-methyladenosine |
| 2-thio-dihydropseudouridine | 2-methylthio-N6-methyladenosine |
| 2-methoxyuridine | 2-methylthio-N6 isopentenyladenosine |
| 2-methoxy-4-thio-uridine | 2-methylthio-N6-(cis- |
| 4-methoxy-pseudouridine | hydroxyisopentenyl)adenosine |
| 4-methoxy-2-thio-pseudouridine | N6-methyl-N6-threonylcarbamoyladenosine |
| 5-aza-cytidine | N6-hydroxynorvalylcarbamoyladenosine |
| pseudoisocytidine | 2-methylthio-N6-hydroxynorvalyl |
| 3-methyl-cytidine | carbamoyladenosine |
| N4-acetylcytidine | 2′-O-ribosyladenosine (phosphate) |
| 5-formylcytidine | 1,2′-O-dimethylinosine |
| N4-methylcytidine | 5,2′-O-dimethylcytidine |
| 5-hydroxymethylcytidine | N4-acetyl-2′-O-methylcytidine |
| 1-methyl-pseudoisocytidine | Lysidine |
| pyrrolo-cytidine | 7-methylguanosine |
| pyrrolo-pseudoisocytidine | N2,2′-O-dimethylguanosine |
| 2-thio-cytidine | N2,N2,2′-O-trimethylguanosine |
| 2-thio-5-methyl-cytidine | 2′-O-ribosylguanosine (phosphate) |
| 4-thio-pseudoisocytidine | Wybutosine |
| 4-thio-1-methyl-pseudoisocytidine | Peroxywybutosine |
| 4-thio-1-methyl-1-deaza-pseudoisocytidine | Hydroxywybutosine |
| 1-methyl-1-deaza-pseudoisocytidine | undermodified hydroxywybutosine |
| zebularine | methylwyosine |
| 5-aza-zebularine | queuosine |
| 5-methyl-zebularine | epoxyqueuosine |
| 5-aza-2-thio-zebularine | galactosyl-queuosine |
| 2-thio-zebularine | mannosyl-queuosine |
| 2-methoxy-cytidine | 7-cyano-7-deazaguanosine |
| 2-methoxy-5-methyl-cytidine | 7-aminomethyl-7-deazaguanosine |
| 4-methoxy-pseudoisocytidine | archaeosine |
| 4-methoxy-1-methyl-pseudoisocytidine | 5,2′-O-dimethyluridine |
| 2-aminopurine | 4-thiouridine |
| 2,6-diaminopurine | 5-methyl-2-thiouridine |
| 7-deaza-adenine | 2-thio-2′-O-methyluridine |
| 7-deaza-8-aza-adenine | 3-(3-amino-3-carboxypropyl)uridine |
| 7-deaza-2-aminopurine | 5-methoxyuridine |
| 7-deaza-8-aza-2-aminopurine | uridine 5-oxyacetic acid |
| 7-deaza-2,6- diaminopurine | uridine 5-oxyacetic acid methyl ester |
| 7-deaza-8-aza-2,6-diarninopurine | 5-(carboxyhydroxymethyl)uridine) |
| 1-methyladenosine | 5-(carboxyhydroxymethyl)uridine methyl ester |
| N6-isopentenyladenosine | 5-methoxycarbonylmethyluridine |
| N6-(cis-hydroxyisopentenyl)adenosine | 5-methoxycarbonylmethyl-2′-O-methyluridine |
| 2-methylthio-N6-(cis-hydroxyisopentenyl) | 5-methoxycarbonylmethyl-2-thiouridine |
| adenosine | 5-aminomethyl-2-thiouridine |
| N6-glycinylcarbamoyladenosine | 5-methylaminomethyluridine |
| N6-threonylcarbamoyladenosine | 5-methylaminomethyl-2-thiouridine |
| 2-methylthio-N6-threonyl carbamoyladenosine | 5-methylaminomethyl-2-selenouridine |
| N6,N6-dimethyladenosine | 5-carbamoylmethyluridine |
| 7-methyladenine | 5-carbamoylmethyl-2′-O-methyluridine |
| 2-methylthio-adenine | 5-carboxymethylaminomethyluridine |
| 2-methoxy-adenine | 5-carboxymethylaminomethyl-2′-O-methyluridine |
| inosine | 5-carboxymethylaminomethyl-2-thiouridine |
| 1-methyl-inosine | N4,2′-O-dimethylcytidine |
| wyosine | 5-carboxymethyluridine |
| wybutosine | N6,2′-O-dimethyladenosine |
| 7-deaza-guanosine | N,N6,O-2′-trimethyladenosine |
| 7-deaza-8-aza-guanosine | N2,7-dimethylguanosine |
| 6-thio-guanosine | N2,N2,7-trimethylguanosine |
| 6-thio-7-deaza-guanosine | 3,2′-O-dimethyluridine |
| 6-thio-7-deaza-8-aza-guanosine | 5-methyldihydrouridine |
| 7-methyl-guanosine | 5-formyl-2′-O-methylcytidine |
| 6-thio-7-methyl-guanosine | 1,2′-O-dimethylguanosine |
| 7-methylinosine | 4-demethylwyosine |
| 6-methoxy-guanosine | Isowyosine |
| 1-methylguanosine | N6-acetyladenosine |
| N2-methylguanosine | |
| N2,N2-dimethylguanosine | |
| 8-oxo-guanosine | |
| 7-methyl-8-oxo-guanosine | |
| 1-methyl-6-thio-guanosine | |

TABLE 14
Backbone modifications

2′-O-Methyl backbone
Peptide Nucleic Acid (PNA) backbone
phosphorothioate backbone
morpholino backbone
carbamate backbone
siloxane backbone
sulfide backbone
sulfoxide backbone
sulfone backbone
formacetyl backbone
thioformacetyl backbone
methyleneformacetyl backbone
riboacetyl backbone
alkene containing backbone
sulfamate backbone
sulfonate backbone
sulfonamide backbone
methyleneimino backbone
methylenehydrazino backbone
amide backbone

TABLE 15
Modified caps

m7GpppA
m7GpppC
m2,7GpppG
m2,2,7GpppG
m7Gpppm7G
m7,2′OmeGpppG
m72′dGpppG
m7,3′OmeGpppG
m7,3′dGpppG
GppppG
m7GppppG
m7GppppA
m7GppppC
m2,7GppppG
m2,2,7GppppG
m7Gppppm7G
m7,2′OmeGppppG
m72′dGppppG
m7,3′OmeGppppG
m7,3′dGppppG

[0512] The nucleotides comprising the template of the gene modifying system can be natural or modified bases, or a combination thereof. For example, the template may contain pseudouridine, dihydrouridine, inosine, 7-methylguanosine, or other modified bases. In some embodiments, the template may contain locked nucleic acid nucleotides. In some embodiments, the modified bases used in the template do not inhibit the reverse transcription of the template. In some embodiments, the modified bases used in the template may improve reverse transcription, e.g., specificity or fidelity.

[0513] In some embodiments, an RNA component of the system (e.g., a template RNA or a gRNA) comprises one or more nucleotide modifications. In some embodiments, the modification pattern of a gRNA can significantly affect in vivo activity compared to unmodified or end-modified guides (e.g., as shown in FIG. 1D from Finn et al. Cell Rep 22(9):2227-2235 (2018); incorporated herein by reference in its entirety). Without wishing to be bound by theory, this process may be due, at least in part, to a stabilization of the RNA conferred by the modifications. Non-limiting examples of such modifications may include 2′-O-methyl (2′-O-Me), 2′-0-(2-methoxyethyl) (2′-0-MOE), 2′-fluoro (2′-F), phosphorothioate (PS) bond between nucleotides, G-C substitutions, and inverted abasic linkages between nucleotides and equivalents thereof.

[0514] In some embodiments, the template RNA (e.g., at the portion thereof that binds a target site) or the guide RNA comprises a 5′ terminus region. In some embodiments, the template RNA or the guide RNA does not comprise a 5′ terminus region. In some embodiments, the 5′ terminus region comprises a gRNA spacer region, e.g., as described with respect to sgRNA in Briner A E et al, Molecular Cell 56: 333-339 (2014) (incorporated herein by reference in its entirety; applicable herein, e.g., to all guide RNAs). In some embodiments, the 5′ terminus region comprises a 5′ end modification. In some embodiments, a 5′ terminus region with or without a spacer region may be associated with a crRNA, trRNA, sgRNA and/or dgRNA. The gRNA spacer region can, in some instances, comprise a guide region, guide domain, or targeting domain.

[0515] In some embodiments, the template RNAs (e.g., at the portion thereof that binds a target site) or guide RNAs described herein comprises any of the sequences shown in Table 4 of WO2018107028A1, incorporated herein by reference in its entirety. In some embodiments, where a sequence shows a guide and/or spacer region, the composition may comprise this region or not. In some embodiments, a guide RNA comprises one or more of the modifications of any of the sequences shown in Table 4 of WO2018107028A1, e.g., as identified therein by a SEQ ID NO. In embodiments, the nucleotides may be the same or different, and/or the modification pattern shown may be the same or similar to a modification pattern of a guide sequence as shown in Table 4 of WO2018107028A1. In some embodiments, a modification pattern includes the relative position and identity of modifications of the gRNA or a region of the gRNA (e.g. 5′ terminus region, lower stem region, bulge region, upper stem region, nexus region, hairpin 1 region, hairpin 2 region, 3′ terminus region). In some embodiments, the modification pattern contains at least 50%, 55%, 60%, 70%, 75%, 80%, 85%, 90%, 95%, 96%, 97%, 98%, 99%, or 100% of the modifications of any one of the sequences shown in the sequence column of Table 4 of WO2018107028A1, and/or over one or more regions of the sequence. In some embodiments, the modification pattern is at least 50%, 55%, 60%, 70%, 75%, 80%, 85%, 90%, 95%, 96%, 97%, 98%, 99%, or 100% identical to the modification pattern of any one of the sequences shown in the sequence column of Table 4 of WO2018107028A1. In some embodiments, the modification pattern is at least 50%, 55%, 60%, 70%, 75%, 80%, 85%, 90%, 95%, 96%, 97%, 98%, 99%, or 100% identical over one or more regions of the sequence shown in Table 4 of WO2018107028A1, e.g., in a 5′ terminus region, lower stem region, bulge region, upper stem region, nexus region, hairpin 1 region, hairpin 2 region, and/or 3′ terminus region. In some embodiments, the modification pattern is least 50%, 55%, 60%, 70%, 75%, 80%, 85%, 90%, 95%, 96%, 97%, 98%, 99%, or 100% identical to the modification pattern of a sequence over the 5′ terminus region. In some embodiments, the modification pattern is least 50%, 55%, 60%, 70%, 75%, 80%, 85%, 90%, 95%, 96%, 97%, 98%, 99%, or 100% identical over the lower stem. In some embodiments, the modification pattern is least 50%, 55%, 60%, 70%, 75%, 80%, 85%, 90%, 95%, 96%, 97%, 98%, 99%, or 100% identical over the bulge. In some embodiments, the modification pattern is least 50%, 55%, 60%, 70%, 75%, 80%, 85%, 90%, 95%, 96%, 97%, 98%, 99%, or 100% identical over the upper stem. In some embodiments, the modification pattern is least 50%, 55%, 60%, 70%, 75%, 80%, 85%, 90%, 95%, 96%, 97%, 98%, 99%, or 100% identical over the nexus. In some embodiments, the modification pattern is least 50%, 55%, 60%, 70%, 75%, 80%, 85%, 90%, 95%, 96%, 97%, 98%, 99%, or 100% identical over the hairpin 1. In some embodiments, the modification pattern is least 50%, 55%, 60%, 70%, 75%, 80%, 85%, 90%, 95%, 96%, 97%, 98%, 99%, or 100% identical over the hairpin 2. In some embodiments, the modification pattern is least 50%, 55%, 60%, 70%, 75%, 80%, 85%, 90%, 95%, 96%, 97%, 98%, 99%, or 100% identical over the 3′ terminus. In some embodiments, the modification pattern differs from the modification pattern of a sequence of Table 4 of WO2018107028A1, or a region (e.g. 5′ terminus, lower stem, bulge, upper stem, nexus, hairpin 1, hairpin 2, 3′ terminus) of such a sequence, e.g., at 0, 1, 2, 3, 4, 5, 6, or more nucleotides. In some embodiments, the gRNA comprises modifications that differ from the modifications of a sequence of Table 4 of WO2018107028A1, e.g., at 0, 1, 2, 3, 4, 5, 6, or more nucleotides. In some embodiments, the gRNA comprises modifications that differ from modifications of a region (e.g. 5′ terminus, lower stem, bulge, upper stem, nexus, hairpin 1, hairpin 2, 3′ terminus) of a sequence of Table 4 of WO2018107028A1, e.g., at 0, 1, 2, 3, 4, 5, 6, or more nucleotides.

[0516] In some embodiments, the template RNAs (e.g., at the portion thereof that binds a target site) or the gRNA comprises a 2′-O-methyl (2′-O-Me) modified nucleotide. In some embodiments, the gRNA comprises a 2′-O-(2-methoxy ethyl) (2′-O-moe) modified nucleotide. In some embodiments, the gRNA comprises a 2′-fluoro (2′-F) modified nucleotide. In some embodiments, the gRNA comprises a phosphorothioate (PS) bond between nucleotides. In some embodiments, the gRNA comprises a 5′ end modification, a 3′ end modification, or 5′ and 3′ end modifications. In some embodiments, the 5′ end modification comprises a phosphorothioate (PS) bond between nucleotides. In some embodiments, the 5′ end modification comprises a 2′-O-methyl (2′-O-Me), 2′-O-(2-methoxy ethyl) (2′-O-MOE), and/or 2′-fluoro (2′-F) modified nucleotide. In some embodiments, the 5′ end modification comprises at least one phosphorothioate (PS) bond and one or more of a 2′-O-methyl (2′-O-Me), 2′-O-(2-methoxyethyl) (2′-O-MOE), and/or 2′-fluoro (2′-F) modified nucleotide. The end modification may comprise a phosphorothioate (PS), 2′-O-methyl (2′-O-Me), 2′-O-(2-methoxyethyl) (2′-O-MOE), and/or 2′-fluoro (2′-F) modification. Equivalent end modifications are also encompassed by embodiments described herein. In some embodiments, the template RNA or gRNA comprises an end modification in combination with a modification of one or more regions of the template RNA or gRNA. Additional exemplary modifications and methods for protecting RNA, e.g., gRNA, and formulae thereof, are described in WO2018126176A1, which is incorporated herein by reference in its entirety.

[0517] In some embodiments, structure-guided and systematic approaches are used to introduce modifications (e.g., 2′-OMe-RNA, 2′-F-RNA, and PS modifications) to a template RNA or guide RNA, for example, as described in Mir et al. Nat Commun 9:2641 (2018) (incorporated by reference herein in its entirety). In some embodiments, the incorporation of 2′-F-RNAs increases thermal and nuclease stability of RNA:RNA or RNA:DNA duplexes, e.g., while minimally interfering with C3′-endo sugar puckering. In some embodiments, 2′-F may be better tolerated than 2′-OMe at positions where the 2′-OH is important for RNA:DNA duplex stability. In some embodiments, a crRNA comprises one or more modifications that do not reduce Cas9 activity, e.g., C10, C20, or C21 (fully modified), e.g., as described in Supplementary Table 1 of Mir et al. Nat Commun 9:2641 (2018), incorporated herein by reference in its entirety. In some embodiments, a tracrRNA comprises one or more modifications that do not reduce Cas9 activity, e.g., T2, T6, T7, or T8 (fully modified) of Supplementary Table 1 of Mir et al. Nat Commun 9:2641 (2018). In some embodiments, a crRNA comprises one or more modifications (e.g., as described herein) may be paired with a tracrRNA comprising one or more modifications, e.g., C20 and T2. In some embodiments, a gRNA comprises a chimera, e.g., of a crRNA and a tracrRNA (e.g., Jinek et al. Science 337(6096):816-821 (2012)). In embodiments, modifications from the crRNA and tracrRNA are mapped onto the single-guide chimera, e.g., to produce a modified gRNA with enhanced stability.

[0518] In some embodiments, gRNA molecules may be modified by the addition or subtraction of the naturally occurring structural components, e.g., hairpins. In some embodiments, a gRNA may comprise a gRNA with one or more 3′ hairpin elements deleted, e.g., as described in WO2018106727, incorporated herein by reference in its entirety. In some embodiments, a gRNA may contain an added hairpin structure, e.g., an added hairpin structure in the spacer region, which was shown to increase specificity of a CRISPR-Cas system in the teachings of Kocak et al. Nat Biotechnol 37(6):657-666 (2019). Additional modifications, including examples of shortened gRNA and specific modifications improving in vivo activity, can be found in US20190316121, incorporated herein by reference in its entirety.

[0519] In some embodiments, structure-guided and systematic approaches (e.g., as described in Mir et al. Nat Commun 9:2641 (2018); incorporated herein by reference in its entirety) are employed to find modifications for the template RNA. In embodiments, the modifications are identified with the inclusion or exclusion of a guide region of the template RNA. In some embodiments, a structure of polypeptide bound to template RNA is used to determine non-protein-contacted nucleotides of the RNA that may then be selected for modifications, e.g., with lower risk of disrupting the association of the RNA with the polypeptide. Secondary structures in a template RNA can also be predicted in silico by software tools, e.g., the RNAstructure tool available at rna.urmc.rochester.edu/RNAstructureWeb (Bellaousov et al. Nucleic Acids Res 41:W471-W474 (2013); incorporated by reference herein in its entirety), e.g., to determine secondary structures for selecting modifications, e.g., hairpins, stems, and/or bulges.

### Production of Compositions and Systems

[0520] As will be appreciated by one of skill, methods of designing and constructing nucleic acid constructs and proteins or polypeptides (such as the systems, constructs and polypeptides described herein) are routine in the art. Generally, recombinant methods may be used. See, in general, Smales & James (Eds.), Therapeutic Proteins: Methods and Protocols (Methods in Molecular Biology), Humana Press (2005); and Crommelin, Sindelar & Meibohm (Eds.), Pharmaceutical Biotechnology: Fundamentals and Applications, Springer (2013). Methods of designing, preparing, evaluating, purifying and manipulating nucleic acid compositions are described in Green and Sambrook (Eds.), Molecular Cloning: A Laboratory Manual (Fourth Edition), Cold Spring Harbor Laboratory Press (2012).

[0521] The disclosure provides, in part, a nucleic acid, e.g., vector, encoding a gene modifying polypeptide described herein, a template nucleic acid described herein, or both. In some embodiments, a vector comprises a selective marker, e.g., an antibiotic resistance marker. In some embodiments, the antibiotic resistance marker is a kanamycin resistance marker. In some embodiments, the antibiotic resistance marker does not confer resistance to beta-lactam antibiotics. In some embodiments, the vector does not comprise an ampicillin resistance marker. In some embodiments, the vector comprises a kanamycin resistance marker and does not comprise an ampicillin resistance marker. In some embodiments, a vector encoding a gene modifying polypeptide is integrated into a target cell genome (e.g., upon administration to a target cell, tissue, organ, or subject). In some embodiments, a vector encoding a gene modifying polypeptide is not integrated into a target cell genome (e.g., upon administration to a target cell, tissue, organ, or subject). In some embodiments, a vector encoding a template nucleic acid (e.g., template RNA) is not integrated into a target cell genome (e.g., upon administration to a target cell, tissue, organ, or subject). In some embodiments, if a vector is integrated into a target site in a target cell genome, the selective marker is not integrated into the genome. In some embodiments, if a vector is integrated into a target site in a target cell genome, genes or sequences involved in vector maintenance (e.g., plasmid maintenance genes) are not integrated into the genome. In some embodiments, if a vector is integrated into a target site in a target cell genome, transfer regulating sequences (e.g., inverted terminal repeats, e.g., from an AAV) are not integrated into the genome. In some embodiments, administration of a vector (e.g., encoding a gene modifying polypeptide described herein, a template nucleic acid described herein, or both) to a target cell, tissue, organ, or subject results in integration of a portion of the vector into one or more target sites in the genome(s) of said target cell, tissue, organ, or subject. In some embodiments, less than 99, 95, 90, 80, 70, 60, 50, 40, 30, 20, 10, 5, 4, 3, 2, or 1% of target sites (e.g., no target sites) comprising integrated material comprise a selective marker (e.g., an antibiotic resistance gene), a transfer regulating sequence (e.g., an inverted terminal repeat, e.g., from an AAV), or both from the vector.

[0522] Exemplary methods for producing a therapeutic pharmaceutical protein or polypeptide described herein involve expression in mammalian cells, although recombinant proteins can also be produced using insect cells, yeast, bacteria, or other cells under control of appropriate promoters. Mammalian expression vectors may comprise non-transcribed elements such as an origin of replication, a suitable promoter, and other 5′ or 3′ flanking non-transcribed sequences, and 5′ or 3′ non-translated sequences such as necessary ribosome binding sites, a polyadenylation site, splice donor and acceptor sites, and termination sequences. DNA sequences derived from the SV40 viral genome, for example, SV40 origin, early promoter, splice, and polyadenylation sites may be used to provide other genetic elements required for expression of a heterologous DNA sequence. Appropriate cloning and expression vectors for use with bacterial, fungal, yeast, and mammalian cellular hosts are described in Green & Sambrook, Molecular Cloning: A Laboratory Manual (Fourth Edition), Cold Spring Harbor Laboratory Press (2012).

[0523] Various mammalian cell culture systems can be employed to express and manufacture recombinant protein. Examples of mammalian expression systems include CHO, COS, HEK293, HeLA, and BHK cell lines. Processes of host cell culture for production of protein therapeutics are described in Zhou and Kantardjieff (Eds.), Mammalian Cell Cultures for Biologics Manufacturing (Advances in Biochemical Engineering/Biotechnology), Springer (2014). Compositions described herein may include a vector, such as a viral vector, e.g., a lentiviral vector, encoding a recombinant protein. In some embodiments, a vector, e.g., a viral vector, may comprise a nucleic acid encoding a recombinant protein.

[0524] Purification of protein therapeutics is described in Franks, Protein Biotechnology: Isolation, Characterization, and Stabilization, Humana Press (2013); and in Cutler, Protein Purification Protocols (Methods in Molecular Biology), Humana Press (2010).

[0525] The disclosure also provides compositions and methods for the production of template nucleic acid molecules (e.g., template RNAs) with specificity for a gene modifying polypeptide and/or a genomic target site. In an aspect, the method comprises production of RNA segments including an upstream homology segment, a heterologous object sequence segment, a gene modifying polypeptide binding motif, and a gRNA segment.

### Therapeutic Applications

[0526] In some embodiments, a gene modifying system as described herein can be used to modify a cell (e.g., an animal cell, plant cell, or fungal cell). In some embodiments, a gene modifying system as described herein can be used to modify a mammalian cell (e.g., a human cell). In some embodiments, a gene modifying system as described herein can be used to modify a cell from a livestock animal (e.g., a cow, horse, sheep, goat, pig, llama, alpaca, camel, yak, chicken, duck, goose, or ostrich). In some embodiments, a gene modifying system as described herein can be used as a laboratory tool or a research tool, or used in a laboratory method or research method, e.g., to modify an animal cell, e.g., a mammalian cell (e.g., a human cell), a plant cell, or a fungal cell.

[0527] By integrating coding genes into a RNA sequence template, the gene modifying system can address therapeutic needs, for example, by providing expression of a therapeutic transgene in individuals with loss-of-function mutations, by replacing gain-of-function mutations with normal transgenes, by providing regulatory sequences to eliminate gain-of-function mutation expression, and/or by controlling the expression of operably linked genes, transgenes and systems thereof. In certain embodiments, the RNA sequence template encodes a promotor region specific to the therapeutic needs of the host cell, for example a tissue specific promotor or enhancer. In still other embodiments, a promotor can be operably linked to a coding sequence.

[0528] In some embodiments, an insertion, deletion, substitution, or combination thereof, increases or decreases expression (e.g. transcription or translation) of a target gene. In some embodiments, an insertion, deletion, substitution, or combination thereof, increases or decreases expression (e.g. transcription or translation) of a target gene by altering, adding, or deleting sequences in a promoter or enhancer, e.g. sequences that bind transcription factors. In some embodiments, an insertion, deletion, substitution, or combination thereof alters translation of a target gene (e.g. alters an amino acid sequence), inserts or deletes a start or stop codon, alters or fixes the translation frame of a gene. In some embodiments, an insertion, deletion, substitution, or combination thereof alters splicing of a target gene, e.g. by inserting, deleting, or altering a splice acceptor or donor site. In some embodiments, an insertion, deletion, substitution, or combination thereof alters transcript or protein half-life. In some embodiments, an insertion, deletion, substitution, or combination thereof, alters, increases, decreases the activity of a target gene, e.g. a protein encoded by the target gene.

### Compensatory Edits

[0529] In some embodiments, the systems or methods provided herein can be used to introduce a compensatory edit. In some embodiments, the compensatory edit is at a position of a gene associated with a disease or disorder, which is different from the position of a disease-causing mutation. In some embodiments, the compensatory mutation is not in the gene containing the causative mutation. In some embodiments, the compensatory edit can negate or compensate for a disease-causing mutation. In some embodiments, the compensatory edit can be introduced by the systems or methods provided herein to suppress or reverse the mutant effect of a disease-causing mutation.

### Regulatory Edits

[0530] In some embodiments, the systems or methods provided herein can be used to introduce a regulatory edit. In some embodiments, the regulatory edit is introduced to a regulatory sequence of a gene, for example, a gene promoter, gene enhancer, gene repressor, or a sequence that regulates gene splicing. In some embodiments, the regulatory edit increases or decreases the expression level of a target gene. In some embodiments, the target gene is the same as the gene containing a disease-causing mutation. In some embodiments, the target gene is different from the gene containing a disease-causing mutation.

### Repeat Expansion Diseases

[0531] In some embodiments, the systems or methods provided herein can be used to treat a repeat expansion disease. In some embodiments, the systems or methods provided herein, for example, those comprising gene modifying polypeptides, can be used to treat repeat expansion diseases by resetting the number of repeats at the locus according to a customized RNA template.

### Administration and Delivery

[0532] The compositions and systems described herein may be used in vitro or in vivo. In some embodiments the system or components of the system are delivered to cells (e.g., mammalian cells, e.g., human cells), e.g., in vitro or in vivo. In some embodiments, the cells are eukaryotic cells, e.g., cells of a multicellular organism, e.g., an animal, e.g., a mammal (e.g., human, swine, bovine), a bird (e.g., poultry, such as chicken, turkey, or duck), or a fish. In some embodiments, the cells are non-human animal cells (e.g., a laboratory animal, a livestock animal, or a companion animal). In some embodiments, the cell is a stem cell (e.g., a hematopoietic stem cell), a fibroblast, or a T cell. In some embodiments, the cell is an immune cell, e.g., a T cell (e.g., a Treg, CD4, CD8, γδ, or memory T cell), B cell (e.g., memory B cell or plasma cell), or NK cell. In some embodiments, the cell is a non-dividing cell, e.g., a non-dividing fibroblast or non-dividing T cell. In some embodiments, the cell is an HSC and p53 is not upregulated or is upregulated by less than 10%, 5%, 2%, or 1%, e.g., as determined according to the method described in Example 30 of PCT/US2019/048607. The skilled artisan will understand that the components of the gene modifying system may be delivered in the form of polypeptide, nucleic acid (e.g., DNA, RNA), and combinations thereof.

[0533] In one embodiment the system and/or components of the system are delivered as nucleic acid. For example, the gene modifying polypeptide may be delivered in the form of a DNA or RNA encoding the polypeptide, and the template RNA may be delivered in the form of RNA or its complementary DNA to be transcribed into RNA. In some embodiments the system or components of the system are delivered on 1, 2, 3, 4, or more distinct nucleic acid molecules. In some embodiments the system or components of the system are delivered as a combination of DNA and RNA. In some embodiments the system or components of the system are delivered as a combination of DNA and protein. In some embodiments the system or components of the system are delivered as a combination of RNA and protein. In some embodiments the gene modifying polypeptide is delivered as a protein.

[0534] In some embodiments the system or components of the system are delivered to cells, e.g. mammalian cells or human cells, using a vector. The vector may be, e.g., a plasmid or a virus. In some embodiments, delivery is in vivo, in vitro, ex vivo, or in situ. In some embodiments the virus is an adeno associated virus (AAV), a lentivirus, or an adenovirus. In some embodiments the system or components of the system are delivered to cells with a viral-like particle or a virosome. In some embodiments the delivery uses more than one virus, viral-like particle or virosome.

[0535] In one embodiment, the compositions and systems described herein can be formulated in liposomes or other similar vesicles. Liposomes are spherical vesicle structures composed of a uni- or multilamellar lipid bilayer surrounding internal aqueous compartments and a relatively impermeable outer lipophilic phospholipid bilayer. Liposomes may be anionic, neutral or cationic. Liposomes are biocompatible, nontoxic, can deliver both hydrophilic and lipophilic drug molecules, protect their cargo from degradation by plasma enzymes, and transport their load across biological membranes and the blood brain barrier (BBB) (see, e.g., Spuch and Navarro, Journal of Drug Delivery, vol. 2011, Article ID 469679, 12 pages, 2011. doi:10.1155/2011/469679 for review).

[0536] Vesicles can be made from several different types of lipids; however, phospholipids are most commonly used to generate liposomes as drug carriers. Methods for preparation of multilamellar vesicle lipids are known in the art (see for example U.S. Pat. No. 6,693,086, the teachings of which relating to multilamellar vesicle lipid preparation are incorporated herein by reference). Although vesicle formation can be spontaneous when a lipid film is mixed with an aqueous solution, it can also be expedited by applying force in the form of shaking by using a homogenizer, sonicator, or an extrusion apparatus (see, e.g., Spuch and Navarro, Journal of Drug Delivery, vol. 2011, Article ID 469679, 12 pages, 2011. doi:10.1155/2011/469679 for review). Extruded lipids can be prepared by extruding through filters of decreasing size, as described in Templeton et al., Nature Biotech, 15:647-652, 1997, the teachings of which relating to extruded lipid preparation are incorporated herein by reference.

[0537] A variety of nanoparticles can be used for delivery, such as a liposome, a lipid nanoparticle, a cationic lipid nanoparticle, an ionizable lipid nanoparticle, a polymeric nanoparticle, a gold nanoparticle, a dendrimer, a cyclodextrin nanoparticle, a micelle, or a combination of the foregoing.

[0538] Lipid nanoparticles are an example of a carrier that provides a biocompatible and biodegradable delivery system for the pharmaceutical compositions described herein. Nanostructured lipid carriers (NLCs) are modified solid lipid nanoparticles (SLNs) that retain the characteristics of the SLN, improve drug stability and loading capacity, and prevent drug leakage. Polymer nanoparticles (PNPs) are an important component of drug delivery. These nanoparticles can effectively direct drug delivery to specific targets and improve drug stability and controlled drug release. Lipid-polymer nanoparticles (PLNs), a type of carrier that combines liposomes and polymers, may also be employed. These nanoparticles possess the complementary advantages of PNPs and liposomes. A PLN is composed of a core-shell structure; the polymer core provides a stable structure, and the phospholipid shell offers good biocompatibility. As such, the two components increase the drug encapsulation efficiency rate, facilitate surface modification, and prevent leakage of water-soluble drugs. For a review, see, e.g., Li et al. 2017, Nanomaterials 7, 122; doi:10.3390/nano7060122.

[0539] Exosomes can also be used as drug delivery vehicles for the compositions and systems described herein. For a review, see Ha et al. July 2016. Acta Pharmaceutica Sinica B. Volume 6, Issue 4, Pages 287-296; https://doi.org/10.1016/j.apsb.2016.02.001.

[0540] Fusosomes interact and fuse with target cells, and thus can be used as delivery vehicles for a variety of molecules. They generally consist of a bilayer of amphipathic lipids enclosing a lumen or cavity and a fusogen that interacts with the amphipathic lipid bilayer. The fusogen component has been shown to be engineerable in order to confer target cell specificity for the fusion and payload delivery, allowing the creation of delivery vehicles with programmable cell specificity (see for example Patent Application WO2020014209, the teachings of which relating to fusosome design, preparation, and usage are incorporated herein by reference).

[0541] In some embodiments, the protein component(s) of the gene modifying system may be pre-associated with the template nucleic acid (e.g., template RNA). For example, in some embodiments, the gene modifying polypeptide may be first combined with the template nucleic acid (e.g., template RNA) to form a ribonucleoprotein (RNP) complex. In some embodiments, the RNP may be delivered to cells via, e.g., transfection, nucleofection, virus, vesicle, LNP, exosome, fusosome.

[0542] A gene modifying system can be introduced into cells, tissues and multicellular organisms. In some embodiments the system or components of the system are delivered to the cells via mechanical means or physical means.

[0543] Formulation of protein therapeutics is described in Meyer (Ed.), Therapeutic Protein Drug Products: Practical Approaches to formulation in the Laboratory, Manufacturing, and the Clinic, Woodhead Publishing Series (2012).

### Tissue Specific Activity/Administration

[0544] In some embodiments, a system described herein can make use of one or more feature (e.g., a promoter or microRNA binding site) to limit activity in off-target cells or tissues.

[0545] In some embodiments, a nucleic acid described herein (e.g., a template RNA or a DNA encoding a template RNA) comprises a promoter sequence, e.g., a tissue specific promoter sequence. In some embodiments, the tissue-specific promoter is used to increase the target-cell specificity of a gene modifying system. For instance, the promoter can be chosen on the basis that it is active in a target cell type but not active in (or active at a lower level in) a non-target cell type. Thus, even if the promoter integrated into the genome of a non-target cell, it would not drive expression (or only drive low level expression) of an integrated gene. A system having a tissue-specific promoter sequence in the template RNA may also be used in combination with a microRNA binding site, e.g., in the template RNA or a nucleic acid encoding a gene modifying protein, e.g., as described herein. A system having a tissue-specific promoter sequence in the template RNA may also be used in combination with a DNA encoding a gene modifying polypeptide, driven by a tissue-specific promoter, e.g., to achieve higher levels of gene modifying protein in target cells than in non-target cells. In some embodiments, e.g., for liver indications, a tissue-specific promoter is selected from Table 3 of WO2020014209, incorporated herein by reference.

[0546] In some embodiments, a nucleic acid described herein (e.g., a template RNA or a DNA encoding a template RNA) comprises a microRNA binding site. In some embodiments, the microRNA binding site is used to increase the target-cell specificity of a gene modifying system. For instance, the microRNA binding site can be chosen on the basis that is recognized by a miRNA that is present in a non-target cell type, but that is not present (or is present at a reduced level relative to the non-target cell) in a target cell type. Thus, when the template RNA is present in a non-target cell, it would be bound by the miRNA, and when the template RNA is present in a target cell, it would not be bound by the miRNA (or bound but at reduced levels relative to the non-target cell). While not wishing to be bound by theory, binding of the miRNA to the template RNA may interfere with its activity, e.g., may interfere with insertion of the heterologous object sequence into the genome. Accordingly, the system would edit the genome of target cells more efficiently than it edits the genome of non-target cells, e.g., the heterologous object sequence would be inserted into the genome of target cells more efficiently than into the genome of non-target cells, or an insertion or deletion is produced more efficiently in target cells than in non-target cells. A system having a microRNA binding site in the template RNA (or DNA encoding it) may also be used in combination with a nucleic acid encoding a gene modifying polypeptide, wherein expression of the gene modifying polypeptide is regulated by a second microRNA binding site, e.g., as described herein. In some embodiments, e.g., for liver indications, a miRNA is selected from Table 4 of WO2020014209, incorporated herein by reference.

[0547] In some embodiments, the template RNA comprises a microRNA sequence, an siRNA sequence, a guide RNA sequence, or a piwi RNA sequence.

### Promoters

[0548] In some embodiments, one or more promoter or enhancer elements are operably linked to a nucleic acid encoding a gene modifying protein or a template nucleic acid, e.g., that controls expression of the heterologous object sequence. In certain embodiments, the one or more promoter or enhancer elements comprise cell-type or tissue specific elements. In some embodiments, the promoter or enhancer is the same or derived from the promoter or enhancer that naturally controls expression of the heterologous object sequence. For example, the ornithine transcarbomylase promoter and enhancer may be used to control expression of the ornithine transcarbomylase gene in a system or method provided by the invention for correcting ornithine transcarbomylase deficiencies. In some embodiments, the promoter is a promoter of Table 16 or 17 or a functional fragment or variant thereof.

[0549] Exemplary tissue specific promoters that are commercially available can be found, for example, at a uniform resource locator (e.g., www.invivogen.com/tissue-specific-promoters). In some embodiments, a promoter is a native promoter or a minimal promoter, e.g., which consists of a single fragment from the 5′ region of a given gene. In some embodiments, a native promoter comprises a core promoter and its natural 5′ UTR. In some embodiments, the 5′ UTR comprises an intron. In other embodiments, these include composite promoters, which combine promoter elements of different origins or were generated by assembling a distal enhancer with a minimal promoter of the same origin.

[0550] Exemplary cell or tissue specific promoters are provided in the tables, below, and exemplary nucleic acid sequences encoding them are known in the art and can be readily accessed using a variety of resources, such as the NCBI database, including RefSeq, as well as the Eukaryotic Promoter Database (//epd.epfl.ch//index.php).

TABLE 16
Exemplary cell or tissue-specific promoters

| Promoter | Target cells |
|---|---|
| B29 Promoter | B cells |
| CD14 Promoter | Monocytic Cells |
| CD43 Promoter | Leukocytes and platelets |
| CD45 Promoter | Hematopoeitic cells |
| CD68 promoter | macrophages |
| Desmin promoter | muscle cells |
| Elastase-1 promoter | pancreatic acinar cells |
| Endoglin promoter | endothelial cells |
| fibronectin promoter | differentiating cells, healing tissue |
| Flt-1 promoter | endothelial cells |
| GFAP promoter | Astrocytes |
| GPIIB promoter | megakaryocytes |
| ICAM-2 Promoter | Endothelial cells |
| INF-Beta promoter | Hematopoeitic cells |
| Mb promoter | muscle cells |
| Nphs1 promoter | podocytes |
| OG-2 promoter | Osteoblasts, Odonblasts |
| SP-B promoter | Lung |
| Syn1 promoter | Neurons |
| WASP promoter | Hematopoeitic cells |
| SV40/bAlb promoter | Liver |
| SV40/bAlb promoter | Liver |
| SV40/Cd3 promoter | Leukocytes and platelets |
| SV40/CD45 | hematopoeitic cells |
| promoter | |
| NSE/RU5′ promoter | Mature Neurons |

TABLE 17
Additional exemplary cell or tissue-specific promoters

| Promoter | Gene Description | Gene Specificity |
|---|---|---|
| APOA2 | Apolipoprotein A-II | Hepatocytes (from hepatocyte progenitors) |
| SERPINA1 | Serpin peptidase inhibitor, clade A | Hepatocytes |
| (hAAT) | (alpha-1 | (from definitive endoderm |
| | antiproteinase, antitrypsin), member 1 | stage) |
| | (also named alpha 1 anti-tryps in) | |
| CYP3A | Cytochrome P450, family 3, subfamily | Mature Hepatocytes |
| | A, polypeptide | |
| MIR122 | MicroRNA 122 | Hepatocytes |
| | | (from early stage embryonic |
| | | liver cells) |
| | | and endoderm |

Pancreatic specific promoters

| | | |
|---|---|---|
| INS | Insulin | Pancreatic beta cells |
| | | (from definitive endoderm stage) |
| IRS2 | Insulin receptor substrate 2 | Pancreatic beta cells |
| Pdx1 | Pancreatic and duodenal | Pancreas |
| | homeobox 1 | (from definitive endoderm stage) |
| Alx3 | Aristaless-like homeobox 3 | Pancreatic beta cells |
| | | (from definitive endoderm stage) |
| Ppy | Pancreatic polypeptide | PP pancreatic cells |
| | | (gamma cells) |

Cardiac specific promoters

| | | |
|---|---|---|
| Myh6 | Myosin, heavy chain 6, cardiac muscle, | Late differentiation marker of cardiac |
| (aMHC) | alpha | muscle cells (atrial specificity) |
| MYL2 | Myosin, light chain 2, regulatory, | Late differentiation marker of cardiac |
| (MLC-2v) | cardiac, slow | muscle cells (ventricular specificity) |
| ITNNl3 | Troponin I type 3 (cardiac) | Cardiomyocytes |
| (cTnl) | | (from immature state) |
| ITNNl3 | Troponin I type 3 (cardiac) | Cardiomyocytes |
| (cTnl) | | (from immature state) |
| NPPA | Natriuretic peptide precursor A (also | Atrial specificity in adult cells |
| (ANF) | named Atrial Natriuretic Factor) | |
| Slc8a1 | Solute carrier family 8 (sodium/calcium | Cardiomyocytes from early developmental |
| (Ncx1) | exchanger), member 1 | stages |

CNS specific promoters

| | | |
|---|---|---|
| SYN1 | Synapsin I | Neurons |
| (hSyn) | | |
| GFAP | Glial fibrillary acidic protein | Astrocytes |
| INA | Internexin neuronal intermediate filament | Neuroprogenitors |
| | protein, alpha (a-internexin) | |
| NES | Nestin | Neuroprogenitors and ectoderm |
| MOBP | Myelin-associated oligodendrocyte basic | Oligodendrocytes |
| | protein | |
| MBP | Myelin basic protein | Oligodendrocytes |
| TH | Tyrosine hydroxylase | Dopaminergic neurons |
| FOXA2 | Forkhead box A2 | Dopaminergic neurons (also used as a |
| (HNF3 beta) | | marker of endoderm) |

Skin specific promoters

| | | |
|---|---|---|
| FLG | Filaggrin | Keratinocytes from granular layer |
| K14 | Keratin 14 | Keratinocytes from granular |
| | | and basal layers |
| TGM3 | Transglutaminase 3 | Keratinocytes from granular layer |

Immune cell specific promoters

| | | |
|---|---|---|
| ITGAM | Integrin, alpha M (complement | Monocytes, macrophages, granulocytes, |
| (CD11B) | component 3 receptor 3 subunit) | natural killer cells |

Urogential cell specific promoters

| | | |
|---|---|---|
| Pbsn | Probasin | Prostatic epithelium |
| Upk2 | Uroplakin 2 | Bladder |
| Sbp | Spermine binding protein | Prostate |
| Fer1l4 | Fer-1-like 4 | Bladder |

Endothelial cell specific promoters

| | | |
|---|---|---|
| ENG | Endoglin | Endothelial cells |

Pluripotent and embryonic cell specific promoters

| | | |
|---|---|---|
| Oct4 | POU class 5 homeobox 1 | Pluripotent cells |
| (POU5F1) | | (germ cells, ES cells, iPS cells) |
| NANOG | Nanog homeobox | Pluripotent cells |
| | | (ES cells, iPS cells) |
| Synthetic | Synthetic promoter based on a Oct-4 core | Pluripotent cells (ES cells, iPS cells) |
| Oct4 | enhancer element | |
| T brachyury | Brachyury | Mesoderm |
| NES | Nestin | Neuroprogenitors and Ectoderm |
| SOX17 | SRY (sex determining region Y)-box 17 | Endoderm |
| FOXA2 | Forkhead box A2 | Endoderm (also used as a marker of |
| (HNFJ | | dopaminergic neurons) |
| beta) | | |
| MIR122 | MicroRNA 122 | |
| | | Endoderm and hepatocytes |
| | | (from early stage embryonic liver cells~ |

[0551] Depending on the host/vector system utilized, any of a number of suitable transcription and translation control elements, including constitutive and inducible promoters, transcription enhancer elements, transcription terminators, etc. may be used in the expression vector (see e.g., Bitter et al. (1987) Methods in Enzymology, 153:516-544; incorporated herein by reference in its entirety).

[0552] In some embodiments, a nucleic acid encoding a gene modifying protein or template nucleic acid is operably linked to a control element, e.g., a transcriptional control element, such as a promoter. The transcriptional control element may, in some embodiment, be functional in either a eukaryotic cell, e.g., a mammalian cell; or a prokaryotic cell (e.g., bacterial or archaeal cell). In some embodiments, a nucleotide sequence encoding a polypeptide is operably linked to multiple control elements, e.g., that allow expression of the nucleotide sequence encoding the polypeptide in both prokaryotic and eukaryotic cells.

[0553] For illustration purposes, examples of spatially restricted promoters include, but are not limited to, neuron-specific promoters, adipocyte-specific promoters, cardiomyocyte-specific promoters, smooth muscle-specific promoters, photoreceptor-specific promoters, etc. Neuron-specific spatially restricted promoters include, but are not limited to, a neuron-specific enolase (NSE) promoter (see, e.g., EMBL HSENO2, X51956); an aromatic amino acid decarboxylase (AADC) promoter, a neurofilament promoter (see, e.g., GenBank HUMNFL, L04147); a synapsin promoter (see, e.g., GenBank HUMSYNIB, M55301); a thy-1 promoter (see, e.g., Chen et al. (1987) Cell 51:7-19; and Llewellyn, et al. (2010) Nat. Med. 16(10):1161-1166); a serotonin receptor promoter (see, e.g., GenBank S62283); a tyrosine hydroxylase promoter (TH) (see, e.g., Oh et al. (2009) Gene Ther 16:437; Sasaoka et al. (1992) Mol. Brain Res. 16:274; Boundy et al. (1998) J. Neurosci. 18:9989; and Kaneda et al. (1991) Neuron 6:583-594); a GnRH promoter (see, e.g., Radovick et al. (1991) Proc. Natl. Acad. Sci. USA 88:3402-3406); an L7 promoter (see, e.g., Oberdick et al. (1990) Science 248:223-226); a DNMT promoter (see, e.g., Bartge et al. (1988) Proc. Natl. Acad. Sci. USA 85:3648-3652); an enkephalin promoter (see, e.g., Comb et al. (1988) EMBO J. 17:3793-3805); a myelin basic protein (MBP) promoter; a Ca2+-calmodulin-dependent protein kinase II-alpha (CamKIIα) promoter (see, e.g., Mayford et al. (1996) Proc. Natl. Acad. Sci. USA 93:13250; and Casanova et al. (2001) Genesis 31:37); a CMV enhancer/platelet-derived growth factor-O promoter (see, e.g., Liu et al. (2004) Gene Therapy 11:52-60); and the like.

[0554] Adipocyte-specific spatially restricted promoters include, but are not limited to, the aP2 gene promoter/enhancer, e.g., a region from −5.4 kb to +21 bp of a human aP2 gene (see, e.g., Tozzo et al. (1997) Endocrinol. 138:1604; Ross et al. (1990) Proc. Natl. Acad. Sci. USA 87:9590; and Pavjani et al. (2005) Nat. Med. 11:797); a glucose transporter-4 (GLUT4) promoter (see, e.g., Knight et al. (2003) Proc. Natl. Acad. Sci. USA 100:14725); a fatty acid translocase (FAT/CD36) promoter (see, e.g., Kuriki et al. (2002) Biol. Pharm. Bull. 25:1476; and Sato et al. (2002) J. Biol. Chem. 277:15703); a stearoyl-CoA desaturase-1 (SCD1) promoter (Tabor et al. (1999) J. Biol. Chem. 274:20603); a leptin promoter (see, e.g., Mason et al. (1998) Endocrinol. 139:1013; and Chen et al. (1999) Biochem. Biophys. Res. Comm. 262:187); an adiponectin promoter (see, e.g., Kita et al. (2005) Biochem. Biophys. Res. Comm. 331:484; and Chakrabarti (2010) Endocrinol. 151:2408); an adipsin promoter (see, e.g., Platt et al. (1989) Proc. Natl. Acad. Sci. USA 86:7490); a resistin promoter (see, e.g., Seo et al. (2003) Molec. Endocrinol. 17:1522); and the like.

[0555] Cardiomyocyte-specific spatially restricted promoters include, but are not limited to, control sequences derived from the following genes: myosin light chain-2, α-myosin heavy chain, AE3, cardiac troponin C, cardiac actin, and the like. Franz et al. (1997) Cardiovasc. Res. 35:560-566; Robbins et al. (1995) Ann. N.Y. Acad. Sci. 752:492-505; Linn et al. (1995) Circ. Res. 76:584-591; Parmacek et al. (1994) Mol. Cell. Biol. 14:1870-1885; Hunter et al. (1993) Hypertension 22:608-617; and Sartorelli et al. (1992) Proc. Natl. Acad. Sci. USA 89:4047-4051.

[0556] Smooth muscle-specific spatially restricted promoters include, but are not limited to, an SM22a promoter (see, e.g., Akyürek et al. (2000) Mol. Med. 6:983; and U.S. Pat. No. 7,169,874); a smoothelin promoter (see, e.g., WO 2001/018048); an α-smooth muscle actin promoter; and the like. For example, a 0.4 kb region of the SM22α promoter, within which lie two CArG elements, has been shown to mediate vascular smooth muscle cell-specific expression (see, e.g., Kim, et al. (1997) Mol. Cell. Biol. 17, 2266-2278; Li, et al., (1996) J. Cell Biol. 132, 849-859; and Moessler, et al. (1996) Development 122, 2415-2425).

[0557] Photoreceptor-specific spatially restricted promoters include, but are not limited to, a rhodopsin promoter; a rhodopsin kinase promoter (Young et al. (2003) Ophthalmol. Vis. Sci. 44:4076); a beta phosphodiesterase gene promoter (Nicoud et al. (2007) J. Gene Med. 9:1015); a retinitis pigmentosa gene promoter (Nicoud et al. (2007) supra); an interphotoreceptor retinoid-binding protein (IRBP) gene enhancer (Nicoud et al. (2007) supra); an IRBP gene promoter (Yokoyama et al. (1992) Exp Eye Res. 55:225); and the like.

[0558] In some embodiments, a gene modifying system, e.g., DNA encoding a gene modifying polypeptide, DNA encoding a template RNA, or DNA or RNA encoding a heterologous object sequence, is designed such that one or more elements is operably linked to a tissue-specific promoter, e.g., a promoter that is active in T-cells. In further embodiments, the T-cell active promoter is inactive in other cell types, e.g., B-cells, NK cells. In some embodiments, the T-cell active promoter is derived from a promoter for a gene encoding a component of the T-cell receptor, e.g., TRAC, TRBC, TRGC, TRDC. In some embodiments, the T-cell active promoter is derived from a promoter for a gene encoding a component of a T-cell-specific cluster of differentiation protein, e.g., CD3, e.g., CD3D, CD3E, CD3G, CD3Z. In some embodiments, T-cell-specific promoters in gene modifying systems are discovered by comparing publicly available gene expression data across cell types and selecting promoters from the genes with enhanced expression in T-cells. In some embodiments, promoters may be selecting depending on the desired expression breadth, e.g., promoters that are active in T-cells only, promoters that are active in NK cells only, promoters that are active in both T-cells and NK cells.

[0559] Cell-specific promoters known in the art may be used to direct expression of a gene modifying protein, e.g., as described herein. Nonlimiting exemplary mammalian cell-specific promoters have been characterized and used in mice expressing Cre recombinase in a cell-specific manner. Certain nonlimiting exemplary mammalian cell-specific promoters are listed in Table 1 of U.S. Pat. No. 9,845,481, incorporated herein by reference.

[0560] In some embodiments, a vector as described herein comprises an expression cassette. Typically, an expression cassette comprises the nucleic acid molecule of the instant invention operatively linked to a promoter sequence. For example, a promoter is operatively linked with a coding sequence when it is capable of affecting the expression of that coding sequence (e.g., the coding sequence is under the transcriptional control of the promoter). Encoding sequences can be operatively linked to regulatory sequences in sense or antisense orientation. In certain embodiments, the promoter is a heterologous promoter. In certain embodiments, an expression cassette may comprise additional elements, for example, an intron, an enhancer, a polyadenylation site, a woodchuck response element (WRE), and/or other elements known to affect expression levels of the encoding sequence. A promoter typically controls the expression of a coding sequence or functional RNA. In certain embodiments, a promoter sequence comprises proximal and more distal upstream elements and can further comprise an enhancer element. An enhancer can typically stimulate promoter activity and may be an innate element of the promoter or a heterologous element inserted to enhance the level or tissue-specificity of a promoter. In certain embodiments, the promoter is derived in its entirety from a native gene. In certain embodiments, the promoter is composed of different elements derived from different naturally occurring promoters. In certain embodiments, the promoter comprises a synthetic nucleotide sequence. It will be understood by those skilled in the art that different promoters will direct the expression of a gene in different tissues or cell types, or at different stages of development, or in response to different environmental conditions or to the presence or the absence of a drug or transcriptional co-factor. Ubiquitous, cell-type-specific, tissue-specific, developmental stage-specific, and conditional promoters, for example, drug-responsive promoters (e.g., tetracycline-responsive promoters) are well known to those of skill in the art. Exemplary promoters include, but are not limited to, the phosphoglycerate kinase (PKG) promoter, CAG (composite of the CMV enhancer the chicken beta actin promoter (CBA) and the rabbit beta globin intron), NSE (neuronal specific enolase), synapsin or NeuN promoters, the SV40 early promoter, mouse mammary tumor virus LTR promoter; adenovirus major late promoter (Ad MLP), a herpes simplex virus (HSV) promoter, a cytomegalovirus (CMV) promoter such as the CMV immediate early promoter region (CMVIE), SFFV promoter, rous sarcoma virus (RSV) promoter, synthetic promoters, hybrid promoters, and the like. Other promoters can be of human origin or from other species, including from mice. Common promoters include, e.g., the human cytomegalovirus (CMV) immediate early gene promoter, the SV40 early promoter, the Rous sarcoma virus long terminal repeat, [beta]-actin, rat insulin promoter, the phosphoglycerate kinase promoter, the human alpha-1 antitrypsin (hAAT) promoter, the transthyretin promoter, the TBG promoter and other liver-specific promoters, the desmin promoter and similar muscle-specific promoters, the EF1-alpha promoter, hybrid promoters with multi-tissue specificity, promoters specific for neurons like synapsin and glyceraldehyde-3-phosphate dehydrogenase promoter, all of which are promoters well known and readily available to those of skill in the art, can be used to obtain high-level expression of the coding sequence of interest. In addition, sequences derived from non-viral genes, such as the murine metallothionein gene, will also find use herein. Such promoter sequences are commercially available from, e.g., Stratagene (San Diego, CA). Additional exemplary promoter sequences are described, for example, in WO2018213786A1 (incorporated by reference herein in its entirety).

[0561] In some embodiments, the apolipoprotein E enhancer (ApoE) or a functional fragment thereof is used, e.g., to drive expression in the liver. In some embodiments, two copies of the ApoE enhancer or a functional fragment thereof are used. In some embodiments, the ApoE enhancer or functional fragment thereof is used in combination with a promoter, e.g., the human alpha-1 antitrypsin (hAAT) promoter.

[0562] In some embodiments, the regulatory sequences impart tissue-specific gene expression capabilities. In some cases, the tissue-specific regulatory sequences bind tissue-specific transcription factors that induce transcription in a tissue specific manner. Various tissue-specific regulatory sequences (e.g., promoters, enhancers, etc.) are known in the art. Exemplary tissue-specific regulatory sequences include, but are not limited to, the following tissue-specific promoters: a liver-specific thyroxin binding globulin (TBG) promoter, a insulin promoter, a glucagon promoter, a somatostatin promoter, a pancreatic polypeptide (PPY) promoter, a synapsin-1 (Syn) promoter, a creatine kinase (MCK) promoter, a mammalian desmin (DES) promoter, a α-myosin heavy chain (a-MHC) promoter, or a cardiac Troponin T (cTnT) promoter. Other exemplary promoters include Beta-actin promoter, hepatitis B virus core promoter, Sandig et al., Gene Ther., 3:1002-9 (1996); alpha-fetoprotein (AFP) promoter, Arbuthnot et al., Hum. Gene Ther., 7:1503-14 (1996)), bone osteocalcin promoter (Stein et al., Mol. Biol. Rep., 24:185-96 (1997)); bone sialoprotein promoter (Chen et al., J. Bone Miner. Res., 11:654-64 (1996)), CD2 promoter (Hansal et al., J. Immunol., 161:1063-8 (1998); immunoglobulin heavy chain promoter; T cell receptor α-chain promoter, neuronal such as neuron-specific enolase (NSE) promoter (Andersen et al., Cell. Mol. Neurobiol., 13:503-15 (1993)), neurofilament light-chain gene promoter (Piccioli et al., Proc. Natl. Acad. Sci. USA, 88:5611-5 (1991)), and the neuron-specific vgf gene promoter (Piccioli et al., Neuron, 15:373-84 (1995)), and others. Additional exemplary promoter sequences are described, for example, in U.S. Pat. No. 10,300,146 (incorporated herein by reference in its entirety). In some embodiments, a tissue-specific regulatory element, e.g., a tissue-specific promoter, is selected from one known to be operably linked to a gene that is highly expressed in a given tissue, e.g., as measured by RNA-seq or protein expression data, or a combination thereof. Methods for analyzing tissue specificity by expression are taught in Fagerberg et al. Mol Cell Proteomics 13(2):397-406 (2014), which is incorporated herein by reference in its entirety.

[0563] In some embodiments, a vector described herein is a multicistronic expression construct. Multicistronic expression constructs include, for example, constructs harboring a first expression cassette, e.g. comprising a first promoter and a first encoding nucleic acid sequence, and a second expression cassette, e.g. comprising a second promoter and a second encoding nucleic acid sequence. Such multicistronic expression constructs may, in some instances, be particularly useful in the delivery of non-translated gene products, such as hairpin RNAs, together with a polypeptide, for example, a gene modifying polypeptide and gene modifying template. In some embodiments, multicistronic expression constructs may exhibit reduced expression levels of one or more of the included transgenes, for example, because of promoter interference or the presence of incompatible nucleic acid elements in close proximity. If a multicistronic expression construct is part of a viral vector, the presence of a self-complementary nucleic acid sequence may, in some instances, interfere with the formation of structures necessary for viral reproduction or packaging.

[0564] In some embodiments, the sequence encodes an RNA with a hairpin. In some embodiments, the hairpin RNA is a guide RNA, a template RNA, a shRNA, or a microRNA. In some embodiments, the first promoter is an RNA polymerase I promoter. In some embodiments, the first promoter is an RNA polymerase II promoter. In some embodiments, the second promoter is an RNA polymerase III promoter. In some embodiments, the second promoter is a U6 or H1 promoter.

[0565] Without wishing to be bound by theory, multicistronic expression constructs may not achieve optimal expression levels as compared to expression systems containing only one cistron. One of the suggested causes of lower expression levels achieved with multicistronic expression constructs comprising two or more promoter elements is the phenomenon of promoter interference (see, e.g., Curtin J A, Dane A P, Swanson A, Alexander I E, Ginn S L. Bidirectional promoter interference between two widely used internal heterologous promoters in a late-generation lentiviral construct. Gene Ther. 2008 March; 15(5):384-90; and Martin-Duque P, Jezzard S, Kaftansis L, Vassaux G. Direct comparison of the insulating properties of two genetic elements in an adenoviral vector containing two different expression cassettes. Hum Gene Ther. 2004 October; 15(10):995-1002; both references incorporated herein by reference for disclosure of promoter interference phenomenon). In some embodiments, the problem of promoter interference may be overcome, e.g., by producing multicistronic expression constructs comprising only one promoter driving transcription of multiple encoding nucleic acid sequences separated by internal ribosomal entry sites, or by separating cistrons comprising their own promoter with transcriptional insulator elements. In some embodiments, single-promoter driven expression of multiple cistrons may result in uneven expression levels of the cistrons. In some embodiments, a promoter cannot efficiently be isolated and isolation elements may not be compatible with some gene transfer vectors, for example, some retroviral vectors.

### MicroRNAs

[0566] MicroRNAs (miRNAs) and other small interfering nucleic acids generally regulate gene expression via target RNA transcript cleavage/degradation or translational repression of the target messenger RNA (mRNA). miRNAs may, in some instances, be natively expressed, typically as final 19-25 non-translated RNA products. miRNAs generally exhibit their activity through sequence-specific interactions with the 3′ untranslated regions (UTR) of target mRNAs. These endogenously expressed miRNAs may form hairpin precursors that are subsequently processed into an miRNA duplex, and further into a mature single stranded miRNA molecule This mature miRNA generally guides a multiprotein complex, miRISC, which identifies target 3′ UTR regions of target mRNAs based upon their complementarity to the mature miRNA. Useful transgene products may include, for example, miRNAs or miRNA binding sites that regulate the expression of a linked polypeptide. A non-limiting list of miRNA genes; the products of these genes and their homologues are useful as transgenes or as targets for small interfering nucleic acids (e.g., miRNA sponges, antisense oligonucleotides), e.g., in methods such as those listed in U.S. Ser. No. 10/300,146, 22:25-25:48, are herein incorporated by reference. In some embodiments, one or more binding sites for one or more of the foregoing miRNAs are incorporated in a transgene, e.g., a transgene delivered by a rAAV vector, e.g., to inhibit the expression of the transgene in one or more tissues of an animal harboring the transgene. In some embodiments, a binding site may be selected to control the expression of a transgene in a tissue specific manner. For example, binding sites for the liver-specific miR-122 may be incorporated into a transgene to inhibit expression of that transgene in the liver. Additional exemplary miRNA sequences are described, for example, in U.S. Pat. No. 10,300,146 (incorporated herein by reference in its entirety).

[0567] An miR inhibitor or miRNA inhibitor is generally an agent that blocks miRNA expression and/or processing. Examples of such agents include, but are not limited to, microRNA antagonists, microRNA specific antisense, microRNA sponges, and microRNA oligonucleotides (double-stranded, hairpin, short oligonucleotides) that inhibit miRNA interaction with a Drosha complex. MicroRNA inhibitors, e.g., miRNA sponges, can be expressed in cells from transgenes (e.g., as described in Ebert, M. S. Nature Methods, Epub Aug. 12, 2007; incorporated by reference herein in its entirety). In some embodiments, microRNA sponges, or other miR inhibitors, are used with the AAVs. microRNA sponges generally specifically inhibit miRNAs through a complementary heptameric seed sequence. In some embodiments, an entire family of miRNAs can be silenced using a single sponge sequence. Other methods for silencing miRNA function (derepression of miRNA targets) in cells will be apparent to one of ordinary skill in the art.

[0568] In some embodiments, a gene modifying system, template RNA, or polypeptide described herein is administered to or is active in (e.g., is more active in) a target tissue, e.g., a first tissue. In some embodiments, the gene modifying system, template RNA, or polypeptide is not administered to or is less active in (e.g., not active in) a non-target tissue. In some embodiments, a gene modifying system, template RNA, or polypeptide described herein is useful for modifying DNA in a target tissue, e.g., a first tissue, (e.g., and not modifying DNA in a non-target tissue).

[0569] In some embodiments, a gene modifying system comprises (a) a polypeptide described herein or a nucleic acid encoding the same, (b) a template nucleic acid (e.g., template RNA) described herein, and (c) one or more first tissue-specific expression-control sequences specific to the target tissue, wherein the one or more first tissue-specific expression-control sequences specific to the target tissue are in operative association with (a), (b), or (a) and (b), wherein, when associated with (a), (a) comprises a nucleic acid encoding the polypeptide.

[0570] In some embodiments, the nucleic acid in (b) comprises RNA.

[0571] In some embodiments, the nucleic acid in (b) comprises DNA.

[0572] In some embodiments, the nucleic acid in (b): (i) is single-stranded or comprises a single-stranded segment, e.g., is single-stranded DNA or comprises a single-stranded segment and one or more double stranded segments; (ii) has inverted terminal repeats; or (iii) both (i) and (ii).

[0573] In some embodiments, the nucleic acid in (b) is double-stranded or comprises a double-stranded segment.

[0574] In some embodiments, (a) comprises a nucleic acid encoding the polypeptide.

[0575] In some embodiments, the nucleic acid in (a) comprises RNA.

[0576] In some embodiments, the nucleic acid in (a) comprises DNA.

[0577] In some embodiments, the nucleic acid in (a): (i) is single-stranded or comprises a single-stranded segment, e.g., is single-stranded DNA or comprises a single-stranded segment and one or more double stranded segments; (ii) has inverted terminal repeats; or (iii) both (i) and (ii).

[0578] In some embodiments, the nucleic acid in (a) is double-stranded or comprises a double-stranded segment.

[0579] In some embodiments, the nucleic acid in (a), (b), or (a) and (b) is linear.

[0580] In some embodiments, the nucleic acid in (a), (b), or (a) and (b) is circular, e.g., a plasmid or minicircle.

[0581] In some embodiments, the heterologous object sequence is in operative association with a first promoter.

[0582] In some embodiments, the one or more first tissue-specific expression-control sequences comprises a tissue specific promoter.

[0583] In some embodiments, the tissue-specific promoter comprises a first promoter in operative association with: (i) the heterologous object sequence, (ii) a nucleic acid encoding the retroviral RT, or (iii) (i) and (ii).

[0584] In some embodiments, the one or more first tissue-specific expression-control sequences comprises a tissue-specific microRNA recognition sequence in operative association with: (i) the heterologous object sequence, (ii) a nucleic acid encoding the retroviral RT domain, or (iii) (i) and (ii).

[0585] In some embodiments, a system comprises a tissue-specific promoter, and the system further comprises one or more tissue-specific microRNA recognition sequences, wherein: (i) the tissue specific promoter is in operative association with: (I) the heterologous object sequence, (II) a nucleic acid encoding the retroviral RT domain, or (III) (I) and (II); and/or (ii) the one or more tissue-specific microRNA recognition sequences are in operative association with: (I) the heterologous object sequence, (II) a nucleic acid encoding the retroviral RT, or (III) (I) and (II).

[0586] In some embodiments, wherein (a) comprises a nucleic acid encoding the polypeptide, the nucleic acid comprises a promoter in operative association with the nucleic acid encoding the polypeptide.

[0587] In some embodiments, the nucleic acid encoding the polypeptide comprises one or more second tissue-specific expression-control sequences specific to the target tissue in operative association with the polypeptide coding sequence.

[0588] In some embodiments, the one or more second tissue-specific expression-control sequences comprises a tissue specific promoter.

[0589] In some embodiments, the tissue-specific promoter is the promoter in operative association with the nucleic acid encoding the polypeptide.

[0590] In some embodiments, the one or more second tissue-specific expression-control sequences comprises a tissue-specific microRNA recognition sequence.

[0591] In some embodiments, the promoter in operative association with the nucleic acid encoding the polypeptide is a tissue-specific promoter, the system further comprising one or more tissue-specific microRNA recognition sequences.

[0592] In some embodiments, a nucleic acid component of a system provided by the invention is a sequence (e.g., encoding the polypeptide or comprising a heterologous object sequence) flanked by untranslated regions (UTRs) that modify protein expression levels. Various 5′ and 3′ UTRs can affect protein expression. For example, in some embodiments, the coding sequence may be preceded by a 5′ UTR that modifies RNA stability or protein translation. In some embodiments, the sequence may be followed by a 3′ UTR that modifies RNA stability or translation. In some embodiments, the sequence may be preceded by a 5′ UTR and followed by a 3′ UTR that modify RNA stability or translation. In some embodiments, the 5′ and/or 3′ UTR may be selected from the 5′ and 3′ UTRs of complement factor 3 (C3) (CACTCCTCCCCATCCTCTCCCTCTGTCCCTCTGTCCCTCTGACCCTGCACTGTCCCAGCACC (SEQ ID NO: 21362)) or orosomucoid 1 (ORM1) (CAGGACACAGCCTTGGATCAGGACAGAGACTTGGGGGCCATCCTGCCCCTCCAACCCGACA TGTGTACCTCAGCTTTTTCCCTCACTTGCATCAATAAAGCTTCTGTGTTTGGAACAGCTAA (SEQ ID NO: 21363)) (Asrani et al. RNA Biology 2018). In certain embodiments, the 5′ UTR is the 5′ UTR from C3 and the 3′ UTR is the 3′ UTR from ORM1. In certain embodiments, a 5′ UTR and 3′ UTR for protein expression, e.g., mRNA (or DNA encoding the RNA) for a gene modifying polypeptide or heterologous object sequence, comprise optimized expression sequences. In some embodiments, the 5′ UTR comprises GGGAAAUAAGAGAGAAAAGAAGAGUAAGAAGAAAUAUAAGAGCCACC (SEQ ID NO: 21364) and/or the 3′ UTR comprising UGAUAAUAGGCUGGAGCCUCGGUGGCCAUGCUUCUUGCCCCUUGGGCCUCCCCCCAGCCC CUCCUCCCCUUCCUGCACCCGUACCCCCGUGGUCUUUGAAUAAAGUCUGA (SEQ ID NO: 21365), e.g., as described in Richner et al. Cell 168(6): P1114-1125 (2017), the sequences of which are incorporated herein by reference.

[0593] In some embodiments, a 5′ and/or 3′ UTR may be selected to enhance protein expression. In some embodiments, a 5′ and/or 3′ UTR may be selected to modify protein expression such that overproduction inhibition is minimized. In some embodiments, UTRs are around a coding sequence, e.g., outside the coding sequence and in other embodiments proximal to the coding sequence, In some embodiments, additional regulatory elements (e.g., miRNA binding sites, cis-regulatory sites) are included in the UTRs.

[0594] In some embodiments, an open reading frame of a gene modifying system, e.g., an ORF of an mRNA (or DNA encoding an mRNA) encoding a gene modifying polypeptide or one or more ORFs of an mRNA (or DNA encoding an mRNA) of a heterologous object sequence, is flanked by a 5′ and/or 3′ untranslated region (UTR) that enhances the expression thereof. In some embodiments, the 5′ UTR of an mRNA component (or transcript produced from a DNA component) of the system comprises the sequence 5′-GGGAAAUAAGAGAGAAAAGAAGAGUAAGAAGAAAUAUAAGAGCCACC-3′ (SEQ ID NO: 21364). In some embodiments, the 3′ UTR of an mRNA component (or transcript produced from a DNA component) of the system comprises the sequence 5′-UGAUAAUAGGCUGGAGCCUCGGUGGCCAUGCUUCUUGCCCCUUGGGCCUCCCCCCAGCCC CUCCUCCCCUUCCUGCACCCGUACCCCCGUGGUCUUUGAAUAAAGUCUGA-3′ (SEQ ID NO: 21365). This combination of 5′ UTR and 3′ UTR has been shown to result in desirable expression of an operably linked ORF by Richner et al. Cell 168(6): P1114-1125 (2017), the teachings and sequences of which are incorporated herein by reference. In some embodiments, a system described herein comprises a DNA encoding a transcript, wherein the DNA comprises the corresponding 5′ UTR and 3′ UTR sequences, with T substituting for U in the above-listed sequence). In some embodiments, a DNA vector used to produce an RNA component of the system further comprises a promoter upstream of the 5′ UTR for initiating in vitro transcription, e.g, a T7, T3, or SP6 promoter. The 5′ UTR above begins with GGG, which is a suitable start for optimizing transcription using T7 RNA polymerase. For tuning transcription levels and altering the transcription start site nucleotides to fit alternative 5′ UTRs, the teachings of Davidson et al. Pac Symp Biocomput 433-443 (2010) describe T7 promoter variants, and the methods of discovery thereof, that fulfill both of these traits.

### Viral Vectors and Components Thereof

[0595] Viruses are a useful source of delivery vehicles for the systems described herein, in addition to a source of relevant enzymes or domains as described herein, e.g., as sources of polymerases and polymerase functions used herein, e.g., DNA-dependent DNA polymerase, RNA-dependent RNA polymerase, RNA-dependent DNA polymerase, DNA-dependent RNA polymerase, reverse transcriptase. Some enzymes, e.g., reverse transcriptases, may have multiple activities, e.g., be capable of both RNA-dependent DNA polymerization and DNA-dependent DNA polymerization, e.g., first and second strand synthesis. In some embodiments, the virus used as a gene modifying delivery system or a source of components thereof may be selected from a group as described by Baltimore Bacteriol Rev 35(3):235-241 (1971).

[0596] In some embodiments, the virus is selected from a Group I virus, e.g., is a DNA virus and packages dsDNA into virions. In some embodiments, the Group I virus is selected from, e.g., Adenoviruses, Herpesviruses, Poxviruses.

[0597] In some embodiments, the virus is selected from a Group II virus, e.g., is a DNA virus and packages ssDNA into virions. In some embodiments, the Group II virus is selected from, e.g., Parvoviruses. In some embodiments, the parvovirus is a dependoparvovirus, e.g., an adeno-associated virus (AAV).

[0598] In some embodiments, the virus is selected from a Group III virus, e.g., is an RNA virus and packages dsRNA into virions. In some embodiments, the Group III virus is selected from, e.g., Reoviruses. In some embodiments, one or both strands of the dsRNA contained in such virions is a coding molecule able to serve directly as mRNA upon transduction into a host cell, e.g., can be directly translated into protein upon transduction into a host cell without requiring any intervening nucleic acid replication or polymerization steps.

[0599] In some embodiments, the virus is selected from a Group IV virus, e.g., is an RNA virus and packages ssRNA(+) into virions. In some embodiments, the Group IV virus is selected from, e.g., Coronaviruses, Picornaviruses, Togaviruses. In some embodiments, the ssRNA(+) contained in such virions is a coding molecule able to serve directly as mRNA upon transduction into a host cell, e.g., can be directly translated into protein upon transduction into a host cell without requiring any intervening nucleic acid replication or polymerization steps.

[0600] In some embodiments, the virus is selected from a Group V virus, e.g., is an RNA virus and packages ssRNA(−) into virions. In some embodiments, the Group V virus is selected from, e.g., Orthomyxoviruses, Rhabdoviruses. In some embodiments, an RNA virus with an ssRNA(−) genome also carries an enzyme inside the virion that is transduced to host cells with the viral genome, e.g., an RNA-dependent RNA polymerase, capable of copying the ssRNA(−) into ssRNA(+) that can be translated directly by the host.

[0601] In some embodiments, the virus is selected from a Group VI virus, e.g., is a retrovirus and packages ssRNA(+) into virions. In some embodiments, the Group VI virus is selected from, e.g., retroviruses. In some embodiments, the retrovirus is a lentivirus, e.g., HIV-1, HIV-2, SIV, BIV. In some embodiments, the retrovirus is a spumavirus, e.g., a foamy virus, e.g., HFV, SFV, BFV. In some embodiments, the ssRNA(+) contained in such virions is a coding molecule able to serve directly as mRNA upon transduction into a host cell, e.g., can be directly translated into protein upon transduction into a host cell without requiring any intervening nucleic acid replication or polymerization steps. In some embodiments, the ssRNA(+) is first reverse transcribed and copied to generate a dsDNA genome intermediate from which mRNA can be transcribed in the host cell. In some embodiments, an RNA virus with an ssRNA(+) genome also carries an enzyme inside the virion that is transduced to host cells with the viral genome, e.g., an RNA-dependent DNA polymerase, capable of copying the ssRNA(+) into dsDNA that can be transcribed into mRNA and translated by the host. In some embodiments, the reverse transcriptase from a Group VI retrovirus is incorporated as the reverse transcriptase domain of a gene modifying polypeptide.

[0602] In some embodiments, the virus is selected from a Group VII virus, e.g., is a retrovirus and packages dsRNA into virions. In some embodiments, the Group VII virus is selected from, e.g., Hepadnaviruses. In some embodiments, one or both strands of the dsRNA contained in such virions is a coding molecule able to serve directly as mRNA upon transduction into a host cell, e.g., can be directly translated into protein upon transduction into a host cell without requiring any intervening nucleic acid replication or polymerization steps. In some embodiments, one or both strands of the dsRNA contained in such virions is first reverse transcribed and copied to generate a dsDNA genome intermediate from which mRNA can be transcribed in the host cell. In some embodiments, an RNA virus with a dsRNA genome also carries an enzyme inside the virion that is transduced to host cells with the viral genome, e.g., an RNA-dependent DNA polymerase, capable of copying the dsRNA into dsDNA that can be transcribed into mRNA and translated by the host. In some embodiments, the reverse transcriptase from a Group VII retrovirus is incorporated as the reverse transcriptase domain of a gene modifying polypeptide.

[0603] In some embodiments, virions used to deliver nucleic acid in this invention may also carry enzymes involved in the process of gene modification. For example, a retroviral virion may contain a reverse transcriptase domain that is delivered into a host cell along with the nucleic acid. In some embodiments, an RNA template may be associated with a gene modifying polypeptide within a virion, such that both are co-delivered to a target cell upon transduction of the nucleic acid from the viral particle. In some embodiments, the nucleic acid in a virion may comprise DNA, e.g., linear ssDNA, linear dsDNA, circular ssDNA, circular dsDNA, minicircle DNA, dbDNA, ceDNA. In some embodiments, the nucleic acid in a virion may comprise RNA, e.g., linear ssRNA, linear dsRNA, circular ssRNA, circular dsRNA. In some embodiments, a viral genome may circularize upon transduction into a host cell, e.g., a linear ssRNA molecule may undergo a covalent linkage to form a circular ssRNA, a linear dsRNA molecule may undergo a covalent linkage to form a circular dsRNA or one or more circular ssRNA. In some embodiments, a viral genome may replicate by rolling circle replication in a host cell. In some embodiments, a viral genome may comprise a single nucleic acid molecule, e.g., comprise a non-segmented genome. In some embodiments, a viral genome may comprise two or more nucleic acid molecules, e.g., comprise a segmented genome. In some embodiments, a nucleic acid in a virion may be associated with one or proteins. In some embodiments, one or more proteins in a virion may be delivered to a host cell upon transduction. In some embodiments, a natural virus may be adapted for nucleic acid delivery by the addition of virion packaging signals to the target nucleic acid, wherein a host cell is used to package the target nucleic acid containing the packaging signals.

[0604] In some embodiments, a virion used as a delivery vehicle may comprise a commensal human virus. In some embodiments, a virion used as a delivery vehicle may comprise an anellovirus, the use of which is described in WO2018232017A1, which is incorporated herein by reference in its entirety.

### AAV Administration

[0605] In some embodiments, an adeno-associated virus (AAV) is used in conjunction with the system, template nucleic acid, and/or polypeptide described herein. In some embodiments, an AAV is used to deliver, administer, or package the system, template nucleic acid, and/or polypeptide described herein. In some embodiments, the AAV is a recombinant AAV (rAAV).

[0606] In some embodiments, a system comprises (a) a polypeptide described herein or a nucleic acid encoding the same, (b) a template nucleic acid (e.g., template RNA) described herein, and (c) one or more first tissue-specific expression-control sequences specific to the target tissue, wherein the one or more first tissue-specific expression-control sequences specific to the target tissue are in operative association with (a), (b), or (a) and (b), wherein, when associated with (a), (a) comprises a nucleic acid encoding the polypeptide.

[0607] In some embodiments, a system described herein further comprises a first recombinant adeno-associated virus (rAAV) capsid protein; wherein the at least one of (a) or (b) is associated with the first rAAV capsid protein, wherein at least one of (a) or (b) is flanked by AAV inverted terminal repeats (ITRs).

[0608] In some embodiments, (a) and (b) are associated with the first rAAV capsid protein.

[0609] In some embodiments, (a) and (b) are on a single nucleic acid.

[0610] In some embodiments, the system further comprises a second rAAV capsid protein, wherein at least one of (a) or (b) is associated with the second rAAV capsid protein, and wherein the at least one of (a) or (b) associated with the second rAAV capsid protein is different from the at least one of (a) or (b) is associated with the first rAAV capsid protein.

[0611] In some embodiments, the at least one of (a) or (b) is associated with the first or second rAAV capsid protein is dispersed in the interior of the first or second rAAV capsid protein, which first or second rAAV capsid protein is in the form of an AAV capsid particle.

[0612] In some embodiments, the system further comprises a nanoparticle, wherein the nanoparticle is associated with at least one of (a) or (b).

[0613] In some embodiments, (a) and (b), respectively are associated with: a) a first rAAV capsid protein and a second rAAV capsid protein; b) a nanoparticle and a first rAAV capsid protein; c) a first rAAV capsid protein; d) a first adenovirus capsid protein; e) a first nanoparticle and a second nanoparticle; or f) a first nanoparticle.

[0614] Viral vectors are useful for delivering all or part of a system provided by the invention, e.g., for use in methods provided by the invention. Systems derived from different viruses have been employed for the delivery of polypeptides or nucleic acids; for example: integrase-deficient lentivirus, adenovirus, adeno-associated virus (AAV), herpes simplex virus, and baculovirus (reviewed in Hodge et al. Hum Gene Ther 2017; Narayanavari et al. Crit Rev Biochem Mol Biol 2017; Boehme et al. Curr Gene Ther 2015).

[0615] Adenoviruses are common viruses that have been used as gene delivery vehicles given well-defined biology, genetic stability, high transduction efficiency, and ease of large-scale production (see, for example, review by Lee et al. Genes & Diseases 2017). They possess linear dsDNA genomes and come in a variety of serotypes that differ in tissue and cell tropisms. In order to prevent replication of infectious virus in recipient cells, adenovirus genomes used for packaging are deleted of some or all endogenous viral proteins, which are provided in trans in viral production cells. This renders the genomes helper-dependent, meaning they can only be replicated and packaged into viral particles in the presence of the missing components provided by so-called helper functions. A helper-dependent adenovirus system with all viral ORFs removed may be compatible with packaging foreign DNA of up to ˜37 kb (Parks et al. J Virol 1997). In some embodiments, an adenoviral vector is used to deliver DNA corresponding to the polypeptide or template component of the gene modifying system, or both are contained on separate or the same adenoviral vector. In some embodiments, the adenovirus is a helper-dependent adenovirus (HD-AdV) that is incapable of self-packaging. In some embodiments, the adenovirus is a high-capacity adenovirus (HC-AdV) that has had all or a substantial portion of endogenous viral ORFs deleted, while retaining the necessary sequence components for packaging into adenoviral particles. For this type of vector, the only adenoviral sequences required for genome packaging are noncoding sequences: the inverted terminal repeats (ITRs) at both ends and the packaging signal at the 5′-end (Jager et al. Nat Protoc 2009). In some embodiments, the adenoviral genome also comprises stuffer DNA to meet a minimal genome size for optimal production and stability (see, for example, Hausl et al. Mol Ther 2010). In some embodiments, an adenovirus is used to deliver a gene modifying system to the liver.

[0616] In some embodiments, an adenovirus is used to deliver a gene modifying system to HSCs, e.g., HDAd5/35++. HDAd5/35++ is an adenovirus with modified serotype 35 fibers that de-target the vector from the liver (Wang et al. Blood Adv 2019). In some embodiments, the adenovirus that delivers a gene modifying system to HSCs utilizes a receptor that is expressed specifically on primitive HSCs, e.g., CD46.

[0617] Adeno-associated viruses (AAV) belong to the parvoviridae family and more specifically constitute the dependoparvovirus genus. The AAV genome is composed of a linear single-stranded DNA molecule which contains approximately 4.7 kilobases (kb) and consists of two major open reading frames (ORFs) encoding the non-structural Rep (replication) and structural Cap (capsid) proteins. A second ORF within the cap gene was identified that encodes the assembly-activating protein (AAP). The DNAs flanking the AAV coding regions are two cis-acting inverted terminal repeat (ITR) sequences, approximately 145 nucleotides in length, with interrupted palindromic sequences that can be folded into energetically stable hairpin structures that function as primers of DNA replication. In addition to their role in DNA replication, the ITR sequences have been shown to be involved in viral DNA integration into the cellular genome, rescue from the host genome or plasmid, and encapsidation of viral nucleic acid into mature virions (Muzyczka, (1992) Curr. Top. Micro. Immunol. 158:97-129). In some embodiments, one or more gene modifying nucleic acid components is flanked by ITRs derived from AAV for viral packaging. See, e.g., WO2019113310.

[0618] In some embodiments, one or more components of the gene modifying system are carried via at least one AAV vector. In some embodiments, the at least one AAV vector is selected for tropism to a particular cell, tissue, organism. In some embodiments, the AAV vector is pseudotyped, e.g., AAV2/8, wherein AAV2 describes the design of the construct but the capsid protein is replaced by that from AAV8. It is understood that any of the described vectors could be pseudotype derivatives, wherein the capsid protein used to package the AAV genome is derived from that of a different AAV serotype. Without wishing to be limited in vector choice, a list of exemplary AAV serotypes can be found in Table 18. In some embodiments, an AAV to be employed for gene modifying may be evolved for novel cell or tissue tropism as has been demonstrated in the literature (e.g., Davidsson et al. Proc Natl Acad Sci USA 2019).

[0619] In some embodiments, the AAV delivery vector is a vector which has two AAV inverted terminal repeats (ITRs) and a nucleotide sequence of interest (for example, a sequence coding for a gene modifying polypeptide or a DNA template, or both), each of said ITRs having an interrupted (or noncontiguous) palindromic sequence, i.e., a sequence composed of three segments: a first segment and a last segment that are identical when read 5′→3′ but hybridize when placed against each other, and a segment that is different that separates the identical segments. See, for example, WO2012123430.

[0620] Conventionally, AAV virions with capsids are produced by introducing a plasmid or plasmids encoding the rAAV or scAAV genome, Rep proteins, and Cap proteins (Grimm et al, 1998). Upon introduction of these helper plasmids in trans, the AAV genome is “rescued” (i.e., released and subsequently recovered) from the host genome, and is further encapsidated to produce infectious AAV. In some embodiments, one or more gene modifying nucleic acids are packaged into AAV particles by introducing the ITR-flanked nucleic acids into a packaging cell in conjunction with the helper functions.

[0621] In some embodiments, the AAV genome is a so called self-complementary genome (referred to as scAAV), such that the sequence located between the ITRs contains both the desired nucleic acid sequence (e.g., DNA encoding the gene modifying polypeptide or template, or both) in addition to the reverse complement of the desired nucleic acid sequence, such that these two components can fold over and self-hybridize. In some embodiments, the self-complementary modules are separated by an intervening sequence that permits the DNA to fold back on itself, e.g., forms a stem-loop. An scAAV has the advantage of being poised for transcription upon entering the nucleus, rather than being first dependent on ITR priming and second-strand synthesis to form dsDNA. In some embodiments, one or more gene modifying components is designed as an scAAV, wherein the sequence between the AAV ITRs contains two reverse complementing modules that can self-hybridize to create dsDNA.

[0622] In some embodiments, nucleic acid (e.g., encoding a polypeptide, or a template, or both) delivered to cells is closed-ended, linear duplex DNA (CELiD DNA or ceDNA). In some embodiments, ceDNA is derived from the replicative form of the AAV genome (Li et al. PLoS One 2013). In some embodiments, the nucleic acid (e.g., encoding a polypeptide, or a template DNA, or both) is flanked by ITRs, e.g., AAV ITRs, wherein at least one of the ITRs comprises a terminal resolution site and a replication protein binding site (sometimes referred to as a replicative protein binding site). In some embodiments, the ITRs are derived from an adeno-associated virus, e.g., AAV1, AAV2, AAV3, AAV4, AAV5, AAV6, AAV7, AAV8, AAV9, AAV10, AAV11, AAV12, or a combination thereof. In some embodiments, the ITRs are symmetric. In some embodiments, the ITRs are asymmetric. In some embodiments, at least one Rep protein is provided to enable replication of the construct. In some embodiments, the at least one Rep protein is derived from an adeno-associated virus, e.g., AAV1, AAV2, AAV3, AAV4, AAV5, AAV6, AAV7, AAV8, AAV9, AAV10, AAV11, AAV12, or a combination thereof. In some embodiments, ceDNA is generated by providing a production cell with (i) DNA flanked by ITRs, e.g., AAV ITRs, and (ii) components required for ITR-dependent replication, e.g., AAV proteins Rep78 and Rep52 (or nucleic acid encoding the proteins). In some embodiments, ceDNA is free of any capsid protein, e.g., is not packaged into an infectious AAV particle. In some embodiments, ceDNA is formulated into LNPs (see, for example, WO2019051289A1).

[0623] In some embodiments, the ceDNA vector consists of two self-complementary sequences, e.g., asymmetrical or symmetrical or substantially symmetrical ITRs as defined herein, flanking said expression cassette, wherein the ceDNA vector is not associated with a capsid protein. In some embodiments, the ceDNA vector comprises two self-complementary sequences found in an AAV genome, where at least one ITR comprises an operative Rep-binding element (RBE) (also sometimes referred to herein as “RBS”) and a terminal resolution site (trs) of AAV or a functional variant of the RBE. See, for example, WO2019113310.

[0624] In some embodiments, the AAV genome comprises two genes that encode four replication proteins and three capsid proteins, respectively. In some embodiments, the genes are flanked on either side by 145-bp inverted terminal repeats (ITRs). In some embodiments, the virion comprises up to three capsid proteins (Vp1, Vp2, and/or Vp3), e.g., produced in a 1:1:10 ratio. In some embodiments, the capsid proteins are produced from the same open reading frame and/or from differential splicing (Vp1) and alternative translational start sites (Vp2 and Vp3, respectively). Generally, Vp3 is the most abundant subunit in the virion and participates in receptor recognition at the cell surface defining the tropism of the virus. In some embodiments, Vp1 comprises a phospholipase domain, e.g., which functions in viral infectivity, in the N-terminus of Vp1.

[0625] In some embodiments, packaging capacity of the viral vectors limits the size of the gene modifying system that can be packaged into the vector. For example, the packaging capacity of the AAVs can be about 4.5 kb (e.g., about 3.0, 3.5, 4.0, 4.5, 5.0, 5.5, or 6.0 kb), e.g., including one or two inverted terminal repeats (ITRs), e.g., 145 base ITRs.

[0626] In some embodiments, recombinant AAV (rAAV) comprises cis-acting 145-bp ITRs flanking vector transgene cassettes, e.g., providing up to 4.5 kb for packaging of foreign DNA. Subsequent to infection, rAAV can, in some instances, express a fusion protein of the invention and persist without integration into the host genome by existing episomally in circular head-to-tail concatemers. rAAV can be used, for example, in vitro and in vivo. In some embodiments, AAV-mediated gene delivery requires that the length of the coding sequence of the gene is equal or greater in size than the wild-type AAV genome.

[0627] AAV delivery of genes that exceed this size and/or the use of large physiological regulatory elements can be accomplished, for example, by dividing the protein(s) to be delivered into two or more fragments. In some embodiments, the N-terminal fragment is fused to an intein-N sequence. In some embodiments, the C-terminal fragment is fused to an intein-C sequence. In embodiments, the fragments are packaged into two or more AAV vectors.

[0628] In some embodiments, dual AAV vectors are generated by splitting a large transgene expression cassette in two separate halves (5′ and 3′ ends, or head and tail), e.g., wherein each half of the cassette is packaged in a single AAV vector (of <5 kb). The re-assembly of the full-length transgene expression cassette can, in some embodiments, then be achieved upon co-infection of the same cell by both dual AAV vectors. In some embodiments, co-infection is followed by one or more of: (1) homologous recombination (HR) between 5′ and 3′ genomes (dual AAV overlapping vectors); (2) ITR-mediated tail-to-head concatemerization of 5′ and 3′ genomes (dual AAV trans-splicing vectors); and/or (3) a combination of these two mechanisms (dual AAV hybrid vectors). In some embodiments, the use of dual AAV vectors in vivo results in the expression of full-length proteins. In some embodiments, the use of the dual AAV vector platform represents an efficient and viable gene transfer strategy for transgenes of greater than about 4.0, 4.1, 4.2, 4.3, 4.4, 4.5, 4.6, 4.7, 4.8, 4.9, or 5.0 kb in size. In some embodiments, AAV vectors can also be used to transduce cells with target nucleic acids, e.g., in the in vitro production of nucleic acids and peptides. In some embodiments, AAV vectors can be used for in vivo and ex vivo gene therapy procedures (see, e.g., West et al., Virology 160:38-47 (1987); U.S. Pat. No. 4,797,368; WO 93/24641; Kotin, Human Gene Therapy 5:793-801 (1994); Muzyczka, J. Clin. Invest. 94:1351 (1994); each of which is incorporated herein by reference in their entirety). The construction of recombinant AAV vectors is described in a number of publications, including U.S. Pat. No. 5,173,414; Tratschin et al., Mol. Cell. Biol. 5:3251-3260 (1985); Tratschin, et al., Mol. Cell. Biol. 4:2072-2081 (1984); Hermonat & Muzyczka, PNAS 81:6466-6470 (1984); and Samulski et al., J. Virol. 63:03822-3828 (1989) (incorporated by reference herein in their entirety).

[0629] In some embodiments, a gene modifying polypeptide described herein (e.g., with or without one or more guide nucleic acids) can be delivered using AAV, lentivirus, adenovirus or other plasmid or viral vector types, in particular, using formulations and doses from, for example, U.S. Pat. No. 8,454,972 (formulations, doses for adenovirus), U.S. Pat. No. 8,404,658 (formulations, doses for AAV) and U.S. Pat. No. 5,846,946 (formulations, doses for DNA plasmids) and from clinical trials and publications regarding the clinical trials involving lentivirus, AAV and adenovirus. For example, for AAV, the route of administration, formulation and dose can be as described in U.S. Pat. No. 8,454,972 and as in clinical trials involving AAV. For adenovirus, the route of administration, formulation and dose can be as described in U.S. Pat. No. 8,404,658 and as in clinical trials involving adenovirus. For plasmid delivery, the route of administration, formulation and dose can be as described in U.S. Pat. No. 5,846,946 and as in clinical studies involving plasmids. Doses can be based on or extrapolated to an average 70 kg individual (e.g. a male adult human), and can be adjusted for patients, subjects, mammals of different weight and species. Frequency of administration is within the ambit of the medical or veterinary practitioner (e.g., physician, veterinarian), depending on usual factors including the age, sex, general health, other conditions of the patient or subject and the particular condition or symptoms being addressed. In some embodiments, the viral vectors can be injected into the tissue of interest. For cell-type specific gene modifying, the expression of the gene modifying polypeptide and optional guide nucleic acid can, in some embodiments, be driven by a cell-type specific promoter.

[0630] In some embodiments, AAV allows for low toxicity, for example, due to the purification method not requiring ultracentrifugation of cell particles that can activate the immune response. In some embodiments, AAV allows low probability of causing insertional mutagenesis, for example, because it does not substantially integrate into the host genome.

[0631] In some embodiments, AAV has a packaging limit of about 4.4, 4.5, 4.6, 4.7, or 4.75 kb. In some embodiments, a gene modifying polypeptide-encoding sequence, promoter, and transcription terminator can fit into a single viral vector. SpCas9 (4.1 kb) may, in some instances, be difficult to package into AAV. Therefore, in some embodiments, a gene modifying polypeptide coding sequence is used that is shorter in length than other gene modifying polypeptide coding sequences or base editors. In some embodiments, the gene modifying polypeptide encoding sequences are less than about 4.5 kb, 4.4 kb, 4.3 kb, 4.2 kb, 4.1 kb, 4 kb, 3.9 kb, 3.8 kb, 3.7 kb, 3.6 kb, 3.5 kb, 3.4 kb, 3.3 kb, 3.2 kb, 3.1 kb, 3 kb, 2.9 kb, 2.8 kb, 2.7 kb, 2.6 kb, 2.5 kb, 2 kb, or 1.5 kb.

[0632] An AAV can be AAV1, AAV2, AAV5 or any combination thereof. In some embodiments, the type of AAV is selected with respect to the cells to be targeted; e.g., AAV serotypes 1, 2, 5 or a hybrid capsid AAV1, AAV2, AAV5 or any combination thereof can be selected for targeting brain or neuronal cells; or AAV4 can be selected for targeting cardiac tissue. In some embodiments, AAV8 is selected for delivery to the liver. Exemplary AAV serotypes as to these cells are described, for example, in Grimm, D. et al, J. Virol. 82: 5887-5911 (2008) (incorporated herein by reference in its entirety). In some embodiments, AAV refers all serotypes, subtypes, and naturally-occurring AAV as well as recombinant AAV. AAV may be used to refer to the virus itself or a derivative thereof. In some embodiments, AAV includes AAV1, AAV2, AAV3, AAV3B, AAV4, AAV5, AAV6, AAV6.2, AAV7, AAVrh.64R1, AAVhu.37, AAVrh.8, AAVrh.32.33, AAV8, AAV9, AAV-DJ, AAV2/8, AAVrhlO, AAVLK03, AV10, AAV11, AAV 12, rhlO, and hybrids thereof, avian AAV, bovine AAV, canine AAV, equine AAV, primate AAV, non-primate AAV, and ovine AAV. The genomic sequences of various serotypes of AAV, as well as the sequences of the native terminal repeats (TRs), Rep proteins, and capsid subunits are known in the art. Such sequences may be found in the literature or in public databases such as GenBank. Additional exemplary AAV serotypes are listed in Table 18.

TABLE 18
Exemplary AAV serotypes.

| Target Tissue | Vehicle | Reference |
|---|---|---|
| Liver | AAV (AAV8¹, AAVrh.8¹, | 1. Wang et al., Mol. Ther. 18, |
| | AAVhu.37¹, AAV2/8, | 118-25 (2010) |
| | AAV2/rh10², AAV9, AAV2, | 2. Ginn et al., JHEP Reports, |
| | NP40³, NP59^{2, 3}, AAV3B⁵, | 100065 (2019) |
| | AAV-DJ⁴, AAV-LK014, AAV- | 3. Paulk et al., Mol. Ther. 26, |
| | LK02⁴, AAV-LK03⁴, AAV- | 289-303 (2018). |
| | LK19⁴, AAV5⁷ | 4. L. Lisowski et al., Nature. |
| | Adenovirus (Ad5, HC-AdV⁶) | 506, 382-6 (2014). |
| | | 5. L. Wang et al., Mol. Ther. 23, |
| | | 1877-87 (2015). |
| | | 6. Hausl Mol Ther (2010) |
| | | 7. Davidoff et al., Mol. Ther. 11, |
| | | 875-88 (2005) |
| Lung | AAV (AAV4, AAV5, AAV6¹, | 1. Duncan et al., Mol Ther |
| | AAV9, H22²) | Methods Clin Dev (2018) |
| | Adenovirus (Ad5, Ad3, Ad21, | 2. Cooney et al., Am J Respir |
| | Ad14)³ | Cell Mol Biol (2019) |
| | | 3. Li et al., Mol Ther Methods |
| | | Clin Dev (2019) |
| Skin | AAV (AAV6¹, AAV-LK19²) | 1. Petek et al., Mol. Ther. (2010) |
| | | 2. L. Lisowski et al., Nature. |
| | | 506, 382-6 (2014). |
| HSCs | Adenovirus (HDAd5/35⁺⁺) | Wang et al. Blood Adv (2019) |

[0633] In some embodiments, a pharmaceutical composition (e.g., comprising an AAV as described herein) has less than 10% empty capsids, less than 8% empty capsids, less than 7% empty capsids, less than 5% empty capsids, less than 3% empty capsids, or less than 1% empty capsids. In some embodiments, the pharmaceutical composition has less than about 5% empty capsids. In some embodiments, the number of empty capsids is below the limit of detection. In some embodiments, it is advantageous for the pharmaceutical composition to have low amounts of empty capsids, e.g., because empty capsids may generate an adverse response (e.g., immune response, inflammatory response, liver response, and/or cardiac response), e.g., with little or no substantial therapeutic benefit.

[0634] In some embodiments, the residual host cell protein (rHCP) in the pharmaceutical composition is less than or equal to 100 ng/ml rHCP per 1×10¹³ vg/ml, e.g., less than or equal to 40 ng/ml rHCP per 1×10¹³ vg/ml or 1-50 ng/ml rHCP per 1×10¹³ vg/ml. In some embodiments, the pharmaceutical composition comprises less than 10 ng rHCP per 1.0×10¹³ vg, or less than 5 ng rHCP per 1.0×10¹³ vg, less than 4 ng rHCP per 1.0×10¹³ vg, or less than 3 ng rHCP per 1.0×10¹³ vg, or any concentration in between. In some embodiments, the residual host cell DNA (hcDNA) in the pharmaceutical composition is less than or equal to 5×10⁶ pg/ml hcDNA per 1×10¹³ vg/ml, less than or equal to 1.2×10⁶ pg/ml hcDNA per 1×10¹³ vg/ml, or 1×10⁵ μg/ml hcDNA per 1×10¹³ vg/ml. In some embodiments, the residual host cell DNA in said pharmaceutical composition is less than 5.0×10⁵ pg per 1×10¹³ vg, less than 2.0×10⁵ pg per 1.0×10¹³ vg, less than 1.1×10⁵ pg per 1.0×10¹³ vg, less than 1.0×10⁵ pg hcDNA per 1.0×10¹³ vg, less than 0.9×10⁵ pg hcDNA per 1.0×10¹³ vg, less than 0.8×10⁵ pg hcDNA per 1.0×10¹³ vg, or any concentration in between.

[0635] In some embodiments, the residual plasmid DNA in the pharmaceutical composition is less than or equal to 1.7×10⁵ μg/ml per 1.0×10¹³ vg/ml, or 1×10⁵ μg/ml per 1×1.0×10¹³ vg/ml, or 1.7×10⁶ pg/ml per 1.0×10¹³ vg/ml. In some embodiments, the residual DNA plasmid in the pharmaceutical composition is less than 10.0×10⁵ pg by 1.0×10¹³ vg, less than 8.0×10⁵ pg by 1.0×10¹³ vg or less than 6.8×10⁵ pg by 1.0×10¹³ vg. In embodiments, the pharmaceutical composition comprises less than 0.5 ng per 1.0×10¹³ vg, less than 0.3 ng per 1.0×10¹³ vg, less than 0.22 ng per 1.0×10¹³ vg or less than 0.2 ng per 1.0×10¹³ vg or any intermediate concentration of bovine serum albumin (BSA). In embodiments, the benzonase in the pharmaceutical composition is less than 0.2 ng by 1.0×10¹³ vg, less than 0.1 ng by 1.0×10¹³ vg, less than 0.09 ng by 1.0×10¹³ vg, less than 0.08 ng by 1.0×10¹³ vg or any intermediate concentration. In embodiments, Poloxamer 188 in the pharmaceutical composition is about 10 to 150 ppm, about 15 to 100 ppm or about 20 to 80 ppm. In embodiments, the cesium in the pharmaceutical composition is less than 50 pg/g (ppm), less than 30 pg/g (ppm) or less than 20 pg/g (ppm) or any intermediate concentration.

[0636] In embodiments, the pharmaceutical composition comprises total impurities, e.g., as determined by SDS-PAGE, of less than 10%, less than 8%, less than 7%, less than 6%, less than 5%, less than 4%, less than 3%, less than 2%, or any percentage in between. In embodiments, the total purity, e.g., as determined by SDS-PAGE, is greater than 90%, greater than 92%, greater than 93%, greater than 94%, greater than 95%, greater than 96%, greater than 97%, greater than 98%, or any percentage in between. In embodiments, no single unnamed related impurity, e.g., as measured by SDS-PAGE, is greater than 5%, greater than 4%, greater than 3% or greater than 2%, or any percentage in between. In embodiments, the pharmaceutical composition comprises a percentage of filled capsids relative to total capsids (e.g., peak 1+peak 2 as measured by analytical ultracentrifugation) of greater than 85%, greater than 86%, greater than 87%, greater than 88%, greater than 89%, greater than 90%, greater than 91%, greater than 91.9%, greater than 92%, greater than 93%, or any percentage in between. In embodiments of the pharmaceutical composition, the percentage of filled capsids measured in peak 1 by analytical ultracentrifugation is 20-80%, 25-75%, 30-75%, 35-75%, or 37.4-70.3%. In embodiments of the pharmaceutical composition, the percentage of filled capsids measured in peak 2 by analytical ultracentrifugation is 20-80%, 20-70%, 22-65%, 24-62%, or 24.9-60.1%.

[0637] In one embodiment, the pharmaceutical composition comprises a genomic titer of 1.0 to 5.0×10¹³ vg/mL, 1.2 to 3.0×10¹³ vg/mL or 1.7 to 2.3×10¹³ vg/ml. In one embodiment, the pharmaceutical composition exhibits a biological load of less than 5 CFU/mL, less than 4 CFU/mL, less than 3 CFU/mL, less than 2 CFU/mL or less than 1 CFU/mL or any intermediate contraction. In embodiments, the amount of endotoxin according to USP, for example, USP <85> (incorporated by reference in its entirety) is less than 1.0 EU/mL, less than 0.8 EU/mL or less than 0.75 EU/mL. In embodiments, the osmolarity of a pharmaceutical composition according to USP, for example, USP<785> (incorporated by reference in its entirety) is 350 to 450 mOsm/kg, 370 to 440 mOsm/kg or 390 to 430 mOsm/kg. In embodiments, the pharmaceutical composition contains less than 1200 particles that are greater than 25 μm per container, less than 1000 particles that are greater than 25 μm per container, less than 500 particles that are greater than 25 μm per container or any intermediate value. In embodiments, the pharmaceutical composition contains less than 10,000 particles that are greater than 10 μm per container, less than 8000 particles that are greater than 10 μm per container or less than 600 particles that are greater than 10 μm per container.

[0638] In one embodiment, the pharmaceutical composition has a genomic titer of 0.5 to 5.0×10¹³ vg/mL, 1.0 to 4.0×10¹³ vg/mL, 1.5 to 3.0×10¹³ vg/ml or 1.7 to 2.3×10¹³ vg/ml. In one embodiment, the pharmaceutical composition described herein comprises one or more of the following: less than about 0.09 ng benzonase per 1.0×10¹³ vg, less than about 30 pg/g (ppm) of cesium, about 20 to 80 ppm Poloxamer 188, less than about 0.22 ng BSA per 1.0×10¹³ vg, less than about 6.8×10⁵ pg of residual DNA plasmid per 1.0×10¹³ vg, less than about 1.1×10⁵ pg of residual hcDNA per 1.0×10¹³ vg, less than about 4 ng of rHCP per 1.0×10¹³ vg, pH 7.7 to 8.3, about 390 to 430 mOsm/kg, less than about 600 particles that are >25 μm in size per container, less than about 6000 particles that are >10 μm in size per container, about 1.7×10¹³-2.3×10¹³ vg/mL genomic titer, infectious titer of about 3.9×10⁸ to 8.4×10¹⁰ IU per 1.0×10¹³ vg, total protein of about 100-300 pg per 1.0×10¹³ vg, mean survival of >24 days in A7SMA mice with about 7.5×10¹³ vg/kg dose of viral vector, about 70 to 130% relative potency based on an in vitro cell based assay and/or less than about 5% empty capsid. In various embodiments, the pharmaceutical compositions described herein comprise any of the viral particles discussed here, retain a potency of between ±20%, between ±15%, between ±10% or within ±5% of a reference standard. In some embodiments, potency is measured using a suitable in vitro cell assay or in vivo animal model.

[0639] Additional methods of preparation, characterization, and dosing AAV particles are taught in WO2019094253, which is incorporated herein by reference in its entirety.

[0640] Additional rAAV constructs that can be employed consonant with the invention include those described in Wang et al 2019, available at: //doi.org/10.1038/s41573-019-0012-9, including Table 1 thereof, which is incorporated by reference in its entirety.

### Lipid Nanoparticles

[0641] The methods and systems provided herein may employ any suitable carrier or delivery modality, including, in certain embodiments, lipid nanoparticles (LNPs). Lipid nanoparticles, in some embodiments, comprise one or more ionic lipids, such as non-cationic lipids (e.g., neutral or anionic, or zwitterionic lipids); one or more conjugated lipids (such as PEG-conjugated lipids or lipids conjugated to polymers described in Table 5 of WO2019217941; incorporated herein by reference in its entirety); one or more sterols (e.g., cholesterol); and, optionally, one or more targeting molecules (e.g., conjugated receptors, receptor ligands, antibodies); or combinations of the foregoing.

[0642] Lipids that can be used in nanoparticle formations (e.g., lipid nanoparticles) include, for example those described in Table 4 of WO2019217941, which is incorporated by reference—e.g., a lipid-containing nanoparticle can comprise one or more of the lipids in Table 4 of WO2019217941. Lipid nanoparticles can include additional elements, such as polymers, such as the polymers described in Table 5 of WO2019217941, incorporated by reference.

[0643] In some embodiments, conjugated lipids, when present, can include one or more of PEG-diacylglycerol (DAG) (such as 1-(monomethoxy-polyethyleneglycol)-2,3-dimyristoylglycerol (PEG-DMG)), PEG-dialkyloxypropyl (DAA), PEG-phospholipid, PEG-ceramide (Cer), a pegylated phosphatidylethanoloamine (PEG-PE), PEG succinate diacylglycerol (PEGS-DAG) (such as 4-0-(2′,3′-di(tetradecanoyloxy)propyl-1-0-(w-methoxy(polyethoxy)ethyl) butanedioate (PEG-S-DMG)), PEG dialkoxypropylcarbam, N-(carbonyl-methoxypoly ethylene glycol 2000)-1,2-distearoyl-sn-glycero-3-phosphoethanolamine sodium salt, and those described in Table 2 of WO2019051289 (incorporated by reference), and combinations of the foregoing.

[0644] In some embodiments, sterols that can be incorporated into lipid nanoparticles include one or more of cholesterol or cholesterol derivatives, such as those in WO2009/127060 or US2010/0130588, which are incorporated by reference. Additional exemplary sterols include phytosterols, including those described in Eygeris et al (2020), dx.doi.org/10.1021/acs.nanolett.0c01386, incorporated herein by reference.

[0645] In some embodiments, the lipid particle comprises an ionizable lipid, a non-cationic lipid, a conjugated lipid that inhibits aggregation of particles, and a sterol. The amounts of these components can be varied independently and to achieve desired properties. For example, in some embodiments, the lipid nanoparticle comprises an ionizable lipid is in an amount from about 20 mol % to about 90 mol % of the total lipids (in other embodiments it may be 20-70% (mol), 30-60% (mol) or 40-50% (mol); about 50 mol % to about 90 mol % of the total lipid present in the lipid nanoparticle), a non-cationic lipid in an amount from about 5 mol % to about 30 mol % of the total lipids, a conjugated lipid in an amount from about 0.5 mol % to about 20 mol % of the total lipids, and a sterol in an amount from about 20 mol % to about 50 mol % of the total lipids. The ratio of total lipid to nucleic acid (e.g., encoding the gene modifying polypeptide or template nucleic acid) can be varied as desired. For example, the total lipid to nucleic acid (mass or weight) ratio can be from about 10:1 to about 30:1.

[0646] In some embodiments, an ionizable lipid may be a cationic lipid, an ionizable cationic lipid, e.g., a cationic lipid that can exist in a positively charged or neutral form depending on pH, or an amine-containing lipid that can be readily protonated. In some embodiments, the cationic lipid is a lipid capable of being positively charged, e.g., under physiological conditions. Exemplary cationic lipids include one or more amine group(s) which bear the positive charge. In some embodiments, the lipid particle comprises a cationic lipid in formulation with one or more of neutral lipids, ionizable amine-containing lipids, biodegradable alkyn lipids, steroids, phospholipids including polyunsaturated lipids, structural lipids (e.g., sterols), PEG, cholesterol and polymer conjugated lipids. In some embodiments, the cationic lipid may be an ionizable cationic lipid. An exemplary cationic lipid as disclosed herein may have an effective pKa over 6.0. In embodiments, a lipid nanoparticle may comprise a second cationic lipid having a different effective pKa (e.g., greater than the first effective pKa), than the first cationic lipid. A lipid nanoparticle may comprise between 40 and 60 mol percent of a cationic lipid, a neutral lipid, a steroid, a polymer conjugated lipid, and a therapeutic agent, e.g., a nucleic acid (e.g., RNA) described herein (e.g., a template nucleic acid or a nucleic acid encoding a gene modifying polypeptide), encapsulated within or associated with the lipid nanoparticle. In some embodiments, the nucleic acid is co-formulated with the cationic lipid. The nucleic acid may be adsorbed to the surface of an LNP, e.g., an LNP comprising a cationic lipid. In some embodiments, the nucleic acid may be encapsulated in an LNP, e.g., an LNP comprising a cationic lipid. In some embodiments, the lipid nanoparticle may comprise a targeting moiety, e.g., coated with a targeting agent. In embodiments, the LNP formulation is biodegradable. In some embodiments, a lipid nanoparticle comprising one or more lipid described herein, e.g., Formula (i), (ii), (ii), (vii) and/or (ix) encapsulates at least 1%, at least 5%, at least 10%, at least 20%, at least 30%, at least 40%, at least 50%, at least 60%, at least 70%, at least 80%, at least 90%, at least 92%, at least 95%, at least 97%, at least 98% or 100% of an RNA molecule, e.g., template RNA and/or a mRNA encoding the gene modifying polypeptide.

[0647] In some embodiments, the lipid to nucleic acid ratio (mass/mass ratio; w/w ratio) can be in the range of from about 1:1 to about 25:1, from about 10:1 to about 14:1, from about 3:1 to about 15:1, from about 4:1 to about 10:1, from about 5:1 to about 9:1, or about 6:1 to about 9:1. The amounts of lipids and nucleic acid can be adjusted to provide a desired N/P ratio, for example, N/P ratio of 3, 4, 5, 6, 7, 8, 9, 10 or higher. Generally, the lipid nanoparticle formulation's overall lipid content can range from about 5 mg/ml to about 30 mg/mL.

[0648] Exemplary ionizable lipids that can be used in lipid nanoparticle formulations include, without limitation, those listed in Table 1 of WO2019051289, incorporated herein by reference. Additional exemplary lipids include, without limitation, one or more of the following formulae: X of US2016/0311759; I of US20150376115 or in US2016/0376224; I, II or III of US20160151284; I, IA, II, or IIA of US20170210967; I-c of US20150140070; A of US2013/0178541; I of US2013/0303587 or US2013/0123338; I of US2015/0141678; II, III, IV, or V of US2015/0239926; I of US2017/0119904; I or II of WO2017/117528; A of US2012/0149894; A of US2015/0057373; A of WO2013/116126; A of US2013/0090372; A of US2013/0274523; A of US2013/0274504; A of US2013/0053572; A of WO2013/016058; A of WO2012/162210; I of US2008/042973; I, II, III, or IV of US2012/01287670; I or II of US2014/0200257; I, II, or III of US2015/0203446; I or III of US2015/0005363; I, IA, IB, IC, ID, II, IIA, IIB, IIC, IID, or III-XXIV of US2014/0308304; of US2013/0338210; I, II, III, or IV of WO2009/132131; A of US2012/01011478; I or XXXV of US2012/0027796; XIV or XVII of US2012/0058144; of US2013/0323269; I of US2011/0117125; I, II, or III of US2011/0256175; I, II, III, IV, V, VI, VII, VIII, IX, X, XI, XII of US2012/0202871; I, II, III, IV, V, VI, VII, VIII, X, XII, XIII, XIV, XV, or XVI of US2011/0076335; I or II of US2006/008378; I of US2013/0123338; I or X-A-Y-Z of US2015/0064242; XVI, XVII, or XVIII of US2013/0022649; I, II, or III of US2013/0116307; I, II, or III of US2013/0116307; I or II of US2010/0062967; I-X of US2013/0189351; I of US2014/0039032; V of US2018/0028664; I of US2016/0317458; I of US2013/0195920; 5, 6, or 10 of U.S. Pat. No. 10,221,127; 111-3 of WO2018/081480; I-5 or I-8 of WO2020/081938; 18 or 25 of U.S. Pat. No. 9,867,888; A of US2019/0136231; II of WO2020/219876; 1 of US2012/0027803; OF-02 of US2019/0240349; 23 of U.S. Pat. No. 10,086,013; cKK-E12/A6 of Miao et al (2020); C12-200 of WO2010/053572; 7C1 of Dahlman et al (2017); 304-013 or 503-013 of Whitehead et al; TS-P4C2 of U.S. Pat. No. 9,708,628; I of WO2020/106946; I of WO2020/106946.

[0649] In some embodiments, the ionizable lipid is MC3 (6Z,9Z,28Z,3 lZ)-heptatriaconta-6,9,28,3 l-tetraen-l9-yl-4-(dimethylamino) butanoate (DLin-MC3-DMA or MC3), e.g., as described in Example 9 of WO2019051289A9 (incorporated by reference herein in its entirety). In some embodiments, the ionizable lipid is the lipid ATX-002, e.g., as described in Example 10 of WO2019051289A9 (incorporated by reference herein in its entirety). In some embodiments, the ionizable lipid is (13Z,16Z)-A,A-dimethyl-3-nonyldocosa-l3, l6-dien-l-amine (Compound 32), e.g., as described in Example 11 of WO2019051289A9 (incorporated by reference herein in its entirety). In some embodiments, the ionizable lipid is Compound 6 or Compound 22, e.g., as described in Example 12 of WO2019051289A9 (incorporated by reference herein in its entirety). In some embodiments, the ionizable lipid is heptadecan-9-yl 8-((2-hydroxyethyl)(6-oxo-6-(undecyloxy)hexyl)amino)octanoate (SM-102); e.g., as described in Example 1 of U.S. Pat. No. 9,867,888 (incorporated by reference herein in its entirety). In some embodiments, the ionizable lipid is 9Z,12Z)-3-((4,4-bis(octyloxy)butanoyl)oxy)-2-((((3-(diethylamino)propoxy)carbonyl)oxy)methyl)propyl octadeca-9,12-dienoate (LP01) e.g., as synthesized in Example 13 of WO2015/095340 (incorporated by reference herein in its entirety). In some embodiments, the ionizable lipid is Di((Z)-non-2-en-1-yl) 9-((4-dimethylamino)butanoyl)oxy)heptadecanedioate (L319), e.g. as synthesized in Example 7, 8, or 9 of US2012/0027803 (incorporated by reference herein in its entirety). In some embodiments, the ionizable lipid is 1,1′-((2-(4-(2-((2-(Bis(2-hydroxydodecyl)amino)ethyl)(2-hydroxydodecyl) amino)ethyl)piperazin-1-yl)ethyl)azanediyl)bis(dodecan-2-ol) (C12-200), e.g., as synthesized in Examples 14 and 16 of WO2010/053572 (incorporated by reference herein in its entirety). In some embodiments, the ionizable lipid is; Imidazole cholesterol ester (ICE) lipid (3S, 10R, 13R, 17R)-10, 13-dimethyl-17-((R)-6-methylheptan-2-yl)-2, 3, 4, 7, 8, 9, 10, 11, 12, 13, 14, 15, 16, 17-tetradecahydro-1H-cyclopenta[a]phenanthren-3-yl 3-(1H-imidazol-4-yl)propanoate, e.g., Structure (I) from WO2020/106946 (incorporated by reference herein in its entirety).

[0650] Some non-limiting examples of lipid compounds that may be used (e.g., in combination with other lipid components) to form lipid nanoparticles for the delivery of compositions described herein, e.g., nucleic acid (e.g., RNA) described herein (e.g., a template nucleic acid or a nucleic acid encoding a gene modifying polypeptide) includes,

[chemical structure]

[0651] In some embodiments an LNP comprising Formula (i) is used to deliver a gene modifying composition described herein to the liver and/or hepatocyte cells.

[chemical structure]

[0652] In some embodiments an LNP comprising Formula (ii) is used to deliver a gene modifying composition described herein to the liver and/or hepatocyte cells.

[chemical structure]

[0653] In some embodiments an LNP comprising Formula (iii) is used to deliver a gene modifying composition described herein to the liver and/or hepatocyte cells.

[chemical structure]

[0654] In some embodiments an LNP comprising Formula (v) is used to deliver a gene modifying composition described herein to the liver and/or hepatocyte cells.

[chemical structure]

[0655] In some embodiments an LNP comprising Formula (vi) is used to deliver a gene modifying composition described herein to the liver and/or hepatocyte cells.

[chemical structure]

[0656] In some embodiments an LNP comprising Formula (viii) is used to deliver a gene modifying composition described herein to the liver and/or hepatocyte cells.

[chemical structure]

[0657] In some embodiments an LNP comprising Formula (ix) is used to deliver a gene modifying composition described herein to the liver and/or hepatocyte cells.

[chemical structure]

[0658] wherein
[0659] X¹ is O, NR¹, or a direct bond, X² is C2-5 alkylene, X³ is C(=0) or a direct bond, R¹ is H or Me, R³ is Ci-3 alkyl, R² is Ci-3 alkyl, or R² taken together with the nitrogen atom to which it is attached and 1-3 carbon atoms of X² form a 4-, 5-, or 6-membered ring, or X¹ is NR¹, R¹ and R² taken together with the nitrogen atoms to which they are attached form a 5- or 6-membered ring, or R² taken together with R³ and the nitrogen atom to which they are attached form a 5-, 6-, or 7-membered ring, Y¹ is C2-12 alkylene, Y² is selected from

[chemical structure]

[0660] n is 0 to 3, R⁴ is Ci-15 alkyl, Z¹ is Ci-6 alkylene or a direct bond,
[0661] Z² is

[chemical structure]

[0662] (in either orientation) or absent, provided that if Z¹ is a direct bond, Z² is absent;
[0663] R⁵ is C5-9 alkyl or C6-10 alkoxy, R⁶ is C5-9 alkyl or C6-10 alkoxy, W is methylene or a direct bond, and R⁷ is H or Me, or a salt thereof, provided that if R³ and R² are C2 alkyls, X¹ is O, X² is linear C3 alkylene, X³ is C(=0), Y¹ is linear Ce alkylene, (Y²)n-R⁴ is

[chemical structure]

[0664] R⁴ is linear C5 alkyl, Z¹ is C2 alkylene, Z² is absent, W is methylene, and R⁷ is H, then R⁵ and R⁶ are not Cx alkoxy.

[0665] In some embodiments an LNP comprising Formula (xii) is used to deliver a gene modifying composition described herein to the liver and/or hepatocyte cells.

[chemical structure]

[0666] In some embodiments an LNP comprising Formula (xi) is used to deliver a gene modifying composition described herein to the liver and/or hepatocyte cells.

[chemical structure]

where R=

[chemical structure]

[chemical structure]

[0667] In some embodiments an LNP comprises a compound of Formula (xiii) and a compound of Formula (xiv).

[chemical structure]

[0668] In some embodiments an LNP comprising Formula (xv) is used to deliver a gene modifying composition described herein to the liver and/or hepatocyte cells.

[chemical structure]

[0669] In some embodiments an LNP comprising a formulation of Formula (xvi) is used to deliver a gene modifying composition described herein to the lung endothelial cells.

[chemical structure]

[chemical structure]

[0670] In some embodiments, a lipid compound used to form lipid nanoparticles for the delivery of compositions described herein, e.g., nucleic acid (e.g., RNA) described herein (e.g., a template nucleic acid or a nucleic acid encoding a gene modifying polypeptide) is made by one of the following reactions:

[chemical structure]

[0671] Exemplary non-cationic lipids include, but are not limited to, distearoyl-sn-glycero-phosphoethanolamine, distearoylphosphatidylcholine (DSPC), dioleoylphosphatidylcholine (DOPC), dipalmitoylphosphatidylcholine (DPPC), dioleoylphosphatidylglycerol (DOPG), dipalmitoylphosphatidylglycerol (DPPG), dioleoyl-phosphatidylethanolamine (DOPE), 1,2-dioleoyl-sn-glycero-3-phosphoethanolamine (DOPE), palmitoyloleoylphosphatidylcholine (POPC), palmitoyloleoylphosphatidylethanolamine (POPE), dioleoyl-phosphatidylethanolamine 4-(N-maleimidomethyl)-cyclohexane-1-carboxylate (DOPE-mal), dipalmitoyl phosphatidyl ethanolamine (DPPE), dimyristoylphosphoethanolamine (DMPE), distearoyl-phosphatidyl-ethanolamine (DSPE), monomethyl-phosphatidylethanolamine (such as 16-O-monomethyl PE), dimethyl-phosphatidylethanolamine (such as 16-O-dimethyl PE), 18-1-trans PE, 1-stearoyl-2-oleoyl-phosphatidyethanolamine (SOPE), hydrogenated soy phosphatidylcholine (HSPC), egg phosphatidylcholine (EPC), dioleoylphosphatidylserine (DOPS), sphingomyelin (SM), dimyristoyl phosphatidylcholine (DMPC), dimyristoyl phosphatidylglycerol (DMPG), distearoylphosphatidylglycerol (DSPG), dierucoylphosphatidylcholine (DEPC), palmitoyloleyolphosphatidylglycerol (POPG), dielaidoyl-phosphatidylethanolamine (DEPE), lecithin, phosphatidylethanolamine, lysolecithin, lysophosphatidylethanolamine, phosphatidylserine, phosphatidylinositol, sphingomyelin, egg sphingomyelin (ESM), cephalin, cardiolipin, phosphatidicacid, cerebrosides, dicetylphosphate, lysophosphatidylcholine, dilinoleoylphosphatidylcholine, or mixtures thereof. It is understood that other diacylphosphatidylcholine and diacylphosphatidylethanolamine phospholipids can also be used. The acyl groups in these lipids are preferably acyl groups derived from fatty acids having C10-C24 carbon chains, e.g., lauroyl, myristoyl, paimitoyl, stearoyl, or oleoyl. Additional exemplary lipids, in certain embodiments, include, without limitation, those described in Kim et al. (2020) dx.doi.org/10.1021/acs.nanolett.0c01386, incorporated herein by reference. Such lipids include, in some embodiments, plant lipids found to improve liver transfection with mRNA (e.g., DGTS). In some embodiments, the non-cationic lipid may have the following structure,

[chemical structure]

[0672] Other examples of non-cationic lipids suitable for use in the lipid nanoparticles include, without limitation, nonphosphorous lipids such as, e.g., stearylamine, dodeeylamine, hexadecylamine, acetyl palmitate, glycerol ricinoleate, hexadecyl stereate, isopropyl myristate, amphoteric acrylic polymers, triethanolamine-lauryl sulfate, alkyl-aryl sulfate polyethyloxylated fatty acid amides, dioctadecyl dimethyl ammonium bromide, ceramide, sphingomyelin, and the like. Other non-cationic lipids are described in WO2017/099823 or US patent publication US2018/0028664, the contents of which is incorporated herein by reference in their entirety.

[0673] In some embodiments, the non-cationic lipid is oleic acid or a compound of Formula I, II, or IV of US2018/0028664, incorporated herein by reference in its entirety. The non-cationic lipid can comprise, for example, 0-30% (mol) of the total lipid present in the lipid nanoparticle. In some embodiments, the non-cationic lipid content is 5-20% (mol) or 10-15% (mol) of the total lipid present in the lipid nanoparticle. In embodiments, the molar ratio of ionizable lipid to the neutral lipid ranges from about 2:1 to about 8:1 (e.g., about 2:1, 3:1, 4:1, 5:1, 6:1, 7:1, or 8:1).

[0674] In some embodiments, the lipid nanoparticles do not comprise any phospholipids.

[0675] In some aspects, the lipid nanoparticle can further comprise a component, such as a sterol, to provide membrane integrity. One exemplary sterol that can be used in the lipid nanoparticle is cholesterol and derivatives thereof. Non-limiting examples of cholesterol derivatives include polar analogues such as 5a-choiestanol, 53-coprostanol, choiesteryl-(2′-hydroxy)-ethyl ether, choiesteryl-(4′-hydroxy)-butyl ether, and 6-ketocholestanol; non-polar analogues such as 5a-cholestane, cholestenone, 5a-cholestanone, 5p-cholestanone, and cholesteryl decanoate; and mixtures thereof. In some embodiments, the cholesterol derivative is a polar analogue, e.g., choiesteryl-(4′-hydroxy)-butyl ether. Exemplary cholesterol derivatives are described in PCT publication WO2009/127060 and US patent publication US2010/0130588, each of which is incorporated herein by reference in its entirety.

[0676] In some embodiments, the component providing membrane integrity, such as a sterol, can comprise 0-50% (mol) (e.g., 0-10%, 10-20%, 20-30%, 30-40%, or 40-50%) of the total lipid present in the lipid nanoparticle. In some embodiments, such a component is 20-50% (mol) 30-40% (mol) of the total lipid content of the lipid nanoparticle.

[0677] In some embodiments, the lipid nanoparticle can comprise a polyethylene glycol (PEG) or a conjugated lipid molecule. Generally, these are used to inhibit aggregation of lipid nanoparticles and/or provide steric stabilization. Exemplary conjugated lipids include, but are not limited to, PEG-lipid conjugates, polyoxazoline (POZ)-lipid conjugates, polyamide-lipid conjugates (such as ATTA-lipid conjugates), cationic-polymer lipid (CPL) conjugates, and mixtures thereof. In some embodiments, the conjugated lipid molecule is a PEG-lipid conjugate, for example, a (methoxy polyethylene glycol)-conjugated lipid.

[0678] Exemplary PEG-lipid conjugates include, but are not limited to, PEG-diacylglycerol (DAG) (such as 1-(monomethoxy-polyethyleneglycol)-2,3-dimyristoylglycerol (PEG-DMG)), PEG-dialkyloxypropyl (DAA), PEG-phospholipid, PEG-ceramide (Cer), a pegylated phosphatidylethanoloamine (PEG-PE), 1,2-dimyristoyl-sn-glycerol, methoxypoly ethylene glycol (DMG-PEG-2K), PEG succinate diacylglycerol (PEGS-DAG) (such as 4-0-(2′,3′-di(tetradecanoyloxy)propyl-l-0-(w-methoxy(polyethoxy)ethyl) butanedioate (PEG-S-DMG)), PEG dialkoxypropylcarbam, N-(carbonyl-methoxypolyethylene glycol 2000)-1,2-distearoyl-sn-glycero-3-phosphoethanolamine sodium salt, or a mixture thereof. Additional exemplary PEG-lipid conjugates are described, for example, in U.S. Pat. Nos. 5,885,613, 6,287,591, US2003/0077829, US2003/0077829, US2005/0175682, US2008/0020058, US2011/0117125, US2010/0130588, US2016/0376224, US2017/0119904, and US/099823, the contents of all of which are incorporated herein by reference in their entirety. In some embodiments, a PEG-lipid is a compound of Formula III, III-a-I, III-a-2, III-b-1, III-b-2, or V of US2018/0028664, the content of which is incorporated herein by reference in its entirety. In some embodiments, a PEG-lipid is of Formula II of US20150376115 or US2016/0376224, the content of both of which is incorporated herein by reference in its entirety. In some embodiments, the PEG-DAA conjugate can be, for example, PEG-dilauryloxypropyl, PEG-dimyristyloxypropyl, PEG-dipalmityloxypropyl, or PEG-distearyloxypropyl. The PEG-lipid can be one or more of PEG-DMG, PEG-dilaurylglycerol, PEG-dipalmitoylglycerol, PEG-disterylglycerol, PEG-dilaurylglycamide, PEG-dimyristylglycamide, PEG-dipalmitoylglycamide, PEG-disterylglycamide, PEG-cholesterol (1-[8′-(Cholest-5-en-3[beta]-oxy)carboxamido-3′,6′-dioxaoctanyl]carbamoyl-[omega]-methyl-poly(ethylene glycol), PEG-DMB (3,4-Ditetradecoxylbenzyl-[omega]-methyl-poly(ethylene glycol) ether), and 1,2-dimyristoyl-sn-glycero-3-phosphoethanolamine-N-[methoxy(polyethylene glycol)-2000]. In some embodiments, the PEG-lipid comprises PEG-DMG, 1,2-dimyristoyl-sn-glycero-3-phosphoethanolamine-N-[methoxy(polyethylene glycol)-2000]. In some embodiments, the PEG-lipid comprises a structure selected from:

[chemical structure]

[0679] In some embodiments, lipids conjugated with a molecule other than a PEG can also be used in place of PEG-lipid. For example, polyoxazoline (POZ)-lipid conjugates, polyamide-lipid conjugates (such as ATTA-lipid conjugates), and cationic-polymer lipid (GPL) conjugates can be used in place of or in addition to the PEG-lipid.

[0680] Exemplary conjugated lipids, i.e., PEG-lipids, (POZ)-lipid conjugates, ATTA-lipid conjugates and cationic polymer-lipids are described in the PCT and LIS patent applications listed in Table 2 of WO2019051289A9 and in WO2020106946A1, the contents of all of which are incorporated herein by reference in their entirety.

[0681] In some embodiments an LNP comprises a compound of Formula (xix), a compound of Formula (xxi) and a compound of Formula (xxv). In some embodiments an LNP comprising a formulation of Formula (xix), Formula (xxi) and Formula (xxv) is used to deliver a gene modifying composition described herein to the lung or pulmonary cells.

[0682] In some embodiments, a lipid nanoparticle may comprise one or more cationic lipids selected from Formula (i), Formula (ii), Formula (iii), Formula (vii), and Formula (ix). In some embodiments, the LNP may further comprise one or more neutral lipid, e.g., DSPC, DPPC, DMPC, DOPC, POPC, DOPE, SM, a steroid, e.g., cholesterol, and/or one or more polymer conjugated lipid, e.g., a pegylated lipid, e.g., PEG-DAG, PEG-PE, PEG-S-DAG, PEG-cer or a PEG dialkyoxypropylcarbamate.

[0683] In some embodiments, the PEG or the conjugated lipid can comprise 0-20% (mol) of the total lipid present in the lipid nanoparticle. In some embodiments, PEG or the conjugated lipid content is 0.5-10% or 2-5% (mol) of the total lipid present in the lipid nanoparticle. Molar ratios of the ionizable lipid, non-cationic-lipid, sterol, and PEG/conjugated lipid can be varied as needed. For example, the lipid particle can comprise 30-70% ionizable lipid by mole or by total weight of the composition, 0-60% cholesterol by mole or by total weight of the composition, 0-30% non-cationic-lipid by mole or by total weight of the composition and 1-10% conjugated lipid by mole or by total weight of the composition. Preferably, the composition comprises 30-40% ionizable lipid by mole or by total weight of the composition, 40-50% cholesterol by mole or by total weight of the composition, and 10-20% non-cationic-lipid by mole or by total weight of the composition. In some other embodiments, the composition is 50-75% ionizable lipid by mole or by total weight of the composition, 20-40% cholesterol by mole or by total weight of the composition, and 5 to 10% non-cationic-lipid, by mole or by total weight of the composition and 1-10% conjugated lipid by mole or by total weight of the composition. The composition may contain 60-70% ionizable lipid by mole or by total weight of the composition, 25-35% cholesterol by mole or by total weight of the composition, and 5-10% non-cationic-lipid by mole or by total weight of the composition. The composition may also contain up to 90% ionizable lipid by mole or by total weight of the composition and 2 to 15% non-cationic lipid by mole or by total weight of the composition. The formulation may also be a lipid nanoparticle formulation, for example comprising 8-30% ionizable lipid by mole or by total weight of the composition, 5-30% non-cationic lipid by mole or by total weight of the composition, and 0-20% cholesterol by mole or by total weight of the composition; 4-25% ionizable lipid by mole or by total weight of the composition, 4-25% non-cationic lipid by mole or by total weight of the composition, 2 to 25% cholesterol by mole or by total weight of the composition, 10 to 35% conjugate lipid by mole or by total weight of the composition, and 5% cholesterol by mole or by total weight of the composition; or 2-30% ionizable lipid by mole or by total weight of the composition, 2-30% non-cationic lipid by mole or by total weight of the composition, 1 to 15% cholesterol by mole or by total weight of the composition, 2 to 35% conjugate lipid by mole or by total weight of the composition, and 1-20% cholesterol by mole or by total weight of the composition; or even up to 90% ionizable lipid by mole or by total weight of the composition and 2-10% non-cationic lipids by mole or by total weight of the composition, or even 100% cationic lipid by mole or by total weight of the composition. In some embodiments, the lipid particle formulation comprises ionizable lipid, phospholipid, cholesterol and a PEG-ylated lipid in a molar ratio of 50:10:38.5:1.5. In some other embodiments, the lipid particle formulation comprises ionizable lipid, cholesterol and a PEG-ylated lipid in a molar ratio of 60:38.5:1.5.

[0684] In some embodiments, the lipid particle comprises ionizable lipid, non-cationic lipid (e.g. phospholipid), a sterol (e.g., cholesterol) and a PEG-ylated lipid, where the molar ratio of lipids ranges from 20 to 70 mole percent for the ionizable lipid, with a target of 40-60, the mole percent of non-cationic lipid ranges from 0 to 30, with a target of 0 to 15, the mole percent of sterol ranges from 20 to 70, with a target of 30 to 50, and the mole percent of PEG-ylated lipid ranges from 1 to 6, with a target of 2 to 5.

[0685] In some embodiments, the lipid particle comprises ionizable lipid/non-cationic-lipid/sterol/conjugated lipid at a molar ratio of 50:10:38.5:1.5.

[0686] In an aspect, the disclosure provides a lipid nanoparticle formulation comprising phospholipids, lecithin, phosphatidylcholine and phosphatidylethanolamine.

[0687] In some embodiments, one or more additional compounds can also be included. Those compounds can be administered separately or the additional compounds can be included in the lipid nanoparticles of the invention. In other words, the lipid nanoparticles can contain other compounds in addition to the nucleic acid or at least a second nucleic acid, different than the first. Without limitations, other additional compounds can be selected from the group consisting of small or large organic or inorganic molecules, monosaccharides, disaccharides, trisaccharides, oligosaccharides, polysaccharides, peptides, proteins, peptide analogs and derivatives thereof, peptidomimetics, nucleic acids, nucleic acid analogs and derivatives, an extract made from biological materials, or any combinations thereof.

[0688] In some embodiments, a lipid nanoparticle (or a formulation comprising lipid nanoparticles) lacks reactive impurities (e.g., aldehydes or ketones), or comprises less than a preselected level of reactive impurities (e.g., aldehydes or ketones). While not wishing to be bound by theory, in some embodiments, a lipid reagent is used to make a lipid nanoparticle formulation, and the lipid reagent may comprise a contaminating reactive impurity (e.g., an aldehyde or ketone). A lipid regent may be selected for manufacturing based on having less than a preselected level of reactive impurities (e.g., aldehydes or ketones). Without wishing to be bound by theory, in some embodiments, aldehydes can cause modification and damage of RNA, e.g., cross-linking between bases and/or covalently conjugating lipid to RNA (e.g., forming lipid-RNA adducts). This may, in some instances, lead to failure of a reverse transcriptase reaction and/or incorporation of inappropriate bases, e.g., at the site(s) of lesion(s), e.g., a mutation in a newly synthesized target DNA.

[0689] In some embodiments, a lipid nanoparticle formulation is produced using a lipid reagent comprising less than 5%, 4%, 3%, 2%, 1%, 0.9%, 0.8%, 0.7%, 0.6%, 0.5%, 0.4%, 0.3%, 0.2%, or 0.1% total reactive impurity (e.g., aldehyde) content. In some embodiments, a lipid nanoparticle formulation is produced using a lipid reagent comprising less than 5%, 4%, 3%, 2%, 1%, 0.9%, 0.8%, 0.7%, 0.6%, 0.5%, 0.4%, 0.3%, 0.2%, or 0.1% of any single reactive impurity (e.g., aldehyde) species. In some embodiments, a lipid nanoparticle formulation is produced using a lipid reagent comprising: (i) less than 5%, 4%, 3%, 2%, 1%, 0.9%, 0.8%, 0.7%, 0.6%, 0.5%, 0.4%, 0.3%, 0.2%, or 0.1% total reactive impurity (e.g., aldehyde) content; and (ii) less than 5%, 4%, 3%, 2%, 1%, 0.9%, 0.8%, 0.7%, 0.6%, 0.5%, 0.4%, 0.3%, 0.2%, or 0.1% of any single reactive impurity (e.g., aldehyde) species. In some embodiments, the lipid nanoparticle formulation is produced using a plurality of lipid reagents, and each lipid reagent of the plurality independently meets one or more criterion described in this paragraph. In some embodiments, each lipid reagent of the plurality meets the same criterion, e.g., a criterion of this paragraph.

[0690] In some embodiments, the lipid nanoparticle formulation comprises less than 5%, 4%, 3%, 2%, 1%, 0.9%, 0.8%, 0.7%, 0.6%, 0.5%, 0.4%, 0.3%, 0.2%, or 0.1% total reactive impurity (e.g., aldehyde) content. In some embodiments, the lipid nanoparticle formulation comprises less than 5%, 4%, 3%, 2%, 1%, 0.9%, 0.8%, 0.7%, 0.6%, 0.5%, 0.4%, 0.3%, 0.2%, or 0.1% of any single reactive impurity (e.g., aldehyde) species. In some embodiments, the lipid nanoparticle formulation comprises: (i) less than 5%, 4%, 3%, 2%, 1%, 0.9%, 0.8%, 0.7%, 0.6%, 0.5%, 0.4%, 0.3%, 0.2%, or 0.1% total reactive impurity (e.g., aldehyde) content; and (ii) less than 5%, 4%, 3%, 2%, 1%, 0.9%, 0.8%, 0.7%, 0.6%, 0.5%, 0.4%, 0.3%, 0.2%, or 0.1% of any single reactive impurity (e.g., aldehyde) species.

[0691] In some embodiments, one or more, or optionally all, of the lipid reagents used for a lipid nanoparticle as described herein or a formulation thereof comprise less than 5%, 4%, 3%, 2%, 1%, 0.9%, 0.8%, 0.7%, 0.6%, 0.5%, 0.4%, 0.3%, 0.2%, or 0.1% total reactive impurity (e.g., aldehyde) content. In some embodiments, one or more, or optionally all, of the lipid reagents used for a lipid nanoparticle as described herein or a formulation thereof comprise less than 5%, 4%, 3%, 2%, 1%, 0.9%, 0.8%, 0.7%, 0.6%, 0.5%, 0.4%, 0.3%, 0.2%, or 0.1% of any single reactive impurity (e.g., aldehyde) species. In some embodiments, one or more, or optionally all, of the lipid reagents used for a lipid nanoparticle as described herein or a formulation thereof comprise: (i) less than 5%, 4%, 3%, 2%, 1%, 0.9%, 0.8%, 0.7%, 0.6%, 0.5%, 0.4%, 0.3%, 0.2%, or 0.1% total reactive impurity (e.g., aldehyde) content; and (ii) less than 5%, 4%, 3%, 2%, 1%, 0.9%, 0.8%, 0.7%, 0.6%, 0.5%, 0.4%, 0.3%, 0.2%, or 0.1% of any single reactive impurity (e.g., aldehyde) species.

[0692] In some embodiments, total aldehyde content and/or quantity of any single reactive impurity (e.g., aldehyde) species is determined by liquid chromatography (LC), e.g., coupled with tandem mass spectrometry (MS/MS), e.g., according to the method described in Example 40 of PCT/US21/20948. In some embodiments, reactive impurity (e.g., aldehyde) content and/or quantity of reactive impurity (e.g., aldehyde) species is determined by detecting one or more chemical modifications of a nucleic acid molecule (e.g., an RNA molecule, e.g., as described herein) associated with the presence of reactive impurities (e.g., aldehydes), e.g., in the lipid reagents. In some embodiments, reactive impurity (e.g., aldehyde) content and/or quantity of reactive impurity (e.g., aldehyde) species is determined by detecting one or more chemical modifications of a nucleotide or nucleoside (e.g., a ribonucleotide or ribonucleoside, e.g., comprised in or isolated from a template nucleic acid, e.g., as described herein) associated with the presence of reactive impurities (e.g., aldehydes), e.g., in the lipid reagents, e.g., according to the method described in Example 41 of PCT/US21/20948. In embodiments, chemical modifications of a nucleic acid molecule, nucleotide, or nucleoside are detected by determining the presence of one or more modified nucleotides or nucleosides, e.g., using LC-MS/MS analysis, e.g., according to the method described in Example 41 of PCT/US21/20948.

[0693] In some embodiments, a nucleic acid (e.g., RNA) described herein (e.g., a template nucleic acid or a nucleic acid encoding a gene modifying polypeptide) does not comprise an aldehyde modification, or comprises less than a preselected amount of aldehyde modifications. In some embodiments, on average, a nucleic acid has less than 50, 20, 10, 5, 2, or 1 aldehyde modifications per 1000 nucleotides, e.g., wherein a single cross-linking of two nucleotides is a single aldehyde modification. In some embodiments, the aldehyde modification is an RNA adduct (e.g., a lipid-RNA adduct). In some embodiments, the aldehyde-modified nucleotide is cross-linking between bases. In some embodiments, a nucleic acid (e.g., RNA) described herein comprises less than 50, 20, 10, 5, 2, or 1 cross-links between nucleotide.

[0694] In some embodiments, LNPs are directed to specific tissues by the addition of targeting domains. For example, biological ligands may be displayed on the surface of LNPs to enhance interaction with cells displaying cognate receptors, thus driving association with and cargo delivery to tissues wherein cells express the receptor. In some embodiments, the biological ligand may be a ligand that drives delivery to the liver, e.g., LNPs that display GalNAc result in delivery of nucleic acid cargo to hepatocytes that display asialoglycoprotein receptor (ASGPR). The work of Akinc et al. Mol Ther 18(7):1357-1364 (2010) teaches the conjugation of a trivalent GalNAc ligand to a PEG-lipid (GalNAc-PEG-DSG) to yield LNPs dependent on ASGPR for observable LNP cargo effect (see, e.g., FIG. 6 therein). Other ligand-displaying LNP formulations, e.g., incorporating folate, transferrin, or antibodies, are discussed in WO2017223135, which is incorporated herein by reference in its entirety, in addition to the references used therein, namely Kolhatkar et al., Curr Drug Discov Technol. 2011 8:197-206; Musacchio and Torchilin, Front Biosci. 2011 16:1388-1412; Yu et al., Mol Membr Biol. 2010 27:286-298; Patil et al., Crit Rev Ther Drug Carrier Syst. 2008 25:1-61; Benoit et al., Biomacromolecules. 2011 12:2708-2714; Zhao et al., Expert Opin Drug Deliv. 2008 5:309-319; Akinc et al., Mol Ther. 2010 18:1357-1364; Srinivasan et al., Methods Mol Biol. 2012 820:105-116; Ben-Arie et al., Methods Mol Biol. 2012 757:497-507; Peer 2010 J Control Release. 20:63-68; Peer et al., Proc Natl Acad Sci USA. 2007 104:4095-4100; Kim et al., Methods Mol Biol. 2011 721:339-353; Subramanya et al., Mol Ther. 2010 18:2028-2037; Song et al., Nat Biotechnol. 2005 23:709-717; Peer et al., Science. 2008 319:627-630; and Peer and Lieberman, Gene Ther. 2011 18:1127-1133.

[0695] In some embodiments, LNPs are selected for tissue-specific activity by the addition of a Selective ORgan Targeting (SORT) molecule to a formulation comprising traditional components, such as ionizable cationic lipids, amphipathic phospholipids, cholesterol and poly(ethylene glycol) (PEG) lipids. The teachings of Cheng et al. Nat Nanotechnol 15(4):313-320 (2020) demonstrate that the addition of a supplemental “SORT” component precisely alters the in vivo RNA delivery profile and mediates tissue-specific (e.g., lungs, liver, spleen) gene delivery and editing as a function of the percentage and biophysical property of the SORT molecule.

[0696] In some embodiments, the LNPs comprise biodegradable, ionizable lipids. In some embodiments, the LNPs comprise (9Z,12Z)-3-((4,4-bis(octyloxy)butanoyl)oxy)-2-((((3-(diethylamino)propoxy)carbonyl)oxy)methyl)propyl octadeca-9,12-dienoate, also called 3-((4,4-bis(octyloxy)butanoyl)oxy)-2-((((3-(diethylamino)propoxy)carbonyl)oxy)methyl)propyl (9Z,12Z)-octadeca-9,12-dienoate) or another ionizable lipid. See, e.g, lipids of WO2019/067992, WO/2017/173054, WO2015/095340, and WO2014/136086, as well as references provided therein. In some embodiments, the term cationic and ionizable in the context of LNP lipids is interchangeable, e.g., wherein ionizable lipids are cationic depending on the pH.

[0697] In some embodiments, an LNP described herein comprises a lipid described in Table 19

| | Chemical | Molecular | |
|---|---|---|---|
| LIPID ID | Name | Weight | Structure |
| LIPIDV003 | (9Z,12Z)-3- ((4,4- bis(octyloxy) butanoyl)oxy)- 2-((((3- (diethylamino) propoxy) carbonyl) oxy)methyl) propyl octadeca-9, 12- dienoate | 852.29 | [chemical structure] |
| LIPIDV004 | Heptadecan- 9-yl 8-((2- hydroxyethyl) (8-(nonyloxy)- 8- oxooctyl) amino)octanoate | 710.18 | [chemical structure] |
| LIPIDV005 | | 919.56 | [chemical structure] |

[0698] In some embodiments, multiple components of a gene modifying system may be prepared as a single LNP formulation, e.g., an LNP formulation comprises mRNA encoding for the gene modifying polypeptide and an RNA template. Ratios of nucleic acid components may be varied in order to maximize the properties of a therapeutic. In some embodiments, the ratio of RNA template to mRNA encoding a gene modifying polypeptide is about 1:1 to 100:1, e.g., about 1:1 to 20:1, about 20:1 to 40:1, about 40:1 to 60:1, about 60:1 to 80:1, or about 80:1 to 100:1, by molar ratio. In other embodiments, a system of multiple nucleic acids may be prepared by separate formulations, e.g., one LNP formulation comprising a template RNA and a second LNP formulation comprising an mRNA encoding a gene modifying polypeptide. In some embodiments, the system may comprise more than two nucleic acid components formulated into LNPs. In some embodiments, the system may comprise a protein, e.g., a gene modifying polypeptide, and a template RNA formulated into at least one LNP formulation.

[0699] In some embodiments, the average LNP diameter of the LNP formulation may be between 10s of nm and 100s of nm, e.g., measured by dynamic light scattering (DLS). In some embodiments, the average LNP diameter of the LNP formulation may be from about 40 nm to about 150 nm, such as about 40 nm, 45 nm, 50 nm, 55 nm, 60 nm, 65 nm, 70 nm, 75 nm, 80 nm, 85 nm, 90 nm, 95 nm, 100 nm, 105 nm, 110 nm, 115 nm, 120 nm, 125 nm, 130 nm, 135 nm, 140 nm, 145 nm, or 150 nm. In some embodiments, the average LNP diameter of the LNP formulation may be from about 50 nm to about 100 nm, from about 50 nm to about 90 nm, from about 50 nm to about 80 nm, from about 50 nm to about 70 nm, from about 50 nm to about 60 nm, from about 60 nm to about 100 nm, from about 60 nm to about 90 nm, from about 60 nm to about 80 nm, from about 60 nm to about 70 nm, from about 70 nm to about 100 nm, from about 70 nm to about 90 nm, from about 70 nm to about 80 nm, from about 80 nm to about 100 nm, from about 80 nm to about 90 nm, or from about 90 nm to about 100 nm. In some embodiments, the average LNP diameter of the LNP formulation may be from about 70 nm to about 100 nm. In a particular embodiment, the average LNP diameter of the LNP formulation may be about 80 nm. In some embodiments, the average LNP diameter of the LNP formulation may be about 100 nm. In some embodiments, the average LNP diameter of the LNP formulation ranges from about 1 mm to about 500 mm, from about 5 mm to about 200 mm, from about 10 mm to about 100 mm, from about 20 mm to about 80 mm, from about 25 mm to about 60 mm, from about 30 mm to about 55 mm, from about 35 mm to about 50 mm, or from about 38 mm to about 42 mm.

[0700] An LNP may, in some instances, be relatively homogenous. A polydispersity index may be used to indicate the homogeneity of an LNP, e.g., the particle size distribution of the lipid nanoparticles. A small (e.g., less than 0.3) polydispersity index generally indicates a narrow particle size distribution. An LNP may have a polydispersity index from about 0 to about 0.25, such as 0.01, 0.02, 0.03, 0.04, 0.05, 0.06, 0.07, 0.08, 0.09, 0.10, 0.11, 0.12, 0.13, 0.14, 0.15, 0.16, 0.17, 0.18, 0.19, 0.20, 0.21, 0.22, 0.23, 0.24, or 0.25. In some embodiments, the polydispersity index of an LNP may be from about 0.10 to about 0.20.

[0701] The zeta potential of an LNP may be used to indicate the electrokinetic potential of the composition. In some embodiments, the zeta potential may describe the surface charge of an LNP. Lipid nanoparticles with relatively low charges, positive or negative, are generally desirable, as more highly charged species may interact undesirably with cells, tissues, and other elements in the body. In some embodiments, the zeta potential of an LNP may be from about −10 mV to about +20 mV, from about −10 mV to about +15 mV, from about −10 mV to about +10 mV, from about −10 mV to about +5 mV, from about −10 mV to about 0 mV, from about −10 mV to about −5 mV, from about −5 mV to about +20 mV, from about −5 mV to about +15 mV, from about −5 mV to about +10 mV, from about −5 mV to about +5 mV, from about −5 mV to about 0 mV, from about 0 mV to about +20 mV, from about 0 mV to about +15 mV, from about 0 mV to about +10 mV, from about 0 mV to about +5 mV, from about +5 mV to about +20 mV, from about +5 mV to about +15 mV, or from about +5 mV to about +10 mV.

[0702] The efficiency of encapsulation of a protein and/or nucleic acid, e.g., gene modifying polypeptide or mRNA encoding the polypeptide, describes the amount of protein and/or nucleic acid that is encapsulated or otherwise associated with an LNP after preparation, relative to the initial amount provided. The encapsulation efficiency is desirably high (e.g., close to 100%). The encapsulation efficiency may be measured, for example, by comparing the amount of protein or nucleic acid in a solution containing the lipid nanoparticle before and after breaking up the lipid nanoparticle with one or more organic solvents or detergents. An anion exchange resin may be used to measure the amount of free protein or nucleic acid (e.g., RNA) in a solution. Fluorescence may be used to measure the amount of free protein and/or nucleic acid (e.g., RNA) in a solution. For the lipid nanoparticles described herein, the encapsulation efficiency of a protein and/or nucleic acid may be at least 50%, for example 50%, 55%, 60%, 65%, 70%, 75%, 80%, 85%, 90%, 91%, 92%, 93%, 94%, 95%, 96%, 97%, 98%, 99%, or 100%. In some embodiments, the encapsulation efficiency may be at least 80%. In some embodiments, the encapsulation efficiency may be at least 90%. In some embodiments, the encapsulation efficiency may be at least 95%.

[0703] An LNP may optionally comprise one or more coatings. In some embodiments, an LNP may be formulated in a capsule, film, or table having a coating. A capsule, film, or tablet including a composition described herein may have any useful size, tensile strength, hardness or density.

[0704] Additional exemplary lipids, formulations, methods, and characterization of LNPs are taught by WO2020061457, which is incorporated herein by reference in its entirety.

[0705] In some embodiments, in vitro or ex vivo cell lipofections are performed using Lipofectamine MessengerMax (Thermo Fisher) or TransIT-mRNA Transfection Reagent (Mirus Bio). In certain embodiments, LNPs are formulated using the GenVoy_ILM ionizable lipid mix (Precision NanoSystems). In certain embodiments, LNPs are formulated using 2,2-dilinoleyl-4-dimethylaminoethyl-[1,3]-dioxolane (DLin-KC2-DMA) or dilinoleylmethyl-4-dimethylaminobutyrate (DLin-MC3-DMA or MC3), the formulation and in vivo use of which are taught in Jayaraman et al. Angew Chem Int Ed Engl 51(34):8529-8533 (2012), incorporated herein by reference in its entirety.

[0706] LNP formulations optimized for the delivery of CRISPR-Cas systems, e.g., Cas9-gRNA RNP, gRNA, Cas9 mRNA, are described in WO2019067992 and WO2019067910, both incorporated by reference.

[0707] Additional specific LNP formulations useful for delivery of nucleic acids are described in U.S. Pat. Nos. 8,158,601 and 8,168,775, both incorporated by reference, which include formulations used in patisiran, sold under the name ONPATTRO.

[0708] Exemplary dosing of gene modifying LNP may include about 0.1, 0.25, 0.3, 0.5, 1, 2, 3, 4, 5, 6, 8, 10, or 100 mg/kg (RNA). Exemplary dosing of AAV comprising a nucleic acid encoding one or more components of the system may include an MOI of about 10¹¹, 10¹², 10¹³, and 10¹⁴ vg/kg.

### Kits, Articles of Manufacture, and Pharmaceutical Compositions

[0709] In an aspect the disclosure provides a kit comprising a gene modifying polypeptide or a gene modifying system, e.g., as described herein. In some embodiments, the kit comprises a gene modifying polypeptide (or a nucleic acid encoding the polypeptide) and a template RNA (or DNA encoding the template RNA). In some embodiments, the kit further comprises a reagent for introducing the system into a cell, e.g., transfection reagent, LNP, and the like. In some embodiments, the kit is suitable for any of the methods described herein. In some embodiments, the kit comprises one or more elements, compositions (e.g., pharmaceutical compositions), gene modifying polypeptides, and/or gene modifying systems, or a functional fragment or component thereof, e.g., disposed in an article of manufacture. In some embodiments, the kit comprises instructions for use thereof.

[0710] In an aspect, the disclosure provides an article of manufacture, e.g., in which a kit as described herein, or a component thereof, is disposed.

[0711] In an aspect, the disclosure provides a pharmaceutical composition comprising a gene modifying polypeptide or a gene modifying system, e.g., as described herein. In some embodiments, the pharmaceutical composition further comprises a pharmaceutically acceptable carrier or excipient. In some embodiments, the pharmaceutical composition comprises a template RNA and/or an RNA encoding the polypeptide. In embodiments, the pharmaceutical composition has one or more (e.g., 1, 2, 3, or 4) of the following characteristics:
[0712] (a) less than 1% (e.g., less than 0.5%, 0.4%, 0.3%, 0.2%, or 0.1%) DNA template relative to the template RNA and/or the RNA encoding the polypeptide, e.g., on a molar basis;
[0713] (b) less than 1% (e.g., less than 0.5%, 0.4%, 0.3%, 0.2%, or 0.1%) uncapped RNA relative to the template RNA and/or the RNA encoding the polypeptide, e.g., on a molar basis;
[0714] (c) less than 1% (e.g., less than 0.5%, 0.4%, 0.3%, 0.2%, or 0.1%) partial length RNAs relative to the template RNA and/or the RNA encoding the polypeptide, e.g., on a molar basis;
[0715] (d) substantially lacks unreacted cap dinucleotides.
   i)

### Chemistry, Manufacturing, and Controls (CMC)

[0716] Purification of protein therapeutics is described, for example, in Franks, Protein Biotechnology: Isolation, Characterization, and Stabilization, Humana Press (2013); and in Cutler, Protein Purification Protocols (Methods in Molecular Biology), Humana Press (2010).

[0717] In some embodiments, a gene modifying system, polypeptide, and/or template nucleic acid (e.g., template RNA) conforms to certain quality standards. In some embodiments, a gene modifying system, polypeptide, and/or template nucleic acid (e.g., template RNA) produced by a method described herein conforms to certain quality standards. Accordingly, the disclosure is directed, in some aspects, to methods of manufacturing a gene modifying system, polypeptide, and/or template nucleic acid (e.g., template RNA) that conforms to certain quality standards, e.g., in which said quality standards are assayed. The disclosure is also directed, in some aspects, to methods of assaying said quality standards in a gene modifying system, polypeptide, and/or template nucleic acid (e.g., template RNA). In some embodiments, quality standards include, but are not limited to, one or more (e.g., 1, 2, 3, 4, 5, 6, 7, 8, 9, 10, 11, or 12) of the following:
[0718] (i) the length of the template RNA, e.g., whether the template RNA has a length that is above a reference length or within a reference length range, e.g., whether at least 80%, 85%, 90%, 95%, 96%, 97%, 98%, or 99% of the template RNA present is greater than 100, 125, 150, 175, or 200 nucleotides long;
[0719] (ii) the presence, absence, and/or length of a polyA tail on the template RNA, e.g., whether at least 80%, 85%, 90%, 95%, 96%, 97%, 98%, or 99% of the template RNA present contains a polyA tail (e.g., a polyA tail that is at least 5, 10, 20, 30, 50, 70, 100 nucleotides in length (SEQ ID NO: 21648));
[0720] (iii) the presence, absence, and/or type of a 5′ cap on the template RNA, e.g., whether at least 80%, 85%, 90%, 95%, 96%, 97%, 98%, or 99% of the template RNA present contains a 5′ cap, e.g., whether that cap is a 7-methylguanosine cap, e.g., a O-Me-m7G cap; (iv) the presence, absence, and/or type of one or more modified nucleotides (e.g., selected from pseudouridine, dihydrouridine, inosine, 7-methylguanosine, 1-N-methylpseudouridine (1-Me-Ψ), 5-methoxyuridine (5-MO-U), 5-methylcytidine (5mC), or a locked nucleotide) in the template RNA, e.g., whether at least 80%, 85%, 90%, 95%, 96%, 97%, 98%, or 99% of the template RNA present contains one or more modified nucleotides;
[0721] (v) the stability of the template RNA (e.g., over time and/or under a pre-selected condition), e.g., whether at least 80%, 85%, 90%, 95%, 96%, 97%, 98%, or 99% of the template RNA remains intact (e.g., greater than 100, 125, 150, 175, or 200 nucleotides long) after a stability test;
[0722] (vi) the potency of the template RNA in a system for modifying DNA, e.g., whether at least 1% of target sites are modified after a system comprising the template RNA is assayed for potency;
[0723] (vii) the length of the polypeptide, first polypeptide, or second polypeptide, e.g., whether the polypeptide, first polypeptide, or second polypeptide has a length that is above a reference length or within a reference length range, e.g., whether at least 80%, 85%, 90%, 95%, 96%, 97%, 98%, or 99% of the polypeptide, first polypeptide, or second polypeptide present is greater than 600, 650, 700, 750, 800, 850, 900, 950, 1000, 1050, 1100, 1150, 1200, 1250, 1300, 1350, 1400, 1450, 1500, 1600, 1700, 1800, 1900, or 2000 amino acids long (and optionally, no larger than 2500, 2000, 1500, 1400, 1300, 1200, 1100, 1000, 900, 800, 700, or 600 amino acids long);
[0724] (viii) the presence, absence, and/or type of post-translational modification on the polypeptide, first polypeptide, or second polypeptide, e.g., whether at least 80, 85, 90, 95, 96, 97, 98, or 99% of the polypeptide, first polypeptide, or second polypeptide contains phosphorylation, methylation, acetylation, myristoylation, palmitoylation, isoprenylation, glipyatyon, or lipoylation, or any combination thereof;
[0725] (ix) the presence, absence, and/or type of one or more artificial, synthetic, or non-canonical amino acids (e.g., selected from ornithine, β-alanine, GABA, δ-Aminolevulinic acid, PABA, a D-amino acid (e.g., D-alanine or D-glutamate), aminoisobutyric acid, dehydroalanine, cystathionine, lanthionine, Djenkolic acid, Diaminopimelic acid, Homoalanine, Norvaline, Norleucine, Homonorleucine, homoserine, O-methyl-homoserine and O-ethyl-homoserine, ethionine, selenocysteine, selenohomocysteine, selenomethionine, selenoethionine, tellurocysteine, or telluromethionine) in the polypeptide, first polypeptide, or second polypeptide, e.g., whether at least 80%, 85%, 90%, 95%, 96%, 97%, 98%, or 99% of the polypeptide, first polypeptide, or second polypeptide present contains one or more artificial, synthetic, or non-canonical amino acids;
[0726] (x) the stability of the polypeptide, first polypeptide, or second polypeptide (e.g., over time and/or under a pre-selected condition), e.g., whether at least 80%, 85%, 90%, 95%, 96%, 97%, 98%, or 99% of the polypeptide, first polypeptide, or second polypeptide remains intact (e.g., greater than 600, 650, 700, 750, 800, 850, 900, 950, 1000, 1050, 1100, 1150, 1200, 1250, 1300, 1350, 1400, 1450, 1500, 1600, 1700, 1800, 1900, or 2000 amino acids long (and optionally, no larger than 2500, 2000, 1500, 1400, 1300, 1200, 1100, 1000, 900, 800, 700, or 600 amino acids long)) after a stability test;
[0727] (xi) the potency of the polypeptide, first polypeptide, or second polypeptide in a system for modifying DNA, e.g., whether at least 1% of target sites are modified after a system comprising the polypeptide, first polypeptide, or second polypeptide is assayed for potency; or
[0728] (xii) the presence, absence, and/or level of one or more of a pyrogen, virus, fungus, bacterial pathogen, or host cell protein, e.g., whether the system is free or substantially free of pyrogen, virus, fungus, bacterial pathogen, or host cell protein contamination.

[0729] In some embodiments, a system or pharmaceutical composition described herein is endotoxin free.

[0730] In some embodiments, the presence, absence, and/or level of one or more of a pyrogen, virus, fungus, bacterial pathogen, and/or host cell protein is determined. In embodiments, whether the system is free or substantially free of pyrogen, virus, fungus, bacterial pathogen, and/or host cell protein contamination is determined.

[0731] In some embodiments, a pharmaceutical composition or system as described herein has one or more (e.g., 1, 2, 3, or 4) of the following characteristics:
[0732] (a) less than 1% (e.g., less than 0.5%, 0.4%, 0.3%, 0.2%, or 0.1%) DNA template relative to the template RNA and/or the RNA encoding the polypeptide, e.g., on a molar basis;
[0733] (b) less than 1% (e.g., less than 0.5%, 0.4%, 0.3%, 0.2%, or 0.1%) uncapped RNA relative to the template RNA and/or the RNA encoding the polypeptide, e.g., on a molar basis;
[0734] (c) less than 1% (e.g., less than 0.5%, 0.4%, 0.3%, 0.2%, or 0.1%) partial length RNAs relative to the template RNA and/or the RNA encoding the polypeptide, e.g., on a molar basis;
[0735] (d) substantially lacks unreacted cap dinucleotides.

### EXAMPLES

### Example 1: Trans-Recruitment of an RNA Template for RNA-Based Gene Modification

[0736] This example describes the use of an exemplary three (3)-component RNA gene modifying system for the targeted editing of a sequence in the human genome (FIG. 1). More specifically, in this exemplary system, a (1) gene modifying polypeptide binds (2) a guide RNA molecule and (3) a trans-template RNA molecule, together forming a gene modifying complex, which binds and nicks the target locus and performs templated incorporation of the desired edit in one strand of the genomic DNA. Host repair pathways cause the incorporation of the edit in the second strand, and ligation of the DNA nick. This example further describes the introduction of the 3-component system to mammalian cells for in vitro gene modifying as a means of evaluating the efficacy of various gene modifying system configurations and trans-template RNA recruitment interactions on editing activity in human cells.

### 1) Gene Modifying Polypeptide:

The gene modifying polypeptide of this exemplary system includes:
[0737] 1. a Cas-nuclease with one endonuclease domain inactivated (e.g. Spy N863A Cas9),
[0738] 2. a reverse transcriptase (RT), and
[0739] 3. an RNA binding protein (RBP; as in Table 31). The RBP may be repeated 1-5 times in tandem with or without intervening peptide linker sequences.
   These 3 domains are brought together either by covalent linkage using (1) peptide linkers, as in Table 32 (FIG. 2A), or (2) intein pairs, as in Table 33, or (3) by the dimerization of two fusion domains (FDs) that (a) is induced by chemical binding or specific wavelengths of light Table 34, or (b) occurs intrinsically in a ligand-free interaction Tables 35 and 36 (FIG. 2B). The FDs may be repeated, in some instances, 1-30 times in tandem with or without intervening peptide linker sequences.

[0740] The 3 domains can be assembled in any of the following configurations, where the linkers indicated below can optionally be replaced with intein- or FD-pairs:
[0741] Cas9-linker-RT-linker-(RBP)ₙ
[0742] RT-linker-Cas9-linker-(RBP)ₙ
[0743] (RBP)ₙ-linker-Cas9-linker-RT
[0744] (RBP)ₙ-linker-RT-linker-Cas9
[0745] Cas9-linker (RBP)ₙ-linker-RT
[0746] RT-linker-(RBP)ₙ-linker-Cas9
[0747] Cas9-linker-RT

### 2) Guide RNA:

The guide RNA (gRNA) molecule (5′-GCCGAAGCACTGCACGCCGTGTTTTAGAGCTAGAAATAGCAAGTTAAAATAAGGCTAGTCCGTT ATCAACTTGAAAAAGTGGCACCGAGTCGGTGC-3′; SEQ ID NO: 16,701) binds Cas9 and contains a pro-spacer sequence complementary to the target locus, resulting in localization of the gene modifying complex to the target genomic locus.

### 3) Trans-template RNA:

An exemplary trans-template RNA (ttRNA) molecule contains a PBS-template region, 3′ to 5′, as below (and as diagrammed in FIG. 3A-3B):
[0748] 1. a 1-17 nt primer binding site (PBS; as in Table 37) that basepairs with the nicked DNA strand allowing primer extension of the nicked DNA, followed immediately by
[0749] 2. a 0-20 nt region of homology with the target locus (homology 1; as in Table 38, “homology 1”)
[0750] 3. the desired modification to the genome—insertion, deletion, or substitution (edit; as in Table 38, “edit”)
[0751] 4. a 0-500 nt region of homology with the target locus (homology 2; as in Table 39, “homology 2”).
   The exemplary ttRNA additionally includes:
[0752] 5. an RBP recruitment site (RRS; as in Table 40). The RRS may be repeated 1-5 times, e.g., 1-4 times, in tandem with or without intervening RNA linker sequences.
   The exemplary ttRNA may optionally also include:
[0753] 6. an end-protecting RNA secondary structure (end block; as in Table 41) that protects the ttRNA molecule from exonuclease-mediated degradation.
   These components of the ttRNA may be assembled in any of the below configurations, where the RRSs may be joined to the PBS-template by an RNA linker sequence of up to 20 nts (the longest sequence being 5′-ACTAACATACAACTAACATA-3′ (SEQ ID NO: 21366)):
[0754] (RRS)ₙ-linker-PBS-template
[0755] (RRS)ₙ-linker-PBS-template-end block
   [0756] PBS-template-linker-(RRS)ₙ
   [0757] end-block-PBS-template-linker-(RRS)ₙ
[0758] endblock-(RRS)ₙ-linker-PBS-template
[0759] endblock-(RRS)ₙ-linker-PBS-template-end block
   [0760] PBS-template-linker-(RRS)ₙ-end block
   [0761] end-block-PBS-template-linker-(RRS)ₙ-end block

### Evaluation of 3-Component Trans-Gene Modifying System Configurations:

### Method 1:

[0762] To determine the genome-editing capacity of the various configurations of the trans-gene modifying complex, mammalian HEK293T or U2OS cell lines are generated carrying a genomic landing pad that expresses one of the following (as in Table 42):
[0763] i. BFP-GFP SNP reporter line: a BFP-expressing cell line, which is converted to a GFP-expressing cell line via a single base pair substitution;
[0764] ii. 250 bp GFP insertion reporter line: a non-fluorescent partially-deleted-GFP cell line, in which GFP-expression is restored via a 250 bp insertion of the deleted coding sequence; or
[0765] iii. mCherry insertion reporter line: a GFP-expressing cell line, which loses GFP-expression and gains mCherry expression via the interruption of the GFP coding sequence with a >750 bp insertion that introduces the mCherry coding sequence.
   The gene modifying polypeptide is introduced into these cells by transfection of DNA plasmid or mRNA, or by packaging of DNA plasmid into Lentivirus. Cells containing the gene modifying polypeptide are then transfected/electroporated with a ttRNA-expressing DNA plasmid or ncRNA, and a gRNA-expressing DNA plasmid or ncRNA that are together designed to:
[0766] i. BFP-GFP SNP reporter line: convert BFP-to-GFP;
[0767] ii. 250 bp GFP insertion reporter line: restore the GFP coding sequence; or
[0768] iii. mCherry insertion reporter line: interrupt the GFP coding sequence with an mCherry coding sequence.
   To assess the genome-editing capacity of the trans-gene modifying system configurations, cells are analyzed by flow cytometry 4-10 days post-transfection/electroporation of ttRNA and gRNA. The fidelity of the edits are also assessed by collecting genomic DNA 3-10 days post-transfection/electroporation of the ttRNA and gRNA. The frequency of the intended versus unintended mutations at target loci are analyzed by amplicon sequencing.

### Method 2:

### Evaluation of 3-Component Trans-Gene Modifying System Configurations:

[0769] To determine the genome-editing capacity of the various configurations of the trans-gene modifying complex, mammalian HEK293T or U2OS cell lines are generated carrying a genomic landing pad that expresses one of the following (as in Table 42):
[0770] i. BFP-GFP SNP reporter line: a BFP-expressing cell line, which is converted to a GFP-expressing cell line via a single base pair substitution;
[0771] ii. 150 or 250 bp GFP insertion reporter line: a non-fluorescent partially-deleted-GFP cell line, in which GFP-expression is restored via a 150 or 250 bp insertion of the deleted coding sequence; or
[0772] iii. mKate2 or mCherry insertion reporter line: a GFP-expressing cell line, which loses GFP-expression and gains mKate2 or mCherry expression via the interruption of the GFP coding sequence with a >700 (e.g., >700 or >750) bp insertion that introduces the mKate2 or mCherry coding sequence.
   The gene modifying polypeptide is introduced into these cells by transfection of DNA plasmid or mRNA, or by packaging of DNA plasmid into Lentivirus. The cells are additionally co-transfected/electroporated with a ttRNA-expressing DNA plasmid or ncRNA, and a gRNA-expressing DNA plasmid or ncRNA that are together designed to:
[0773] i. BFP-GFP SNP reporter line: convert BFP-to-GFP;
   [0774] ii. 150 or 250 bp GFP insertion reporter line: restore the GFP coding sequence; or
   [0775] iii. mKate2 or mCherry insertion reporter line: interrupt the GFP coding sequence with an mKate2 or mCherry coding sequence.
      To assess the genome-editing capacity of the trans-gene modifying system configurations, cells are analyzed by flow cytometry 4-10 days post-transfection/electroporation of ttRNA and gRNA. The fidelity of the edits are also assessed by collecting genomic DNA 3-10 days post-transfection/electroporation of the ttRNA and gRNA. The frequency of the intended versus unintended mutations at target loci are analyzed by amplicon sequencing.

### Example 2: Trans-Recruitment of an RNA Template for RNA-Based Gene Modifying Via Engagement of the Second DNA Strand by a Cas9-Complex

[0776] This example describes the use of a four to five (4-5) component RNA-based gene modifying system for the targeted editing of a sequence in the human genome (FIGS. 4A-4B). More specifically, a (1) gene modifying polypeptide binds (2) a guide RNA molecule and (3) a trans-template RNA molecule, together forming a gene modifying complex, which binds and nicks the target locus and performs templated incorporation of the desired edit in one strand of the genomic DNA. An additional (4) Cas9 (e.g., a dCas9 or nCas9 domain (FIG. 4A) or such a domain as part of a second gene modifying polypeptide (FIG. 4B) molecule is recruited to the nicked DNA strand by the trans-template RNA (e.g., by an end block containing a 5′ pro-spacer), or by (5) its species-matched guide RNA. The second Cas9-complex may extend the bubble and facilitate large insertions, and may also be used to introduce a nick on the second strand to initiate second strand synthesis, and/or signal to the cell's endogenous repair system (e.g., mismatch repair system) that the edited strand should be copied and maintained. This example further describes the introduction of the 4-5 component system to mammalian cells for in vitro gene modifying as a means of evaluating the efficacy of various gene modifying system configurations and trans-template RNA recruitment interactions on editing activity in human cells.

### 1) Gene Modifying Polypeptide:

The gene modifying polypeptide includes:
[0777] 1. a Cas-nuclease with one endonuclease domain inactivated (e.g. Spy N863A Cas9),
[0778] 2. a reverse transcriptase (RT), and
[0779] 3. an RNA binding protein (RBP; as in Table 31). The RBP may be repeated 1-5 times in tandem with or without intervening peptide linker sequences.
   These 3 domains are brought together either by covalent linkage using (1) peptide linkers, as in Table 32, or (2) intein pairs, as in Table 33, or by the dimerization of two fusion domains (FDs) that (a) is induced by chemical binding or or specific wavelengths of light Table 34, or (b) occurs intrinsically in a ligand-free interaction Tables 35 and 36. The FDs may, in some instances, be repeated 1-30 times in tandem with or without intervening peptide linker sequences.

[0780] The 3 domains can be assembled in any of the following configurations, where the linkers indicated below can, in some instances, be replaced with intein- or FD-pairs.:
[0781] Cas9-linker-RT-linker-(RBP)ₙ
[0782] RT-linker-Cas9-linker-(RBP)ₙ
[0783] (RBP)ₙ-linker-Cas9-linker-RT
[0784] (RBP)ₙ-linker-RT-linker-Cas9
[0785] Cas9-linker (RBP)ₙ-linker-RT
[0786] RT-linker-(RBP)ₙ-linker-Cas9
[0787] Cas9-linker-RT

### 2) Guide RNA:

The guide RNA (gRNA) molecule (5′-GCCGAAGCACTGCACGCCGTGTTTTAGAGCTAGAAATAGCAAGTTAAAATAAGGCTAGTCCGTT ATCAACTTGAAAAAGTGGCACCGAGTCGGTGC-3′; SEQ ID NO: 16,701) binds Cas9 and contains a pro-spacer sequence complementary to the target locus, resulting in localization of the gene modifying complex to the target genomic locus.

### 3) Trans-Template RNA:

A trans-template RNA (ttRNA) molecule contains a PBS-template region, 3′ to 5′, as below:
[0788] 1. an 1-17 nt primer binding site (PBS; as in Table 37) that basepairs with the nicked DNA strand allowing primer extension of the nicked DNA, followed immediately by
[0789] 2. a 0-20 nt region of homology with the target locus (homology 1; as in Table 38, “homology 1”)
[0790] 3. the desired modification to the genome—insertion, deletion, or substitution (edit; as in Table 38, “edit”)
[0791] 4. a 0-500 nt region of homology with the target locus (homology 2; as in Table 39, “homology 2”).
   The exemplary ttRNA additionally includes:
[0792] 5. an RBP recruitment site (RRS; as in Table 40). The RRS may be repeated 1-5 times (e.g., 1-4 times) in tandem with or without intervening RNA linker sequences.
   The exemplary ttRNA may optionally also include:
[0793] 6. an end-protecting RNA secondary structure (end block; as in Table 41) that protects the ttRNA molecule from exonuclease-mediated degradation.
   These components of the ttRNA may be assembled in any of the below configurations, where the RRSs may be joined to the PBS-template by an RNA linker sequence of up to 20 nts (the longest sequence being 5′-ACTAACATACAACTAACATA-3′; SEQ ID NO: 16,702):
[0794] (RRS)ₙ-linker-PBS-template
[0795] (RRS)ₙ-linker-PBS-template-end block
   [0796] PBS-template-linker-(RRS)ₙ
   [0797] end-block-PBS-template-linker-(RRS)ₙ
[0798] endblock-(RRS)ₙ-linker-PBS-template
[0799] endblock-(RRS)ₙ-linker-PBS-template-end block
   [0800] PBS-template-linker-(RRS)ₙ-end block
   [0801] end-block-PBS-template-linker-(RRS)ₙ-end block

### 4) Additional (Second) Cas9:

An additional nickase (e.g., Spy N863A Cas9, or other orthogonal Cas9) or catalytically inactive (“dead”) Cas9 as in Table 43, which binds the nicked DNA strand by pairing with a gRNA scaffold that is encoded in the ttRNA (FIG. 4B), or is introduced as a separate guide RNA (FIG. 4A; see also 5, below). A nickase Cas9 paired with a full spacer is used to introduce a nick on the second, unnicked strand. Alternatively, a dead Cas9 or a nickase paired with a gRNA-2 having a pro-spacer with less than 17 nt complementarity to the target opens up the DNA bubble for long RT reactions, without nicking the second strand. An additional nickase or catalytically inactive Cas9 may be a separate domain (e.g., FIG. 4A) or a part of an additional (second) gene modifying polypeptide (FIG. 4B).
5) Optional 2nd Cas9-Paired guideRNA:
The second guide RNA (gRNA-2) molecule with a pro-spacer sequence complementary to the nicked strand, as in Table 44, may be added to recruit the 2^{nd} Cas9 to the nicked DNA strand for DNA bubble extension or second strand nicking. A gRNA-2 pro-spacer may be fully complementary to the target strand to stimulate the nickase activity of the 2^{nd} Cas9, or it may contain 17 or fewer nucleotides of complementarity to inhibit nicking by the 2^{nd} Cas9.

### Evaluation of the 4-5 Component Trans-Gene Modifying System Configurations:

### Method 1:

[0802] To determine the genome-editing capacity of the various configurations of the trans-gene modifying system complex, mammalian HEK293T or U2OS cell lines are generated carrying a genomic landing pad that expresses one of the following (as in Table 42):
[0803] i. BFP-GFP SNP reporter line: a BFP-expressing cell line, which is converted to a GFP-expressing cell line via a single base pair substitution;
[0804] ii. 250 bp GFP insertion reporter line: a non-fluorescent partially-deleted-GFP cell line, in which GFP-expression is restored via a 250 bp insertion of the deleted coding sequence; or
[0805] iii. mCherry insertion reporter line: a GFP-expressing cell line, which loses GFP-expression and gains mCherry expression via the interruption of the GFP coding sequence with a >750 bp insertion that introduces the mCherry coding sequence.
   The gene modifying polypeptide is introduced in these cells by transfection of DNA plasmid or mRNA, or by packaging of DNA plasmid into Lentivirus. The cells are additionally co-transfected/electroporated with 1) a ttRNA-expressing DNA plasmid or ncRNA, 2) a gRNA-expressing DNA plasmid or ncRNA that are together designed to:
[0806] i. BFP-GFP SNP reporter line: convert BFP-to-GFP;
[0807] ii. 250 bp GFP insertion reporter line: restore a GFP coding sequence; or
[0808] iii. mCherry insertion reporter line: interrupt the GFP coding sequence with an mCherry coding sequence, along with 3) a DNA plasmid or mRNA expressing a 2nd Cas9, and optionally 4) a gRNA-2-expressing DNA plasmid or ncRNA.
   To assess the genome-editing capacity of the trans-gene modifying system configurations, cells are analyzed by flow cytometry 4-10 days post-transfection/electroporation of ttRNA and gRNA. The fidelity of the edits are also assessed by collecting genomic DNA 3-10 days post-transfection/electroporation of the ttRNA and gRNA. The frequency of the intended versus unintended mutations at target loci are analyzed by amplicon sequencing.

### Method 2:

To determine the genome-editing capacity of the various configurations of the trans-gene modifying system complex, mammalian HEK293T or U2OS cell lines are generated carrying a genomic landing pad that expresses one of the following (as in Table 42):
[0809] i. BFP-GFP SNP reporter line: a BFP-expressing cell line, which is converted to a GFP-expressing cell line via a single base pair substitution;
[0810] ii. 150 or 250 bp GFP insertion reporter line: a non-fluorescent partially-deleted-GFP cell line, in which GFP-expression is restored via a 150 or 250 bp insertion of the deleted coding sequence; or
[0811] iii. mKate2 or mCherry insertion reporter line: a GFP-expressing cell line, which loses GFP-expression and gains mKate2 or mCherry expression via the interruption of the GFP coding sequence with a >700 (e.g., >750) bp insertion that introduces the mKate2 or mCherry coding sequence.
   The gene modifying polypeptide is introduced in these cells by transfection of DNA plasmid or mRNA, or by packaging of DNA plasmid into Lentivirus. The cells are additionally co-transfected/electroporated with 1) a ttRNA-expressing DNA plasmid or ncRNA, 2) a gRNA-expressing DNA plasmid or ncRNA that are together designed to:
[0812] iv. BFP-GFP SNP reporter line: convert BFP-to-GFP;
[0813] v. 150 or 250 bp GFP insertion reporter line: restore a GFP coding sequence; or
[0814] vi. mKate2 or mCherry insertion reporter line: interrupt the GFP coding sequence with an mKate2 or mCherry coding sequence, along with 3) a DNA plasmid or mRNA expressing a 2nd Cas9, and optionally 4) a gRNA-2-expressing DNA plasmid or ncRNA.
   To assess the genome-editing capacity of the trans-gene modifying system configurations, cells are analyzed by flow cytometry 4-10 days post-transfection/electroporation of ttRNA and gRNA. The fidelity of the edits are also assessed by collecting genomic DNA 3-10 days post-transfection/electroporation of the ttRNA and gRNA. The frequency of the intended versus unintended mutations at target loci are analyzed by amplicon sequencing.

### Example 3: Second Cas9-Mediated Recruitment of Reverse Transcriptase

[0815] This example describes the use of a four or five (4-5) component RNA gene modifying system for the targeted editing of a sequence in the human genome (FIG. 5A-5B). More specifically, a (1)-(2) split gene modifying polypeptide binds (3)-(4) one or two guide RNA molecules and (5) a trans-template RNA molecule, together forming a gene modifying complex, which binds and nicks the target locus and performs templated incorporation of the desired edit in one strand of the genomic DNA. The first component of the split gene modifying polypeptide is constituted of a nickase Cas9 fused to an RNA binding protein, which binds to and recruits the trans-template RNA molecule. The second component is constituted of a second Cas9 fused to a reverse transcriptase domain, which carries out the templated incorporation of the desired edit in the nicked DNA strand. The Cas9-RT is recruited to the target locus either by the trans-template RNA, or by a separate guide RNA molecule. The presence of the second Cas9-complex may act to extend the bubble and facilitate large insertions, and may also be used to introduce a nick on the second strand to initiate second strand synthesis, and/or signal the cell's endogenous mismatch repair system that the edited strand should be copied and maintained. This example further describes the introduction of the 4-5 component system to mammalian cells for in vitro gene modifying as a means of evaluating the efficacy of various gene modifying system configurations and trans-template RNA recruitment interactions on editing activity in human cells.

### 1-2) Gene Modifying Polypeptides:

The gene modifying enzyme includes two polypeptide components—a Cas9-RNA binding protein (RBP) component, and a Cas9-reverse transcriptase (RT) component. The RBP may, in some instances, be repeated 1-5 times in tandem with or without intervening peptide linker sequences.

[0816] These domains within these two components are brought together either by covalent linkage using (1) peptide linkers, as in Table 32, or (2) intein pairs, as in Table 33, or by the dimerization of two fusion domains (FDs) that (a) is induced by chemical binding or or specific wavelengths of light Table 34, or (b) occurs intrinsically in a ligand-free interaction Tables 35 and 36. The FDs may, in some instances, be repeated 1-30 times in tandem with or without intervening peptide linker sequences.

[0817] The Cas9-RBP component may be assembled in either of the below configurations, where the linkers as indicated below can be replaced, in some instances, with intein- or FD-pairs.:
[0818] Cas9-linker-(RBP)ₙ
[0819] (RBP)ₙ-linker-Cas9
   The second Cas9-RT component may be assembled in either of the below configurations, where the linkers as indicated below can be replaced, in some instances, with intein- or FD-pairs.:
[0820] Cas9-linker-RT
[0821] RT-linker-Cas9

### 3-4) Guide RNA:

The first guide RNA (gRNA) molecule (5′-GCCGAAGCACTGCACGCCGTGTTTTAGAGCTAGAAATAGCAAGTTAAAATAAGGCTAGTCCGTT ATCAACTTGAAAAAGTGGCACCGAGTCGGTGC-3′; SEQ ID NO: 16,703) binds Cas9 and contains a pro-spacer sequence complementary to the target locus, resulting in localization of the Cas9-RBP component to the target genomic locus.

[0822] An optional second guide RNA (gRNA-2) molecule may be added when the Cas9-RT is not recruited to the second strand by a guide RNA structure at the 5′-end of the trans-template RNA.

### 5) Trans-template RNA:

An exemplary trans-template RNA (ttRNA) molecule contains a PBS-template region, 3′ to 5′, as below:
[0823] 1. an 1-17 nt primer binding site (PBS; as in Table 37) that basepairs with the nicked DNA strand allowing primer extension of the nicked DNA, followed immediately by
[0824] 2. a 0-20 nt region of homology with the target locus (homology 1; as in Table 38, “homology 1”)
[0825] 3. the desired modification to the genome—insertion, deletion, or substitution (edit; as in Table 38, “edit”)
[0826] 4. a 0-500 nt region of homology with the target locus (homology 2; as in Table 39, “homology 2”).
   The exemplary ttRNA additionally includes:
[0827] 5. an RBP recruitment site (RRS; as in Table 40). The RRS may be repeated 1-5 times in tandem with or without intervening RNA linker sequences.
   The exemplary ttRNA may optionally also include:
[0828] 6. an end-protecting RNA secondary structure (end block; as in Table 41) that protects the ttRNA molecule from exonuclease-mediated degradation.
   These components of the ttRNA may be assembled in any of the below configurations, where the RRSs may be joined to the PBS-template by an RNA linker sequence of up to 20 nts (the longest sequence being 5′-ACTAACATACAACTAACATA-3′ (SEQ ID NO: 21366)):
[0829] (RRS)ₙ-linker-PBS-template
[0830] (RRS)ₙ-linker-PBS-template-end block
   [0831] PBS-template-linker-(RRS)ₙ
   [0832] end-block-PBS-template-linker-(RRS)ₙ
[0833] endblock-(RRS)ₙ-linker-PBS-template
[0834] endblock-(RRS)ₙ-linker-PBS-template-end block
   [0835] PBS-template-linker-(RRS)ₙ-end block
   [0836] end-block-PBS-template-linker-(RRS)ₙ-end block

### Evaluation of the 4-5 Component Trans-Gene Modifying System Configurations:

To determine the genome-editing capacity of the various configurations of the trans-gene modifying complex, mammalian HEK293T or U20S cell lines are generated carrying a genomic landing pad that expresses one of the following (as in Table 42):
[0837] i. BFP-GFP SNP reporter line: a BFP-expressing cell line, which is converted to a GFP-expressing cell line via a single base pair substitution;
[0838] ii. 250 bp GFP insertion reporter line: a non-fluorescent partially-deleted-GFP cell line, in which GFP-expression is restored via a 250 bp insertion of the deleted coding sequence; or
[0839] iii. mCherry insertion reporter line: a GFP-expressing cell line, which loses GFP-expression and gains mCherry expression via the interruption of the GFP coding sequence with a >750 bp insertion that introduces the mCherry coding sequence.
   The gene modifying polypeptides are introduced in these cells by transfection of DNA plasmid or mRNA, or by packaging of DNA plasmid into Lentivirus. Cells containing the gene modifying polypeptide are then transfected/electroporated with 1) a ttRNA-expressing DNA plasmid or ncRNA, 2) a gRNA-expressing DNA plasmid or ncRNA, and optionally 3) a gRNA-2-expressing DNA plasmid or ncRNA that are together designed to:
[0840] vii. BFP-GFP SNP reporter line: convert BFP-to-GFP;
[0841] viii. 250 bp GFP insertion reporter line: restore a GFP coding sequence; or
[0842] ix. mCherry insertion reporter line: interrupt the GFP coding sequence with an mCherry coding sequence.
   To assess the genome-editing capacity of the trans-gene modifying system configurations, cells are analyzed by flow cytometry 4-10 days post-transfection/electroporation of ttRNA and gRNA. The fidelity of the edits are also assessed by collecting genomic DNA 3-10 days post-transfection/electroporation of the ttRNA and gRNA. The frequency of the intended versus unintended mutations at target loci are analyzed by amplicon sequencing.

### Example 4: Quantifying Activity of a Gene Editing Polypeptide Using a GFP/BFP Assay in Human Cells

### Method 1

[0843] This example describes the use of gene modifying system containing a gene modifying polypeptide and a template RNA. In this example, a template RNA contains:
[0844] (1) a gRNA spacer;
[0845] (2) a gRNA scaffold;
[0846] (3) a heterologous object sequence; and
[0847] (4) a primer binding site (PBS) sequence.

[0848] More specifically, the template RNA comprises the following sequence:

(SEQ ID NO: 16,704)
GCCGAAGCACTGCACGCCGTGTTTTAGAGCTAGAAATAGCAAGTTAAAA
TAAGGCTAGTCCGTTATCAACTTGAAAAAGTGGCACCGAGTCGGTGCAC
CCTGACGTACGGCGTGCAGTGCTT.

[0849] A gene modifying system comprising a given gene modifying polypeptide (e.g., one described herein) and the template RNA is transfected into the HEK293T BFP-expressing cell line. The gene modifying polypeptide and the template RNA are delivered by nucleofection in DNA format. Specifically, 800 ng of gene modifying polypeptide plasmid DNA is combined with 200 ng template RNA in plasmid format. The modifying polypeptide and template RNA in plasmid DNA format are added to 25 μL SF buffer containing 250,000 HEK293T BFP-expressing cells, and cells are nucleofected using program DS-150. After nucleofection, cells are grown at 37° C., 5% CO₂ for 3 days prior to cell lysis and genomic DNA extraction. To analyze gene editing activity, primers flanking the BFP locus can be used to amplify across the locus. Amplicons are analyzed via short read sequencing using an Illumina MiSeq. Conversion of the BFP gene sequence to the GFP gene sequence indicate successful editing. In some embodiments, the assay will indicate that at least 10%, 20%, 30%, 40%, 50%, 60%, or 70% of copies of the BFP gene in the sample are converted to the GFP gene.

### Method 2

This example describes the use of gene modifying system containing a gene modifying polypeptide and a template RNA. In this example, a template RNA contains:
[0850] (1) a gRNA spacer;
[0851] (2) a gRNA scaffold;
[0852] (3) a heterologous object sequence; and
[0853] (4) a primer binding site (PBS) sequence.

[0854] More specifically, the template RNA comprises the following sequence:

(SEQ ID NO: 16,705)
GCCGAAGCACTGCACGCCGTGTTTTAGAGCTAGAAATAGCAAGTTAAAA
TAAGGCTAGTCCGTTATCAACTTGAAAAAGTGGCACCGAGTCGGTGCAC
CCTGACGTACGGCGTGCAGTGCTT.

[0855] A gene modifying system comprising a given gene modifying polypeptide (e.g., one described herein) the gRNA, and a template RNA are transfected/electroporated into the HEK293T/U2OS BFP-expressing cell line. The gene modifying polypeptide and the template RNA are delivered by nucleofection in DNA format. Specifically, 300-800 ng of gene modifying polypeptide plasmid DNA is combined with 50-200 ng template RNA and 50-200 ng gRNA in plasmid format. The modifying polypeptide, template RNA and gRNA in plasmid DNA format are added to 25 μL SF/SE buffer containing 250,000 HEK293T/U20S BFP-expressing cells, and cells are nucleofected using program DS-150/DN-100. After nucleofection, cells are grown at 37° C., 5% CO₂ for at least 3 days prior to cell lysis and genomic DNA extraction. To analyze gene editing activity, primers flanking the BFP locus can be used to amplify across the locus. Amplicons are analyzed via short read sequencing using an Illumina MiSeq. Conversion of the BFP gene sequence to the GFP gene sequence indicate successful editing. In some embodiments, the assay will indicate that at least 10%, 20%, 30%, 40%, 50%, 60%, or 70% of copies of the BFP gene in the sample are converted to the GFP gene.

### Example 5: Rewriter Polypeptide Selection by Pooled Screening in HEK293T & U2OS Cells

[0856] This example describes the use of an RNA gene modifying system for the targeted editing of a coding sequence in the human genome. More specifically, this example describes the infection of HEK293T and U20S cells with a library of gene modifying candidates, followed by transfection of a template guide RNA (tgRNA) for in vitro gene modifying in the cells, e.g., as a means of evaluating a new gene modifying polypeptide for editing activity in human cells by a pooled screening approach.

[0857] The gene modifying polypeptide library candidates assayed herein each comprise: 1) a S. pyogenes (Spy) Cas9 nickase containing an N863A mutation that inactivates one endonuclease active site; 2) one of the 122 peptide linkers depicted at Table 10; and 3) a reverse transcriptase (RT) domain from Table 6 of retroviral origin. The particular retroviral RT domains utilized were selected if they were expected to function as a monomer. For each selected RT domain, the wild-type sequences were tested, as well as versions with point mutations installed in the primary wild-type sequence. In particular, 143 RT domains were tested, either wild type or containing various mutations. In total, 17,446 Cas-linker-RT gene modifying polypeptides were tested.

[0858] The system described here is a two-component system comprising: 1) an expression plasmid encoding a human codon-optimized gene modifying polypeptide library candidate within a lentiviral cassette, and 2) a tgRNA expression plasmid expressing a non-coding tgRNA sequence that is recognized by Cas and localizes it to the genomic locus of interest, and that also templates reverse transcription of the desired edit into the genome by the RT domain, driven by a U6 promoter. The lentiviral cassette comprises: (i) a CMV promoter for expression in mammalian cells; (ii) a gene modifying polypeptide library candidate as shown; (iii) a self-cleaving T2A polypeptide; (iv) a puromycin resistance gene enabling selection in mammalian cells; and (v) a polyA tail termination signal.

[0859] To prepare a pool of cells expressing gene modifying polypeptide library candidates, HEK293T or U20S cells were transduced with pooled lentiviral preparations of the gene modifying candidate plasmid library. HEK293 Lenti-X cells were seeded in 15 cm plates (12×10⁶ cells) prior to lentiviral plasmid transfection. Lentiviral plasmid transfection using the Lentiviral Packaging Mix (Biosettia, 27 ug) and the plasmid DNA for the gene modifying candidate library (27 ug) was performed the following day using Lipofectamine 2000 and Opti-MEM media according to the manufacturer's protocol. Extracellular DNA was removed by a full media change the next day and virus-containing media was harvested 48 hours after. Lentiviral media was concentrated using Lenti-X Concentrator (TaKaRa Biosciences) and 5 mL lentiviral aliquots were made and stored at −80° C. Lentiviral titering was performed by enumerating colony forming units post Puromycin selection. HEK293T or U20S cells carrying a BFP-expressing genomic landing pad were seeded at 6×10⁷ cells in culture plates and transduced at a 0.3 multiplicity of infection (MOI) to minimize multiple infections per cell. Puromycin (2.5 ug/mL) was added 48 hours post infection to allow for selection of infected cells. Cells were kept under puromycin selection for at least 7 days and then scaled up for tgRNA electroporation.

[0860] To determine the genome-editing capacity of the gene modifying library candidates in the assay, infected BFP-expressing HEK293T or U20S cells were then transfected by electroporation of 250,000 cells/well with 200 ng of a tgRNA (either g4 or g10) plasmid, designed to convert BFP to GFP, at sufficient cell count for >1000× coverage per library candidate.

[0861] The g4 tgRNA (5′ to 3′) is as follows: 20 nucleotide spacer region (GCCGAAGCACTGCACGCCGT (SEQ ID NO: 21367)), a scaffold region (GTTTTAGAGCTAGAAATAGCAAGTTAAAATAAGGCTAGTCCGTTATCAACTTGAAAAAGTG GCACCGAGTCGGTGC (SEQ ID NO: 20779)), the template region encoding the single base pair substitution to change BFP to GFP (bold) and a PAM inactivation that introduces a synonymous point mutation in the SpyCas9 PAM (NGG to NCG) that prevents re-engagement of the gene modifying polypeptide upon completion of a functional gene modifying reaction (underline) (ACCCTGACGTACG (SEQ ID NO: 20804)), and the 13 nucleotide PBS (GCGTGCAGTGCTT (SEQ ID NO: 21355)).

[0862] Similarly, the g10 tgRNA (5′ to 3′) is as follows: 20 nucleotide spacer region (AGAAGTCGTGCTGCTTCATG (SEQ ID NO: 21368)), a scaffold region (GTTTTAGAGCTAGAAATAGCAAGTTAAAATAAGGCTAGTCCGTTATCAACTTGAAAAAGTG GCACCGAGTCGGTGC (SEQ ID NO: 20779)), the template region encoding the single base pair substitution to change BFP to GFP (bold) and a PAM inactivation that introduces a synonymous point mutation in the SpyCas9 PAM (NGG to NGA) that prevents re-engagement of the gene modifying polypeptide upon completion of a functional gene modifying reaction (underline) (ACCCTGACCTACGGCGTGCAGTGCTTCGGCCGCTACCCCGATCACAT (SEQ ID NO: 21369)), and 13 nucleotide PBS (GAAGCAGCACGAC (SEQ ID NO: 21370)).

[0863] To assess the genome-editing capacity of the various constructs in the assay, cells were sorted by Fluorescence-Activated Cell Sorting (FACS) for GFP expression 6-7 days post-electroporation. Cells were sorted and harvested as distinct populations of unedited (BFP+) cells, edited (GFP+) cells and imperfect edit (BFP−, GFP−) cells. A sample of unsorted cells was also harvested as the input population to determine enrichment during analysis.

[0864] To determine which gene modifying library candidates have genome-editing capacity in this assay, genomic DNA (gDNA) was harvested from sorted and unsorted cell populations, and analyzed by sequencing the gene modifying library candidates in each population. Briefly, gene modifying sequences were amplified from the genome using primers specific to the lentiviral cassette, amplified in a second round of PCR to dilute genomic DNA, and then sequenced using Oxford Nanopore Sequencing Technology according to the manufacturer's protocol.

[0865] After quality control of sequencing reads, reads of at least 1500 and no more than 3200 nucleotides were mapped to the gene modifying polypeptide library sequences and those containing a minimum of an 80% match to a library sequence were considered to be successfully aligned to a given candidate. To identify gene modifying candidates capable of performing gene editing in the assay, the read count of each library candidate in the edited population was compared to its read count in the initial, unsorted population. For purposes of this pooled screen, gene modifying candidates with genome-editing capacity were selected as those candidates that were enriched in the converted (GFP+) population relative to unsorted (input) cells and wherein the enrichment was determined to be at or above the enrichment level of a reference (Element ID No: 17380).

[0866] A large number of gene modifying polypeptide candidates were determined to be enriched in the GFP+ cell populations. For example, of the 17,446 candidates tested, over 3,300 exhibited enrichment in GFP+ sorted populations (relative to unsorted) that was at least equivalent to that of the reference under similar experimental conditions (HEK293T using g4 tgRNA; HEK293T cells using g10 tgRNA; or U20S cells using g4 tgRNA), shown in Table 1. Although the 17,446 candidates were also tested in U20S cells using g10 tgRNA, the pooled screen did not yield candidates that were enriched in the converted (GFP+) population relative to unsorted (input) cells under that experimental condition; further investigation is required to explain these results.

TABLE 1
Combinations of linker and RT sequences ordered by ranked performance in screen. The amino
acid sequence of each RT in this table is provided in Table 6.

| | Linker | |
|---|---|---|
| | SEQ | |
| | ID | |
| Linker amino acid sequence | NO: | RT domain name |
| EAAAKGSS | 16, 901 | PERV_Q4VFZ2_3mutA_WS |
| EAAAKEAAAKEAAAKEAAAK | 16, 902 | MLVMS_P03355_PLV919 |
| PAPEAAAK | 16, 903 | MLVFF_P26809_3mutA |
| EAAAKPAPGGG | 16, 904 | MLVFF_P26809_3mutA |
| GSSGSSGSSGSSGSSGSS | 16, 905 | PERV_Q4VFZ2_3mut |
| PAPGGGEAAAK | 16, 906 | MLVAV_P03356_3mutA |
| AEAAAKEAAAKEAAAKEAAAKALEAEAAAKEAAAKEAAAKEAAAK | 16, 907 | MLVMS_P03355_PLV919 |
| A | | |
| GSSEAAAK | 16, 908 | MLVFF_P26809_3mutA |
| EAAAKPAPGGS | 16, 909 | MLVFF_P26809_3mutA |
| GGSGGSGGSGGSGGSGGS | 16, 910 | MLVFF_P26809_3mutA |
| AEAAAKEAAAKEAAAKEAAAKALEAEAAAKEAAAKEAAAKEAAAK | 16, 911 | XMRV6_A1Z651_3mutA |
| A | | |
| AEAAAKEAAAKEAAAKEAAAKALEAEAAAKEAAAKEAAAKEAAAK | 16, 912 | PERV_Q4VFZ2_3mutA_WS |
| A | | |
| EAAAKEAAAKEAAAK | 16, 913 | MLVFF_P26809_3mutA |
| PAPEAAAKGSS | 16, 914 | MLVFF_P26809_3mutA |
| AEAAAKEAAAKEAAAKEAAAKALEAEAAAKEAAAKEAAAKEAAAK | 16, 915 | PERV_Q4VFZ2_3mutA_WS |
| A | | |
| EAAAKEAAAKEAAAK | 16, 916 | PERV_Q4VFZ2_3mutA_WS |
| AEAAAKEAAAKEAAAKEAAAKALEAEAAAKEAAAKEAAAKEAAAK | 16, 917 | AVIRE_P03360_3mutA |
| A | | |
| PAPAPAPAPAP | 16, 918 | MLVCB_P08361_3mutA |
| PAPAPAPAPAP | 16, 919 | MLVFF_P26809_3mutA |
| EAAAKGGSPAP | 16, 920 | PERV_Q4VFZ2_3mutA_WS |
| PAP | | MLVMS_P03355_PLV919 |
| PAPGGGGSS | 16, 922 | WMSV_P03359_3mutA |
| SGSETPGTSESATPES | 16, 923 | MLVFF_P26809_3mutA |
| PAPEAAAKGSS | 16, 924 | XMRV6_A1Z651_3mutA |
| EAAAKGGSGGG | 16, 925 | MLVMS_P03355_PLV919 |
| GGGGSGGGGS | 16, 926 | MLVFF_P26809_3mutA |
| GGGPAPGSS | 16, 927 | MLVAV_P03356_3mutA |
| GGSGGSGGSGGSGGSGGS | 16, 928 | XMRV6_A1Z651_3mut |
| GGGGSGGGGSGGGGSGGGGSGGGGSGGGGS | 16, 929 | MLVCB_P08361_3mutA |
| GSSPAP | 16, 930 | AVIRE_P03360_3mutA |
| EAAAKGSSPAP | 16, 931 | MLVFF_P26809_3mutA |
| GSSGGGEAAAK | 16, 932 | MLVFF_P26809_3mutA |
| GGSGGSGGSGGSGGSGGS | 16, 933 | MLVMS_P03355_3mutA_WS |
| PAPAPAPAP | 16, 934 | MLVFF_P26809_3mutA |
| EAAAKEAAAKEAAAKEAAAK | 16, 935 | XMRV6_A1Z651_3mutA |
| EAAAKGGSPAP | 16, 936 | MLVMS_P03355_3mutA_WS |
| PAPGGSEAAAK | 16, 937 | AVIRE_P03360_3mutA |
| GGGGSGGGGSGGGGSGGGGSGGGGSGGGGS | 16, 938 | AVIRE_P03360_3mutA |
| EAAAKGGGGSEAAAK | 16, 939 | MLVCB_P08361_3mutA |
| AEAAAKEAAAKEAAAKEAAAKALEAEAAAKEAAAKEAAAKEAAAK | 16, 940 | WMSV_P03359_3mutA |
| A | | |
| GSS | | MLVMS_P03355_PLV919 |
| GSSGSSGSSGSS | 16, 942 | MLVMS_P03355_PLV919 |
| GSSPAPEAAAK | 16, 943 | XMRV6_A1Z651_3mutA |
| GGSPAPEAAAK | 16, 944 | MLVFF_P26809_3mutA |
| GGGEAAAKGGS | 16, 945 | MLVFF_P26809_3mutA |
| EAAAKEAAAKEAAAKEAAAKEAAAK | 16, 946 | PERV_Q4VFZ2_3mutA_WS |
| GGGGGGGG | 16, 947 | PERV_Q4VFZ2_3mut |
| GGGPAP | 16, 948 | MLVCB_P08361_3mutA |
| PAPAPAPAPAPAP | 16, 949 | MLVCB_P08361_3mutA |
| GGSGGSGGSGGSGGSGGS | 16, 950 | MLVCB_P08361_3mutA |
| PAP | | MLVMS_P03355_3mutA_WS |
| GGSGGSGGSGGSGGSGGS | 16, 952 | PERV_Q4VFZ2_3mutA_WS |
| PAPAPAPAPAPAP | 16, 953 | MLVMS_P03355_PLV919 |
| EAAAKPAPGSS | 16, 954 | MLVMS_P03355_3mutA_WS |
| EAAAKEAAAKEAAAKEAAAK | 16, 955 | MLVMS_P03355_3mutA_WS |
| EAAAKGGS | 16, 956 | MLVMS_P03355_3mutA_WS |
| GGGGSEAAAKGGGGS | 16, 957 | MLVFF_P26809_3mutA |
| EAAAKPAPGSS | 16, 958 | MLVFF_P26809_3mutA |
| GGGGSGGGGSGGGGSGGGGS | 16, 959 | MLVMS_P03355_PLV919 |
| EAAAKGGGGGS | 16, 960 | MLVMS_P03355_PLV919 |
| GGSPAP | 16, 961 | XMRV6_A1Z651_3mutA |
| EAAAKGGGPAP | 16, 962 | MLVMS_P03355_PLV919 |
| EAAAKEAAAKEAAAKEAAAKEAAAK | 16, 963 | MLVFF_P26809_3mutA |
| PAP | | MLVCB_P08361_3mutA |
| EAAAK | 16, 965 | XMRV6_A1Z651_3mutA |
| GGSGSSPAP | 16, 966 | PERV_Q4VFZ2_3mutA_WS |
| GSSGSSGSSGSSGSSGSS | 16, 967 | MLVMS_P03355_PLV919 |
| GSSEAAAKGGG | 16, 968 | MLVAV_P03356_3mutA |
| GGGEAAAKGGS | 16, 969 | XMRV6_A1Z651_3mutA |
| EAAAKGGGGSEAAAK | 16, 970 | MLVAV_P03356_3mutA |
| GGGGSGGGGSGGGGS | 16, 971 | MLVFF_P26809_3mutA |
| GGGGSGGGGSGGGGSGGGGS | 16, 972 | AVIRE_P03360_3mutA |
| SGSETPGTSESATPES | 16, 973 | AVIRE_P03360_3mutA |
| GGGEAAAKPAP | 16, 974 | MLVFF_P26809_3mutA |
| EAAAKGSSGGG | 16, 975 | MLVMS_P03355_3mutA_WS |
| EAAAKEAAAKEAAAKEAAAKEAAAK | 16, 976 | WMSV_P03359_3mut |
| GGSGGSGGSGGS | 16, 977 | XMRV6_A1Z651_3mutA |
| GGSEAAAKPAP | 16, 978 | MLVFF_P26809_3mutA |
| EAAAKGSSGGG | 16, 979 | XMRV6_A1Z651_3mutA |
| GGGGS | 16, 980 | MLVFF_P26809_3mutA |
| GGGEAAAKGSS | 16, 981 | MLVMS_P03355_PLV919 |
| PAPAPAPAPAPAP | 16, 982 | MLVAV_P03356_3mutA |
| GGGGSGGGGSGGGGSGGGGS | 16, 983 | MLVCB_P08361_3mutA |
| GGGEAAAKGSS | 16, 984 | MLVCB_P08361_3mutA |
| PAPGGSGSS | 16, 985 | MLVFF_P26809_3mutA |
| GSAGSAAGSGEF | 16, 986 | MLVCB_P08361_3mutA |
| PAPGGSEAAAK | 16, 987 | MLVMS_P03355_3mutA_WS |
| GGSGSS | 16, 988 | XMRV6_A1Z651_3mutA |
| PAPGGGGSS | 16, 989 | MLVMS_P03355_PLV919 |
| GSSGSSGSS | 16, 990 | XMRV6_A1Z651_3mut |
| AEAAAKEAAAKEAAAKEAAAKALEAEAAAKEAAAKEAAAKEAAAK | 16, 991 | MLVMS_P03355_3mutA_WS |
| A | | |
| EAAAK | 16, 992 | MLVMS_P03355_PLV919 |
| GSSGSSGSSGSS | 16, 993 | MLVFF_P26809_3mutA |
| PAPGGGGSS | 16, 994 | MLVCB_P08361_3mutA |
| GGGEAAAKGGS | 16, 995 | MLVCB_P08361_3mutA |
| PAPGGGEAAAK | 16, 996 | MLVMS_P03355_PLV919 |
| GGGGGSPAP | 16, 997 | XMRV6_A1Z651_3mutA |
| EAAAKGGS | 16, 998 | XMRV6_A1Z651_3mutA |
| EAAAKGSSPAP | 16, 999 | XMRV6_A1Z651_3mut |
| PAPEAAAK | 17, 000 | MLVAV_P03356_3mutA |
| GGSGGSGGSGGS | 17, 001 | MLVMS_P03355_3mutA_WS |
| GGGPAPGGS | 17, 002 | MLVMS_P03355_PLV919 |
| GSSGSSGSSGSS | 17, 003 | PERV_Q4VFZ2_3mutA_WS |
| EAAAKPAPGGS | 17, 004 | MLVCB_P08361_3mutA |
| GSSGSS | 17, 005 | MLVFF_P26809_3mutA |
| EAAAKEAAAKEAAAKEAAAK | 17, 006 | MLVCB_P08361_3mutA |
| EAAAKEAAAKEAAAKEAAAK | 17, 007 | FLV_P10273_3mutA |
| GSS | | MLVFF_P26809_3mutA |
| EAAAKEAAAK | 17, 009 | MLVMS_P03355_3mutA_WS |
| PAPEAAAKGGG | 17, 010 | MLVAV_P03356_3mutA |
| GGSGSSEAAAK | 17, 011 | MLVFF_P26809_3mutA |
| EAAAKEAAAKEAAAKEAAAKEAAAK | 17, 012 | PERV_Q4VFZ2 |
| GSSEAAAKPAP | 17, 013 | AVIRE_P03360_3mutA |
| EAAAKEAAAKEAAAKEAAAKEAAAK | 17, 014 | MLVCB_P08361_3mutA |
| EAAAKGGG | 17, 015 | MLVFF_P26809_3mutA |
| GSSPAPGGG | 17, 016 | MLVCB_P08361_3mutA |
| GGGPAPGSS | 17, 017 | MLVMS_P03355_PLV919 |
| GGGGGS | 17, 018 | MLVMS_P03355_3mutA_WS |
| EAAAKEAAAKEAAAKEAAAKEAAAKEAAAK | 17, 019 | PERV_Q4VFZ2_3mut |
| GGGGSGGGGSGGGGSGGGGSGGGGS | 17, 020 | WMSV_P03359_3mutA |
| EAAAKEAAAKEAAAK | 17, 021 | PERV_Q4VFZ2_3mut |
| PAPAPAPAP | 17, 022 | MLVCB_P08361_3mutA |
| GSSGSSGSSGSSGSS | 17, 023 | PERV_Q4VFZ2_3mut |
| GGGGSSEAAAK | 17, 024 | MLVMS_P03355_3mutA_WS |
| GGSGGSGGSGGS | 17, 025 | MLVCB_P08361_3mutA |
| PAPEAAAKGGS | 17, 026 | MLVCB_P08361_3mutA |
| EAAAKEAAAKEAAAKEAAAKEAAAKEAAAK | 17, 027 | MLVCB_P08361_3mutA |
| EAAAKGGGGSEAAAK | 17, 028 | MLVMS_P03355_PLV919 |
| EAAAKGGGGSEAAAK | 17, 029 | MLVMS_P03355_3mutA_WS |
| EAAAKGGGPAP | 17, 030 | XMRV6_A1Z651_3mut |
| EAAAKEAAAKEAAAKEAAAKEAAAK | 17, 031 | MLVMS_P03355_3mutA_WS |
| AEAAAKEAAAKEAAAKEAAAKALEAEAAAKEAAAKEAAAKEAAAK | 17, 032 | FLV_P10273_3mutA |
| A | | |
| GGSEAAAKGGG | 17, 033 | MLVMS_P03355_3mutA_WS |
| GGGGSGGGGSGGGGSGGGGSGGGGSGGGGS | 17, 034 | KORV_Q9TTC1-Pro_3mutA |
| GGGPAPGGS | 17, 035 | MLVCB_P08361_3mutA |
| PAPAPAPAPAPAP | 17, 036 | XMRV6_A1Z651_3mutA |
| GGSGSSGGG | 17, 037 | XMRV6_A1Z651_3mutA |
| GGSGSSGGG | 17, 038 | MLVCB_P08361_3mutA |
| GGGEAAAKGGS | 17, 039 | MLVMS_P03355_3mutA_WS |
| EAAAK | 17, 040 | MLVCB_P08361_3mutA |
| GGSPAPGSS | 17, 041 | MLVMS_P03355_3mutA_WS |
| GGGGSSEAAAK | 17, 042 | PERV_Q4VFZ2_3mut |
| PAPAPAPAPAP | 17, 043 | MLVBM_Q7SVK7_3mut |
| EAAAKEAAAKEAAAKEAAAK | 17, 044 | MLVAV_P03356_3mutA |
| GGGGGSGSS | 17, 045 | MLVCB_P08361_3mutA |
| EAAAKGSSPAP | 17, 046 | MLVMS_P03355_3mutA_WS |
| PAPAPAPAPAPAP | 17, 047 | MLVMS_P03355_3mutA_WS |
| GSSGGGGGS | 17, 048 | MLVMS_P03355_3mutA_WS |
| PAPGSSGGG | 17, 049 | MLVMS_P03355_PLV919 |
| GGSGGGPAP | 17, 050 | MLVCB_P08361_3mutA |
| GGGGGGG | 17, 051 | MLVCB_P08361_3mutA |
| GSSGSSGSSGSSGSSGSS | 17, 052 | MLVCB_P08361_3mutA |
| GGGPAPGGS | 17, 053 | MLVFF_P26809_3mutA |
| EAAAKGGSGGG | 17, 054 | PERV_Q4VFZ2_3mut |
| EAAAKGGGGSS | 17, 055 | MLVMS_P03355_3mutA_WS |
| GSSGSSGSSGSSGSSGSS | 17, 056 | MLVMS_P03355_3mut |
| GGGGSGGGGSGGGGSGGGGS | 17, 057 | MLVBM_Q7SVK7_3mutA_WS |
| PAPAPAPAPAP | 17, 058 | MLVMS_P03355_PLV919 |
| GGGEAAAKGGS | 17, 059 | MLVMS_P03355_PLV919 |
| AEAAAKEAAAKEAAAKEAAAKALEAEAAAKEAAAKEAAAKEAAAK | 17, 060 | MLVMS_P03355_3mut |
| A | | |
| GSAGSAAGSGEF | 17, 061 | MLVMS_P03355_3mutA_WS |
| GSSGSSGSSGSSGSS | 17, 062 | MLVFF_P26809_3mutA |
| EAAAKGGSGSS | 17, 063 | MLVFF_P26809_3mutA |
| PAPGGG | 17, 064 | MLVFF_P26809_3mutA |
| GGGPAPGSS | 17, 065 | XMRV6_A1Z651_3mutA |
| PAPEAAAKGGS | 17, 066 | AVIRE_P03360_3mutA |
| PAPGGGEAAAK | 17, 067 | MLVFF_P26809_3mut |
| GGGGSSEAAAK | 17, 068 | MLVCB_P08361_3mutA |
| EAAAK | 17, 069 | MLVMS_P03355_PLV919 |
| GGGGSGGGGSGGGGSGGGGSGGGGSGGGGS | 17, 070 | BAEVM_P10272_3mutA |
| GGSGGGEAAAK | 17, 071 | MLVMS_P03355_PLV919 |
| AEAAAKEAAAKEAAAKEAAAKALEAEAAAKEAAAKEAAAKEAAAK | 17, 072 | MLVFF_P26809_3mutA |
| A | | |
| GSSPAPGGS | 17, 073 | XMRV6_A1Z651_3mutA |
| GGSGGGPAP | 17, 074 | MLVMS_P03355_PLV919 |
| EAAAK | 17, 075 | AVIRE_P03360_3mutA |
| GSS | | XMRV6_A1Z651_3mutA |
| GGSGGSGGS | 17, 077 | MLVFF_P26809_3mutA |
| EAAAKEAAAKEAAAKEAAAK | 17, 078 | AVIRE_P03360_3mut |
| PAPEAAAKGGG | 17, 079 | PERV_Q4VFZ2_3mutA_WS |
| GGGGGSEAAAK | 17, 080 | BAEVM_P10272_3mutA |
| GGSGSSGGG | 17, 081 | MLVMS_P03355_3mutA_WS |
| GGGGGGG | 17, 082 | MLVMS_P03355_3mutA_WS |
| GSSEAAAKPAP | 17, 083 | PERV_Q4VFZ2_3mut |
| GGGGGSEAAAK | 17, 084 | WMSV_P03359_3mut |
| GGGGSGGGGSGGGGSGGGGSGGGGS | 17, 085 | MLVFF_P26809_3mut |
| GGGEAAAKGGS | 17, 086 | AVIRE_P03360_3mutA |
| GGSPAPGGG | 17, 087 | AVIRE_P03360_3mutA |
| GSAGSAAGSGEF | 17, 088 | MLVAV_P03356_3mutA |
| EAAAK | 17, 089 | MLVAV_P03356_3mutA |
| EAAAKPAPGSS | 17, 090 | WMSV_P03359_3mutA |
| EAAAKEAAAKEAAAKEAAAKEAAAKEAAAK | 17, 091 | PERV_Q4VFZ2_3mutA_WS |
| GGSEAAAKPAP | 17, 092 | MLVCB_P08361_3mutA |
| PAPAPAPAPAPAP | 17, 093 | MLVBM_Q7SVK7_3mutA_WS |
| GGSPAPGGG | 17, 094 | MLVMS_P03355_3mutA_WS |
| GGSEAAAKGGG | 17, 095 | MLVMS_P03355_3mut |
| GGSGGSGGSGGS | 17, 096 | MLVFF_P26809_3mutA |
| EAAAKEAAAKEAAAKEAAAKEAAAKEAAAK | 17, 097 | MLVFF_P26809_3mutA |
| GGG | | AVIRE_P03360_3mutA |
| AEAAAKEAAAKEAAAKEAAAKALEAEAAAKEAAAKEAAAKEAAAK | 17, 099 | PERV_Q4VFZ2_3mut |
| A | | |
| GGSGGSGGSGGS | 17, 100 | MLVMS_P03355_3mutA_WS |
| GGGEAAAK | 17, 101 | MLVCB_P08361_3mutA |
| GSSGSSGSSGSSGSSGSS | 17, 102 | MLVMS_P03355_3mutA_WS |
| GSSGGGPAP | 17, 103 | MLVMS_P03355_3mutA_WS |
| GSSEAAAKPAP | 17, 104 | MLVFF_P26809_3mutA |
| EAAAKEAAAK | 17, 105 | MLVMS_P03355_PLV919 |
| GGGGSGGGGSGGGGSGGGGSGGGGSGGGGS | 17, 106 | MLVCB_P08361_3mut |
| GGGGGG | 17, 107 | MLVMS_P03355_3mutA_WS |
| GGSGSSGGG | 17, 108 | MLVFF_P26809_3mutA |
| GSSGGGEAAAK | 17, 109 | PERV_Q4VFZ2_3mutA_WS |
| PAPAPAPAPAP | 17, 110 | PERV_Q4VFZ2_3mut |
| EAAAKEAAAKEAAAKEAAAKEAAAKEAAAK | 17, 111 | SFV3L_P27401_2mut |
| EAAAKGGSGGG | 17, 112 | BAEVM_P10272_3mutA |
| GGGGSSPAP | 17, 113 | PERV_Q4VFZ2_3mutA_WS |
| GGGEAAAKPAP | 17, 114 | MLVMS_P03355_PLV919 |
| GGSGGGPAP | 17, 115 | BAEVM_P10272_3mutA |
| PAPGSSGGS | 17, 116 | MLVMS_P03355_PLV919 |
| GGSGGGPAP | 17, 117 | MLVMS_P03355_3mutA_WS |
| EAAAKGGSPAP | 17, 118 | PERV_Q4VFZ2_3mutA_WS |
| EAAAKGGSGGG | 17, 119 | MLVMS_P03355_3mutA_WS |
| PAPGSSGGG | 17, 120 | MLVFF_P26809_3mutA |
| GSSEAAAKGGS | 17, 121 | MLVFF_P26809_3mutA |
| PAPGSSEAAAK | 17, 122 | MLVFF_P26809_3mutA |
| EAAAKGSSPAP | 17, 123 | KORV_Q9TTC1-Pro_3mutA |
| EAAAKEAAAKEAAAKEAAAKEAAAK | 17, 124 | MLVBM_Q7SVK7_3mutA_WS |
| PAPGSSEAAAK | 17, 125 | MLVMS_P03355_PLV919 |
| EAAAKGSSGGG | 17, 126 | MLVMS_P03355_3mutA_WS |
| EAAAKGGGGGS | 17, 127 | AVIRE_P03360_3mutA |
| EAAAKEAAAKEAAAK | 17, 128 | MLVMS_P03355_PLV919 |
| PAPAPAPAPAPAP | 17, 129 | MLVFF_P26809_3mutA |
| GGGGSGGGGSGGGGS | 17, 130 | MLVCB_P08361_3mutA |
| PAPGGSEAAAK | 17, 131 | MLVCB_P08361_3mutA |
| PAPGSSEAAAK | 17, 132 | MLVBM_Q7SVK7_3mutA_WS |
| PAPEAAAKGSS | 17, 133 | AVIRE_P03360_3mutA |
| GGSPAPGSS | 17, 134 | WMSV_P03359_3mutA |
| PAPGGSGGG | 17, 135 | MLVMS_P03355_PLV919 |
| EAAAKGGSGSS | 17, 136 | MLVMS_P03355_3mutA_WS |
| GGSGGG | 17, 137 | MLVFF_P26809_3mutA |
| GGSEAAAKGSS | 17, 138 | KORV_Q9TTC1_3mutA |
| AEAAAKEAAAKEAAAKEAAAKALEAEAAAKEAAAKEAAAKEAAAK | 17, 139 | MLVCB_P08361_3mutA |
| A | | |
| PAPAPAPAPAPAP | 17, 140 | PERV_Q4VFZ2_3mutA_WS |
| PAPEAAAK | 17, 141 | MLVMS_P03355_3mutA_WS |
| GGSEAAAKGGG | 17, 142 | MLVMS_P03355_PLV919 |
| GSSPAP | 17, 143 | MLVMS_P03355_3mutA_WS |
| GGGGSS | 17, 144 | MLVMS_P03355_PLV919 |
| GGGEAAAKPAP | 17, 145 | AVIRE_P03360_3mutA |
| EAAAKPAPGGS | 17, 146 | MLVAV_P03356_3mutA |
| EAAAKGGGPAP | 17, 147 | MLVAV_P03356_3mutA |
| PAPGGSEAAAK | 17, 148 | BAEVM_P10272_3mutA |
| PAPGGSGSS | 17, 149 | MLVMS_P03355_3mutA_WS |
| PAPGGSGSS | 17, 150 | AVIRE_P03360_3mutA |
| GGSGGGPAP | 17, 151 | MLVMS_P03355_3mutA_WS |
| EAAAKEAAAKEAAAKEAAAK | 17, 152 | BAEVM_P10272_3mutA |
| GGGGSGGGGSGGGGSGGGGSGGGGS | 17, 153 | MLVMS_P03355_PLV919 |
| GGGGSSPAP | 17, 154 | MLVCB_P08361_3mutA |
| GSSGGGPAP | 17, 155 | MLVFF_P26809_3mutA |
| GGGGSSGGS | 17, 156 | MLVMS_P03355_PLV919 |
| GGSGGG | 17, 157 | MLVCB_P08361_3mutA |
| GSSGGGGGS | 17, 158 | MLVMS_P03355_PLV919 |
| SGGSSGGSSGSETPGTSESATPESSGGSSGGSS | 17, 159 | XMRV6_A1Z651_3mutA |
| GGGGGSGSS | 17, 160 | KORV_Q9TTC1_3mut |
| GGGEAAAKGGS | 17, 161 | BAEVM_P10272_3mutA |
| GGSGGG | 17, 162 | BAEVM_P10272_3mutA |
| PAPAPAP | 17, 163 | KORV_Q9TTC1-Pro_3mut |
| AEAAAKEAAAKEAAAKEAAAKALEAEAAAKEAAAKEAAAKEAAAK | 17, 164 | SFV3L_P27401_2mutA |
| A | | |
| AEAAAKEAAAKEAAAKEAAAKALEAEAAAKEAAAKEAAAKEAAAK | 17, 165 | MLVBM_Q7SVK7_3mutA_WS |
| A | | |
| GSSGSSGSSGSSGSS | 17, 166 | MLVMS_P03355_3mutA_WS |
| GSSGGGEAAAK | 17, 167 | MLVMS_P03355_3mutA_WS |
| GSSGGSEAAAK | 17, 168 | MLVFF_P26809_3mutA |
| PAP | | MLVMS_P03355_PLV919 |
| EAAAKGGGGSEAAAK | 17, 170 | MLVBM_Q7SVK7_3mutA_WS |
| PAPAP | 17, 171 | AVIRE_P03360_3mutA |
| PAP | | MLVFF_P26809_3mutA |
| GSSGGG | 17, 173 | MLVMS_P03355_3mut |
| GSSPAPGGS | 17, 174 | MLVFF_P26809_3mutA |
| PAPAPAPAP | 17, 175 | XMRV6_A1Z651_3mutA |
| EAAAKGSSGGS | 17, 176 | PERV_Q4VFZ2_3mut |
| PAPEAAAKGGG | 17, 177 | KORV_Q9TTC1-Pro_3mutA |
| PAPGGS | 17, 178 | MLVCB_P08361_3mutA |
| EAAAKGGG | 17, 179 | MLVCB_P08361_3mutA |
| GSSEAAAKPAP | 17, 180 | MLVMS_P03355_PLV919 |
| PAPGGS | 17, 181 | MLVFF_P26809_3mutA |
| EAAAKGGS | 17, 182 | MLVCB_P08361_3mutA |
| EAAAKEAAAKEAAAKEAAAKEAAAKEAAAK | 17, 183 | FLV_P10273_3mutA |
| PAPGGSEAAAK | 17, 184 | MLVAV_P03356_3mutA |
| GSS | | MLVCB_P08361_3mutA |
| GSSGSSGSSGSS | 17, 186 | AVIRE_P03360_3mutA |
| GSSGSSGSS | 17, 187 | MLVFF_P26809_3mutA |
| GSSGGG | 17, 188 | MLVMS_P03355_PLV919 |
| EAAAK | 17, 189 | MLVFF_P26809_3mutA |
| GGSPAPEAAAK | 17, 190 | MLVCB_P08361_3mutA |
| GGSGSS | 17, 191 | MLVCB_P08361_3mutA |
| GSSPAPGGG | 17, 192 | MLVMS_P03355_PLV919 |
| EAAAKEAAAKEAAAKEAAAKEAAAK | 17, 193 | MLVAV_P03356_3mutA |
| EAAAKGSSPAP | 17, 194 | FLV_P10273_3mutA |
| GGGGSS | 17, 195 | XMRV6_A1Z651_3mutA |
| GGSPAPGSS | 17, 196 | MLVMS_P03355_PLV919 |
| EAAAKEAAAKEAAAKEAAAKEAAAK | 17, 197 | MLVMS_P03355_3mutA_WS |
| PAPEAAAKGGG | 17, 198 | FLV_P10273_3mutA |
| EAAAKPAPGGS | 17, 199 | XMRV6_A1Z651_3mut |
| PAPAP | 17, 200 | BAEVM_P10272_3mutA |
| EAAAKEAAAKEAAAKEAAAK | 17, 201 | MLVMS_P03355_PLV919 |
| GSSPAPGGG | 17, 202 | MLVMS_P03355_PLV919 |
| EAAAKGGGPAP | 17, 203 | KORV_Q9TTC1_3mutA |
| PAPEAAAK | 17, 204 | MLVMS_P03355_PLV919 |
| PAPGGGEAAAK | 17, 205 | PERV_Q4VFZ2_3mutA_WS |
| EAAAKGSSGGS | 17, 206 | MLVMS_P03355_3mutA_WS |
| EAAAKEAAAKEAAAK | 17, 207 | MLVMS_P03355_PLV919 |
| GSSEAAAK | 17, 208 | MLVMS_P03355_3mutA_WS |
| GSSGSSGSSGSS | 17, 209 | MLVMS_P03355_3mutA_WS |
| GGGGSGGGGSGGGGSGGGGS | 17, 210 | MLVMS_P03355_3mutA_WS |
| EAAAKGGGGSEAAAK | 17, 211 | MLVMS_P03355_3mut |
| GGS | | MLVCB_P08361_3mutA |
| GGGGSGGGGSGGGGSGGGGSGGGGSGGGGS | 17, 213 | XMRV6_A1Z651_3mutA |
| GGSGSSPAP | 17, 214 | MLVCB_P08361_3mutA |
| GGGGSGGGGSGGGGS | 17, 215 | XMRV6_A1Z651_3mutA |
| PAPAPAPAPAP | 17, 216 | BAEVM_P10272_3mutA |
| PAPAPAPAPAP | 17, 217 | MLVMS_P03355_3mutA_WS |
| EAAAKEAAAKEAAAKEAAAK | 17, 218 | MLVBM_Q7SVK7_3mut |
| GGGGSGGGGSGGGGSGGGGSGGGGS | 17, 219 | BAEVM_P10272_3mutA |
| GGSGGSGGS | 17, 220 | MLVMS_P03355_3mutA_WS |
| EAAAKPAPGSS | 17, 221 | MLVMS_P03355_PLV919 |
| GSS | | MLVMS_P03355_3mutA_WS |
| PAPEAAAKGGS | 17, 223 | MLVMS_P03355_3mutA_WS |
| GGGPAPGGS | 17, 224 | MLVMS_P03355_3mutA_WS |
| EAAAKGGGGSS | 17, 225 | MLVAV_P03356_3mutA |
| GSSGSSGSSGSSGSS | 17, 226 | MLVFF_P26809_3mut |
| SGSETPGTSESATPES | 17, 227 | PERV_Q4VFZ2_3mut |
| GGSEAAAKGGG | 17, 228 | MLVMS_P03355_3mut |
| GSSGSSGSSGSSGSSGSS | 17, 229 | AVIRE_P03360_3mutA |
| PAPAPAPAPAPAP | 17, 230 | AVIRE_P03360_3mut |
| GGSGGS | 17, 231 | XMRV6_A1Z651_3mutA |
| PAPGSSEAAAK | 17, 232 | MLVCB_P08361_3mut |
| GGSPAPEAAAK | 17, 233 | PERV_Q4VFZ2_3mut |
| EAAAKGGGGGS | 17, 234 | MLVCB_P08361_3mutA |
| GGSGGSGGSGGS | 17, 235 | MLVMS_P03355_PLV919 |
| GGGGSSEAAAK | 17, 236 | MLVMS_P03355_PLV919 |
| GSSEAAAKGGG | 17, 237 | MLVFF_P26809_3mutA |
| PAPGGS | 17, 238 | MLVMS_P03355_3mutA_WS |
| EAAAKGGSGGG | 17, 239 | MLVCB_P08361_3mutA |
| EAAAKGGG | 17, 240 | PERV_Q4VFZ2_3mut |
| PAPGGS | 17, 241 | XMRV6_A1Z651_3mutA |
| GSSPAPGGG | 17, 242 | XMRV6_A1Z651_3mutA |
| PAPEAAAKGGG | 17, 243 | MLVMS_P03355_3mutA_WS |
| GSSEAAAKGGG | 17, 244 | PERV_Q4VFZ2_3mutA_WS |
| PAPGGSEAAAK | 17, 245 | XMRV6_A1Z651_3mutA |
| GGGGGS | 17, 246 | MLVMS_P03355_3mutA_WS |
| GGSPAPEAAAK | 17, 247 | MLVMS_P03355_3mutA_WS |
| GGGPAP | 17, 248 | MLVFF_P26809_3mutA |
| PAPGSSGGG | 17, 249 | XMRV6_A1Z651_3mutA |
| PAPGSSGGG | 17, 250 | MLVBM_Q7SVK7_3mutA_WS |
| GGGEAAAKGSS | 17, 251 | MLVMS_P03355_3mutA_WS |
| GSSEAAAKGGS | 17, 252 | MLVCB_P08361_3mutA |
| PAPGGSGSS | 17, 253 | MLVCB_P08361_3mutA |
| EAAAKGGGGSEAAAK | 17, 254 | BAEVM_P10272_3mutA |
| PAPAPAP | 17, 255 | PERV_Q4VFZ2_3mutA_WS |
| GGGGGG | 17, 256 | MLVAV_P03356_3mutA |
| GSSPAPEAAAK | 17, 257 | MLVCB_P08361_3mutA |
| GGSGGSGGS | 17, 258 | MLVMS_P03355_3mutA_WS |
| GSSGSSGSSGSSGSS | 17, 259 | XMRV6_A1Z651_3mut |
| GGGPAPGGS | 17, 260 | XMRV6_A1Z651_3mutA |
| GGGPAPEAAAK | 17, 261 | BAEVM_P10272_3mutA |
| GGSGGG | 17, 262 | AVIRE_P03360_3mutA |
| SGSETPGTSESATPES | 17, 263 | PERV_Q4VFZ2_3mutA_WS |
| EAAAKGSSPAP | 17, 264 | MLVMS_P03355_PLV919 |
| GSSEAAAK | 17, 265 | XMRV6_A1Z651_3mut |
| GSSGGSGGG | 17, 266 | MLVFF_P26809_3mutA |
| EAAAKEAAAKEAAAKEAAAKEAAAK | 17, 267 | WMSV_P03359_3mutA |
| GGGGSEAAAKGGGGS | 17, 268 | MLVMS_P03355_PLV919 |
| PAPGGGGSS | 17, 269 | MLVMS_P03355_3mutA_WS |
| SGSETPGTSESATPES | 17, 270 | MLVMS_P03355_3mutA_WS |
| GGSPAPEAAAK | 17, 271 | KORV_Q9TTC1-Pro_3mutA |
| GSSEAAAKGGG | 17, 272 | MLVMS_P03355_3mutA_WS |
| GSSEAAAK | 17, 273 | WMSV_P03359_3mutA |
| GGGGSEAAAKGGGGS | 17, 274 | AVIRE_P03360_3mutA |
| GSS | | WMSV_P03359_3mutA |
| PAPGGSEAAAK | 17, 276 | MLVFF_P26809_3mutA |
| GGGGS | 17, 277 | MLVMS_P03355_3mutA_WS |
| GGGPAP | 17, 278 | MLVMS_P03355_3mutA_WS |
| EAAAKEAAAKEAAAKEAAAKEAAAKEAAAK | 17, 279 | MLVMS_P03355_3mutA_WS |
| EAAAKPAPGSS | 17, 280 | PERV_Q4VFZ2_3mut |
| EAAAKPAPGSS | 17, 281 | MLVCB_P08361_3mutA |
| GGGGGG | 17, 282 | WMSV_P03359_3mutA |
| EAAAKPAPGGS | 17, 283 | MLVMS_P03355_PLV919 |
| PAPGGGEAAAK | 17, 284 | PERV_Q4VFZ2_3mut |
| EAAAKEAAAKEAAAKEAAAKEAAAK | 17, 285 | AVIRE_P03360_3mutA |
| GSSEAAAKPAP | 17, 286 | XMRV6_A1Z651_3mutA |
| PAPGGSEAAAK | 17, 287 | MLVBM_Q7SVK7_3mutA_WS |
| PAPGSS | 17, 288 | MLVCB_P08361_3mutA |
| EAAAKGGG | 17, 289 | MLVMS_P03355_3mutA_WS |
| EAAAKPAP | 17, 290 | MLVCB_P08361_3mutA |
| PAPEAAAKGGS | 17, 291 | MLVBM_Q7SVK7_3mutA_WS |
| GGSPAPGGG | 17, 292 | MLVCB_P08361_3mutA |
| PAPGGSGSS | 17, 293 | WMSV_P03359_3mutA |
| EAAAKEAAAKEAAAKEAAAKEAAAKEAAAK | 17, 294 | MLVMS_P03355_PLV919 |
| GGSGGGPAP | 17, 295 | MLVMS_P03355_PLV919 |
| AEAAAKEAAAKEAAAKEAAAKALEAEAAAKEAAAKEAAAKEAAAK | 17, 296 | MLVMS_P03355 |
| A | | |
| PAPEAAAKGSS | 17, 297 | MLVCB_P08361_3mutA |
| EAAAKGSS | 17, 298 | MLVMS_P03355_3mutA_WS |
| GGSGGS | 17, 299 | MLVMS_P03355_3mutA_WS |
| EAAAKEAAAKEAAAKEAAAKEAAAK | 17, 300 | BAEVM_P10272_3mutA |
| GGGGSEAAAKGGGGS | 17, 301 | FLV_P10273_3mutA |
| GGSEAAAKGGG | 17, 302 | MLVCB_P08361_3mutA |
| GSSGSSGSSGSSGSS | 17, 303 | BAEVM_P10272_3mutA |
| GGGGSGGGGSGGGGSGGGGSGGGGSGGGGS | 17, 304 | MLVFF_P26809_3mutA |
| EAAAKGGG | 17, 305 | PERV_Q4VFZ2_3mut |
| GGGGGSEAAAK | 17, 306 | MLVCB_P08361_3mutA |
| EAAAKPAPGGS | 17, 307 | MLVMS_P03355_3mutA_WS |
| GGGGGSGSS | 17, 308 | XMRV6_A1Z651_3mutA |
| PAPGSSEAAAK | 17, 309 | MLVMS_P03355_3mutA_WS |
| GSSEAAAKPAP | 17, 310 | MLVCB_P08361_3mutA |
| EAAAKGSSPAP | 17, 311 | MLVAV_P03356_3mutA |
| GGGPAPGGS | 17, 312 | WMSV_P03359_3mutA |
| GGSPAP | 17, 313 | MLVMS_P03355_3mutA_WS |
| GGSEAAAKGGG | 17, 314 | MLVMS_P03355_3mutA_WS |
| GGGGGGGG | 17, 315 | MLVFF_P26809_3mutA |
| GGGGSGGGGSGGGGSGGGGSGGGGSGGGGS | 17, 316 | MLVMS_P03355_3mutA_WS |
| GGGGSGGGGSGGGGSGGGGSGGGGSGGGGS | 17, 317 | MLVBM_Q7SVK7_3mutA_WS |
| GSSPAPGGG | 17, 318 | MLVAV_P03356_3mutA |
| GGGGGG | 17, 319 | AVIRE_P03360_3mutA |
| GSSGGS | 17, 320 | MLVMS_P03355_3mutA_WS |
| GGSPAPGSS | 17, 321 | MLVFF_P26809_3mutA |
| PAPEAAAKGGG | 17, 322 | PERV_Q4VFZ2_3mut |
| EAAAKGGGPAP | 17, 323 | MLVFF_P26809_3mutA |
| GGGEAAAKGGS | 17, 324 | MLVMS_P03355_PLV919 |
| GGSGSSPAP | 17, 325 | MLVFF_P26809_3mutA |
| SGSETPGTSESATPES | 17, 326 | WMSV_P03359_3mutA |
| PAPGGSEAAAK | 17, 327 | MLVBM_Q7SVK7_3mutA_WS |
| GGSGGG | 17, 328 | MLVMS_P03355_PLV919 |
| GGGGSSPAP | 17, 329 | PERV_Q4VFZ2_3mut |
| GGGEAAAKGSS | 17, 330 | MLVAV_P03356_3mutA |
| PAPAPAPAPAPAP | 17, 331 | MLVMS_P03355_3mutA_WS |
| EAAAKGGGGSEAAAK | 17, 332 | PERV_Q4VFZ2 |
| EAAAKEAAAKEAAAKEAAAKEAAAK | 17, 333 | MLVMS_P03355_PLV919 |
| GGGGGSEAAAK | 17, 334 | PERV_Q4VFZ2_3mut |
| PAPGSSEAAAK | 17, 335 | MLVCB_P08361_3mutA |
| GSAGSAAGSGEF | 17, 336 | PERV_Q4VFZ2_3mutA_WS |
| EAAAKGGGGSEAAAK | 17, 337 | MLVFF_P26809_3mutA |
| GGSPAPGGG | 17, 338 | PERV_Q4VFZ2_3mutA_WS |
| GSSEAAAKGGG | 17, 339 | AVIRE_P03360_3mutA |
| GGGEAAAKPAP | 17, 340 | MLVMS_P03355_3mutA_WS |
| GGGPAP | 17, 341 | AVIRE_P03360_3mutA |
| GGSEAAAK | 17, 342 | MLVCB_P08361_3mutA |
| SGGSSGGSSGSETPGTSESATPESSGGSSGGSS | 17, 343 | PERV_Q4VFZ2_3mut |
| EAAAKPAPGGS | 17, 344 | MLVBM_Q7SVK7_3mutA_WS |
| AEAAAKEAAAKEAAAKEAAAKALEAEAAAKEAAAKEAAAKEAAAK | 17, 345 | XMRV6_A1Z651_3mut |
| A | | |
| GGGGGGGG | 17, 346 | MLVCB_P08361_3mutA |
| PAPGSS | 17, 347 | PERV_Q4VFZ2_3mut |
| EAAAK | 17, 348 | PERV_Q4VFZ2_3mut |
| GSAGSAAGSGEF | 17, 349 | MLVMS_P03355_3mutA_WS |
| PAPGGGEAAAK | 17, 350 | PERV_Q4VFZ2_3mut |
| EAAAKGSSGGS | 17, 351 | MLVFF_P26809_3mut |
| GGGGSEAAAKGGGGS | 17, 352 | BAEVM_P10272_3mutA |
| GGGGSGGGGSGGGGS | 17, 353 | MLVMS_P03355_PLV919 |
| EAAAKGGGGSEAAAK | 17, 354 | BAEVM_P10272_3mut |
| PAPGGGEAAAK | 17, 355 | MLVMS_P03355_3mutA_WS |
| GGSEAAAKPAP | 17, 356 | MLVMS_P03355_3mutA_WS |
| PAPAP | 17, 357 | MLVCB_P08361_3mutA |
| PAPAP | 17, 358 | MLVFF_P26809_3mutA |
| GGSPAP | 17, 359 | AVIRE_P03360_3mutA |
| EAAAKGSSGGS | 17, 360 | MLVCB_P08361_3mutA |
| PAPGSSGGS | 17, 361 | AVIRE_P03360_3mutA |
| EAAAKGGGGSEAAAK | 17, 362 | XMRV6_A1Z651_3mutA |
| PAPAPAP | 17, 363 | BAEVM_P10272_3mutA |
| GGSGGSGGSGGSGGSGGS | 17, 364 | MLVMS_P03355_PLV919 |
| GGGGGSGSS | 17, 365 | MLVMS_P03355_PLV919 |
| PAPGSSEAAAK | 17, 366 | XMRV6_A1Z651_3mut |
| GGSEAAAKPAP | 17, 367 | XMRV6_A1Z651_3mutA |
| EAAAKEAAAKEAAAKEAAAK | 17, 368 | XMRV6_A1Z651_3mut |
| AEAAAKEAAAKEAAAKEAAAKALEAEAAAKEAAAKEAAAKEAAAK | 17, 369 | WMSV_P03359_3mut |
| A | | |
| GGSGGGEAAAK | 17, 370 | XMRV6_A1Z651_3mutA |
| GGGEAAAK | 17, 371 | XMRV6_A1Z651_3mutA |
| GGGGSGGGGSGGGGS | 17, 372 | MLVMS_P03355_3mutA_WS |
| GGSGGSGGSGGSGGS | 17, 373 | MLVFF_P26809_3mutA |
| GSSGGGGGS | 17, 374 | MLVMS_P03355_3mut |
| PAPGGSEAAAK | 17, 375 | MLVMS_P03355_3mutA_WS |
| GSSGGSPAP | 17, 376 | MLVMS_P03355_3mutA_WS |
| SGSETPGTSESATPES | 17, 377 | XMRV6_A1Z651_3mutA |
| GGGGSGGGGS | 17, 378 | MLVMS_P03355_PLV919 |
| PAPAPAPAPAP | 17, 379 | MLVMS_P03355_3mut |
| GSSGSS | 17, 380 | XMRV6_A1Z651_3mutA |
| GSSEAAAKPAP | 17, 381 | PERV_Q4VFZ2_3mut |
| GGSGSSGGG | 17, 382 | MLVMS_P03355_3mutA_WS |
| EAAAKEAAAK | 17, 383 | MLVCB_P08361_3mutA |
| GSSGSSGSSGSS | 17, 384 | MLVMS_P03355_3mutA_WS |
| GSSPAPGGG | 17, 385 | PERV_Q4VFZ2_3mutA_WS |
| EAAAKEAAAKEAAAK | 17, 386 | MLVMS_P03355_3mutA_WS |
| AEAAAKEAAAKEAAAKEAAAKALEAEAAAKEAAAKEAAAKEAAAK | 17, 387 | SFV1_P23074_2mutA |
| A | | |
| GGGGSGGGGSGGGGSGGGGSGGGGSGGGGS | 17, 388 | MLVMS_P03355_PLV919 |
| GSAGSAAGSGEF | 17, 389 | MLVMS_P03355_PLV919 |
| PAPGSSEAAAK | 17, 390 | MLVMS_P03355_3mutA_WS |
| GGSEAAAK | 17, 391 | MLVMS_P03355_3mutA_WS |
| GSSGSSGSSGSSGSS | 17, 392 | PERV_Q4VFZ2_3mutA_WS |
| GGSEAAAKPAP | 17, 393 | PERV_Q4VFZ2_3mutA_WS |
| GGSGGSGGS | 17, 394 | MLVCB_P08361_3mutA |
| EAAAKGGSGSS | 17, 395 | MLVCB_P08361_3mutA |
| GGGGSGGGGSGGGGSGGGGSGGGGS | 17, 396 | FLV_P10273_3mutA |
| EAAAKEAAAKEAAAKEAAAK | 17, 397 | MLVBM_Q7SVK7_3mutA_WS |
| GGSGSSPAP | 17, 398 | BAEVM_P10272_3mutA |
| EAAAKEAAAKEAAAKEAAAKEAAAK | 17, 399 | XMRV6_A1Z651_3mutA |
| GGGGSGGGGSGGGGSGGGGSGGGGS | 17, 400 | MLVBM_Q7SVK7_3mutA_WS |
| GGSGSS | 17, 401 | WMSV_P03359_3mutA |
| PAPEAAAK | 17, 402 | MLVCB_P08361_3mutA |
| EAAAKPAP | 17, 403 | BAEVM_P10272_3mutA |
| GSSPAP | 17, 404 | PERV_Q4VFZ2_3mutA_WS |
| GGGPAP | 17, 405 | PERV_Q4VFZ2_3mutA_WS |
| EAAAKGGSGSS | 17, 406 | MLVMS_P03355_3mutA_WS |
| EAAAKGGGGSEAAAK | 17, 407 | AVIRE_P03360_3mutA |
| GGSGGG | 17, 408 | KORV_Q9TTC1-Pro_3mutA |
| GSSPAP | 17, 409 | MLVFF_P26809_3mutA |
| GGSGSSEAAAK | 17, 410 | BAEVM_P10272_3mutA |
| PAPGSSGGS | 17, 411 | BAEVM_P10272_3mutA |
| GGGGGG | 17, 412 | MLVFF_P26809_3mutA |
| PAPGGSEAAAK | 17, 413 | MLVMS_P03355_PLV919 |
| PAPGGS | 17, 414 | MLVMS_P03355_PLV919 |
| GGSGGSGGSGGS | 17, 415 | BAEVM_P10272_3mutA |
| GSSPAP | 17, 416 | MLVCB_P08361_3mutA |
| PAPAPAPAP | 17, 417 | MLVMS_P03355_3mutA_WS |
| GGGGGG | 17, 418 | MLVCB_P08361_3mutA |
| GSSGSSGSSGSSGSSGSS | 17, 419 | KORV_Q9TTC1-Pro_3mutA |
| GSSEAAAKGGS | 17, 420 | BAEVM_P10272_3mutA |
| GGSEAAAK | 17, 421 | FLV_P10273_3mutA |
| GGSGGSGGSGGSGGS | 17, 422 | KORV_Q9TTC1-Pro_3mutA |
| GSSPAPEAAAK | 17, 423 | PERV_Q4VFZ2_3mut |
| GSSGSSGSSGSSGSS | 17, 424 | XMRV6_A1Z651_3mutA |
| EAAAKPAPGGS | 17, 425 | MLVMS_P03355_3mut |
| SGGSSGGSSGSETPGTSESATPESSGGSSGGSS | 17, 426 | FLV_P10273_3mut |
| GGSPAPEAAAK | 17, 427 | XMRV6_A1Z651_3mut |
| EAAAKGGSGGG | 17, 428 | MLVFF_P26809_3mutA |
| EAAAKEAAAKEAAAKEAAAK | 17, 429 | MLVFF_P26809_3mutA |
| GSSPAP | 17, 430 | WMSV_P03359_3mutA |
| PAPAPAPAP | 17, 431 | MLVAV_P03356_3mutA |
| PAPGGSEAAAK | 17, 432 | KORV_Q9TTC1_3mut |
| GGSGSSEAAAK | 17, 433 | MLVBM_Q7SVK7_3mutA_WS |
| GSSGGG | 17, 434 | MLVCB_P08361_3mutA |
| GGGEAAAKGSS | 17, 435 | PERV_Q4VFZ2_3mut |
| PAPGGSGGG | 17, 436 | MLVFF_P26809_3mutA |
| AEAAAKEAAAKEAAAKEAAAKALEAEAAAKEAAAKEAAAKEAAAK | 17, 437 | FFV_O93209 |
| A | | |
| PAPGGGGSS | 17, 438 | MLVMS_P03355_3mutA_WS |
| EAAAKGGS | 17, 439 | MLVAV_P03356_3mutA |
| EAAAKEAAAKEAAAKEAAAKEAAAKEAAAK | 17, 440 | MLVBM_Q7SVK7_3mutA_WS |
| GGSGGSGGS | 17, 441 | WMSV_P03359_3mutA |
| PAPAP | 17, 442 | MLVMS_P03355_3mutA_WS |
| GSSGGGEAAAK | 17, 443 | MLVAV_P03356_3mutA |
| GGGGSSEAAAK | 17, 444 | MLVFF_P26809_3mutA |
| EAAAKGSSGGS | 17, 445 | MLVMS_P03355_PLV919 |
| EAAAKGGGGSEAAAK | 17, 446 | MLVMS_P03355_3mutA_WS |
| GGGGGGGG | 17, 447 | MLVMS_P03355_PLV919 |
| GSSGSSGSS | 17, 448 | MLVMS_P03355_PLV919 |
| GGGEAAAKPAP | 17, 449 | PERV_Q4VFZ2_3mutA_WS |
| GGGGGSGSS | 17, 450 | MLVMS_P03355_3mutA_WS |
| GGGGGGG | 17, 451 | MLVMS_P03355_PLV919 |
| GGS | | MLVMS_P03355_PLV919 |
| GSSGGG | 17, 453 | MLVMS_P03355_3mutA_WS |
| EAAAKGGSGSS | 17, 454 | PERV_Q4VFZ2_3mutA_WS |
| PAPGSSEAAAK | 17, 455 | MLVMS_P03355_PLV919 |
| GSSEAAAKPAP | 17, 456 | MLVMS_P03355_PLV919 |
| GGSPAPGSS | 17, 457 | BAEVM_P10272_3mutA |
| GSAGSAAGSGEF | 17, 458 | MLVCB_P08361_3mut |
| GGSPAPGGG | 17, 459 | PERV_Q4VFZ2_3mut |
| GGGGSGGGGSGGGGSGGGGS | 17, 460 | MLVMS_P03355_3mut |
| GSSGSSGSS | 17, 461 | PERV_Q4VFZ2_3mutA_WS |
| EAAAKEAAAKEAAAKEAAAKEAAAKEAAAK | 17, 462 | PERV_Q4VFZ2_3mut |
| GGGGSEAAAKGGGGS | 17, 463 | MLVCB_P08361_3mutA |
| GGSEAAAKGSS | 17, 464 | MLVAV_P03356_3mutA |
| EAAAKGGGGSEAAAK | 17, 465 | MLVCB_P08361_3mut |
| EAAAKEAAAKEAAAKEAAAKEAAAKEAAAK | 17, 466 | XMRV6_A1Z651_3mutA |
| PAPGGGEAAAK | 17, 467 | MLVMS_P03355_3mutA_WS |
| GSSGGGEAAAK | 17, 468 | PERV_Q4VFZ2_3mutA_WS |
| GSSGSS | 17, 469 | MLVCB_P08361_3mut |
| PAPAPAPAPAPAP | 17, 470 | PERV_Q4VFZ2_3mut |
| GGSPAPGGG | 17, 471 | MLVFF_P26809_3mutA |
| GGSGGSGGSGGSGGS | 17, 472 | MLVCB_P08361_3mutA |
| EAAAKEAAAK | 17, 473 | MLVFF_P26809_3mutA |
| AEAAAKEAAAKEAAAKEAAAKALEAEAAAKEAAAKEAAAKEAAAK | 17, 474 | GALV_P21414_3mut |
| A | | |
| PAPAPAPAPAPAP | 17, 475 | WMSV_P03359_3mutA |
| GGGEAAAKGGS | 17, 476 | KORV_Q9TTC1_3mutA |
| EAAAKGGGPAP | 17, 477 | KORV_Q9TTC1_3mut |
| PAPEAAAKGSS | 17, 478 | MLVBM_Q7SVK7_3mutA_WS |
| PAPEAAAKGSS | 17, 479 | FLV_P10273_3mutA |
| PAPGGSEAAAK | 17, 480 | MLVMS_P03355_3mut |
| GSSPAPGGG | 17, 481 | BAEVM_P10272_3mutA |
| GGGEAAAKPAP | 17, 482 | KORV_Q9TTC1-Pro_3mutA |
| GGGGSGGGGS | 17, 483 | MLVMS_P03355_PLV919 |
| GGGEAAAKGSS | 17, 484 | MLVFF_P26809_3mutA |
| PAPGGGGSS | 17, 485 | MLVBM_Q7SVK7_3mutA_WS |
| GSSEAAAK | 17, 486 | BAEVM_P10272_3mutA |
| GGGGGGGG | 17, 487 | MLVMS_P03355_PLV919 |
| PAPGSSGGS | 17, 488 | MLVAV_P03356_3mutA |
| GGGGSGGGGSGGGGSGGGGS | 17, 489 | BAEVM_P10272_3mutA |
| PAP | | MLVMS_P03355_3mut |
| EAAAKGSSPAP | 17, 491 | XMRV6_A1Z651_3mutA |
| PAPEAAAKGGS | 17, 492 | MLVFF_P26809_3mutA |
| GSSGGGEAAAK | 17, 493 | BAEVM_P10272_3mutA |
| PAPAPAP | 17, 494 | MLVMS_P03355_3mutA_WS |
| GGSEAAAKGGG | 17, 495 | MLVMS_P03355_PLV919 |
| GSSEAAAK | 17, 496 | PERV_Q4VFZ2_3mut |
| GGGG | 17, 497 | MLVMS_P03355_3mutA_WS |
| GGGGGS | 17, 498 | MLVMS_P03355_3mut |
| GGGGSSEAAAK | 17, 499 | PERV_Q4VFZ2_3mut |
| EAAAKEAAAKEAAAKEAAAKEAAAKEAAAK | 17, 500 | SFV3L_P27401-Pro_2mutA |
| GGSEAAAKGSS | 17, 501 | MLVMS_P03355_3mutA_WS |
| PAPGSSGGS | 17, 502 | XMRV6_A1Z651_3mutA |
| GGSPAP | 17, 503 | MLVMS_P03355_3mutA_WS |
| GGGGSSEAAAK | 17, 504 | BAEVM_P10272_3mut |
| GGSGGSGGSGGS | 17, 505 | AVIRE_P03360_3mutA |
| PAPGSSGGS | 17, 506 | MLVFF_P26809_3mutA |
| GSSPAPGGG | 17, 507 | MLVMS_P03355_3mutA_WS |
| GGGGGGG | 17, 508 | MLVMS_P03355_3mutA_WS |
| EAAAKGGGGGS | 17, 509 | MLVMS_P03355_3mutA_WS |
| EAAAKGGSGGG | 17, 510 | MLVMS_P03355_PLV919 |
| GGGGSSEAAAK | 17, 511 | XMRV6_A1Z651_3mutA |
| GGGGSEAAAKGGGGS | 17, 512 | MLVBM_Q7SVK7_3mutA_WS |
| GSSGSS | 17, 513 | MLVMS_P03355_PLV919 |
| GGSGGG | 17, 514 | MLVMS_P03355_PLV919 |
| PAPEAAAKGGG | 17, 515 | AVIRE_P03360_3mutA |
| AEAAAKEAAAKEAAAKEAAAKALEAEAAAKEAAAKEAAAKEAAAK | 17, 516 | FOAMV_P14350-Pro_2mutA |
| A | | |
| GGGGGSGSS | 17, 517 | PERV_Q4VFZ2_3mut |
| GSSGSSGSSGSSGSS | 17, 518 | KORV_Q9TTC1-Pro_3mut |
| GGGGSEAAAKGGGGS | 17, 519 | MLVMS_P03355_3mutA_WS |
| GGGGGSPAP | 17, 520 | FLV_P10273_3mut |
| GGGEAAAK | 17, 521 | MLVMS_P03355_3mutA_WS |
| GGSGGSGGSGGS | 17, 522 | FLV_P10273_3mutA |
| GGG | | MLVMS_P03355_PLV919 |
| GGSPAPEAAAK | 17, 524 | BAEVM_P10272_3mutA |
| EAAAKEAAAK | 17, 525 | FLV_P10273_3mutA |
| GGGEAAAKPAP | 17, 526 | BAEVM_P10272_3mutA |
| GGGEAAAKGGS | 17, 527 | PERV_Q4VFZ2_3mut |
| GGSGGSGGS | 17, 528 | PERV_Q4VFZ2_3mut |
| EAAAKGGGPAP | 17, 529 | XMRV6_A1Z651_3mutA |
| EAAAK | 17, 530 | MLVBM_Q7SVK7_3mutA_WS |
| PAPEAAAKGGG | 17, 531 | PERV_Q4VFZ2_3mut |
| EAAAKGSS | 17, 532 | MLVCB_P08361_3mutA |
| GGSEAAAKGGG | 17, 533 | MLVBM_Q7SVK7_3mutA_WS |
| GGGGSGGGGSGGGGSGGGGS | 17, 534 | XMRV6_A1Z651_3mutA |
| GGGGSGGGGSGGGGSGGGGSGGGGS | 17, 535 | BAEVM_P10272_3mut |
| GGGGSSPAP | 17, 536 | PERV_Q4VFZ2_3mutA_WS |
| GGSGGSGGSGGSGGSGGS | 17, 537 | PERV_Q4VFZ2_3mut |
| GGGEAAAKPAP | 17, 538 | PERV_Q4VFZ2_3mut |
| EAAAKEAAAK | 17, 539 | BAEVM_P10272_3mutA |
| GGSGSSEAAAK | 17, 540 | XMRV6_A1Z651_3mutA |
| PAPEAAAKGSS | 17, 541 | WMSV_P03359_3mutA |
| PAPAPAPAPAP | 17, 542 | XMRV6_A1Z651_3mutA |
| GSSGGGEAAAK | 17, 543 | MLVMS_P03355_PLV919 |
| GSSPAPGGG | 17, 544 | MLVFF_P26809_3mutA |
| GGSPAPEAAAK | 17, 545 | MLVFF_P26809_3mut |
| PAPGGSEAAAK | 17, 546 | PERV_Q4VFZ2_3mut |
| GGGGSS | 17, 547 | MLVFF_P26809_3mutA |
| GGSGSSGGG | 17, 548 | BAEVM_P10272_3mutA |
| GSSGGGEAAAK | 17, 549 | MLVMS_P03355_3mutA_WS |
| EAAAKGGS | 17, 550 | MLVBM_Q7SVK7_3mutA_WS |
| GGGPAPGGS | 17, 551 | MLVMS_P03355_PLV919 |
| EAAAKEAAAK | 17, 552 | MLVMS_P03355_PLV919 |
| GSSGSSGSS | 17, 553 | MLVMS_P03355_PLV919 |
| GGGEAAAKPAP | 17, 554 | MLVAV_P03356_3mutA |
| SGSETPGTSESATPES | 17, 555 | FLV_P10273_3mutA |
| PAPAPAPAPAP | 17, 556 | KORV_Q9TTC1-Pro_3mut |
| AEAAAKEAAAKEAAAKEAAAKALEAEAAAKEAAAKEAAAKEAAAK | 17, 557 | BAEVM_P10272_3mutA |
| A | | |
| PAPGSSGGG | 17, 558 | MLVMS_P03355_3mutA_WS |
| GSSGGGEAAAK | 17, 559 | XMRV6_A1Z651_3mutA |
| GGGGSGGGGSGGGGSGGGGSGGGGS | 17, 560 | XMRV6_A1Z651_3mutA |
| GGGGSSPAP | 17, 561 | MLVFF_P26809_3mutA |
| GGSGGGPAP | 17, 562 | PERV_Q4VFZ2_3mutA_WS |
| GSS | | PERV_Q4VFZ2_3mut |
| EAAAKGSSPAP | 17, 564 | MLVMS_P03355_3mut |
| EAAAKGGG | 17, 565 | XMRV6_A1Z651_3mutA |
| GSSGSSGSSGSS | 17, 566 | WMSV_P03359_3mutA |
| PAPEAAAKGSS | 17, 567 | MLVMS_P03355_PLV919 |
| GSSEAAAK | 17, 568 | AVIRE_P03360_3mutA |
| EAAAKGGSGSS | 17, 569 | AVIRE_P03360_3mutA |
| GSSEAAAK | 17, 570 | MLVMS_P03355_3mut |
| GGSGSSEAAAK | 17, 571 | MLVMS_P03355_PLV919 |
| GGSEAAAKGGG | 17, 572 | MLVFF_P26809_3mutA |
| GGGGSGGGGSGGGGSGGGGS | 17, 573 | MLVAV_P03356_3mutA |
| PAPAPAPAPAPAP | 17, 574 | MLVFF_P26809_3mut |
| EAAAKPAPGSS | 17, 575 | KORV_Q9TTC1-Pro_3mut |
| PAPGSSEAAAK | 17, 576 | MLVAV_P03356_3mutA |
| GGGGSSPAP | 17, 577 | WMSV_P03359_3mutA |
| EAAAKGGGGGS | 17, 578 | MLVMS_P03355_3mutA_WS |
| GGGEAAAKGGS | 17, 579 | MLVMS_P03355_3mut |
| GGSGSSGGG | 17, 580 | MLVMS_P03355_3mut |
| GGGPAPGGS | 17, 581 | MLVAV_P03356_3mutA |
| PAPGGGGGS | 17, 582 | MLVMS_P03355_PLV919 |
| GGGPAPGSS | 17, 583 | PERV_Q4VFZ2_3mut |
| GGGGGGG | 17, 584 | MLVFF_P26809_3mutA |
| GGSGGGGSS | 17, 585 | MLVCB_P08361_3mutA |
| GGGGGG | 17, 586 | FLV_P10273_3mutA |
| GGSEAAAKGSS | 17, 587 | PERV_Q4VFZ2_3mut |
| GGSPAPGGG | 17, 588 | BAEVM_P10272_3mutA |
| GGSPAPGSS | 17, 589 | AVIRE_P03360_3mutA |
| GGSGGSGGSGGS | 17, 590 | KORV_Q9TTC1_3mut |
| EAAAKEAAAKEAAAKEAAAKEAAAK | 17, 591 | MLVBM_Q7SVK7_3mut |
| PAPGSSGGS | 17, 592 | XMRV6_A1Z651_3mut |
| EAAAKGGGGSS | 17, 593 | PERV_Q4VFZ2_3mutA_WS |
| GGSGGSGGSGGSGGS | 17, 594 | PERV_Q4VFZ2_3mutA_WS |
| PAPGGSGGG | 17, 595 | MLVMS_P03355_PLV919 |
| PAPGSSGGG | 17, 596 | PERV_Q4VFZ2_3mutA_WS |
| GSSGSS | 17, 597 | BAEVM_P10272_3mutA |
| EAAAKGSS | 17, 598 | MLVFF_P26809_3mutA |
| GGGPAP | 17, 599 | MLVMS_P03355_PLV919 |
| EAAAKGGGGGS | 17, 600 | MLVFF_P26809_3mutA |
| EAAAKGGSPAP | 17, 601 | MLVBM_Q7SVK7_3mutA_WS |
| EAAAKEAAAKEAAAKEAAAKEAAAKEAAAK | 17, 602 | WMSV_P03359_3mutA |
| GSSPAPGGG | 17, 603 | MLVBM_Q7SVK7_3mutA_WS |
| GGGEAAAKGSS | 17, 604 | AVIRE_P03360_3mutA |
| GGGGSSEAAAK | 17, 605 | AVIRE_P03360_3mutA |
| GGGGGGGG | 17, 606 | PERV_Q4VFZ2_3mutA_WS |
| PAPGSSEAAAK | 17, 607 | BAEVM_P10272_3mutA |
| EAAAKGSS | 17, 608 | MLVFF_P26809_3mut |
| GSSEAAAKGGG | 17, 609 | MLVCB_P08361_3mutA |
| GGSEAAAK | 17, 610 | MLVBM_Q7SVK7_3mutA_WS |
| GSSEAAAKGGG | 17, 611 | PERV_Q4VFZ2_3mutA_WS |
| PAPGGSGGG | 17, 612 | WMSV_P03359_3mutA |
| GSSGGSGGG | 17, 613 | MLVCB_P08361_3mutA |
| EAAAKGSSGGG | 17, 614 | FLV_P10273_3mutA |
| GSSEAAAK | 17, 615 | MLVCB_P08361_3mutA |
| GSSGGGEAAAK | 17, 616 | MLVMS_P03355_3mut |
| GGGGSGGGGS | 17, 617 | MLVCB_P08361_3mutA |
| EAAAKGGGGSEAAAK | 17, 618 | MLVBM_Q7SVK7_3mutA_WS |
| EAAAKGGG | 17, 619 | PERV_Q4VFZ2_3mutA_WS |
| EAAAKGGSPAP | 17, 620 | MLVMS_P03355_PLV919 |
| GGGPAPGGS | 17, 621 | AVIRE_P03360_3mutA |
| GSSEAAAK | 17, 622 | MLVBM_Q7SVK7_3mutA_WS |
| GSSGGGEAAAK | 17, 623 | PERV_Q4VFZ2_3mut |
| SGSETPGTSESATPES | 17, 624 | MLVMS_P03355_PLV919 |
| GGSGSSPAP | 17, 625 | MLVMS_P03355_3mut |
| GGGGGG | 17, 626 | MLVBM_Q7SVK7_3mutA_WS |
| GGSPAPGGG | 17, 627 | XMRV6_A1Z651_3mutA |
| GGSGSS | 17, 628 | PERV_Q4VFZ2_3mutA_WS |
| PAP | | MLVBM_Q7SVK7_3mutA_WS |
| EAAAKPAPGSS | 17, 630 | MLVMS_P03355_PLV919 |
| EAAAKGGG | 17, 631 | MLVMS_P03355_3mut |
| GSSEAAAKPAP | 17, 632 | PERV_Q4VFZ2_3mutA_WS |
| GGGGSS | 17, 633 | MLVMS_P03355_3mutA_WS |
| GGSGSSEAAAK | 17, 634 | PERV_Q4VFZ2_3mut |
| GGGGSS | 17, 635 | BAEVM_P10272_3mutA |
| PAPAP | 17, 636 | MLVFF_P26809_3mut |
| PAPEAAAKGGG | 17, 637 | BAEVM_P10272_3mutA |
| EAAAKGGS | 17, 638 | MLVMS_P03355_PLV919 |
| PAPAPAPAPAPAP | 17, 639 | PERV_Q4VFZ2_3mutA_WS |
| GGGGGSEAAAK | 17, 640 | MLVMS_P03355_3mut |
| PAPGGS | 17, 641 | PERV_Q4VFZ2_3mut |
| GGGGSS | 17, 642 | MLVCB_P08361_3mutA |
| GGGGS | 17, 643 | MLVAV_P03356_3mutA |
| GSSPAPEAAAK | 17, 644 | MLVMS_P03355_PLV919 |
| GGGGSSGGS | 17, 645 | MLVFF_P26809_3mutA |
| PAPEAAAKGSS | 17, 646 | MLVMS_P03355_PLV919 |
| GGSGSSEAAAK | 17, 647 | MLVMS_P03355_3mutA_WS |
| EAAAKGGG | 17, 648 | MLVAV_P03356_3mutA |
| PAPGSSEAAAK | 17, 649 | FLV_P10273_3mutA |
| EAAAKGSSGGG | 17, 650 | MLVCB_P08361_3mutA |
| PAPEAAAK | 17, 651 | KORV_Q9TTC1-Pro_3mutA |
| GGSPAPEAAAK | 17, 652 | KORV_Q9TTC1-Pro_3mut |
| GGSGGSGGSGGSGGSGGS | 17, 653 | MLVAV_P03356_3mutA |
| GSSEAAAKPAP | 17, 654 | MLVBM_Q7SVK7_3mutA_WS |
| AEAAAKEAAAKEAAAKEAAAKALEAEAAAKEAAAKEAAAKEAAAK | 17, 655 | KORV_Q9TTC1-Pro_3mutA |
| A | | |
| GSSGGGEAAAK | 17, 656 | XMRV6_A1Z651_3mut |
| PAPGGSGGG | 17, 657 | AVIRE_P03360_3mutA |
| PAPGGSEAAAK | 17, 658 | PERV_Q4VFZ2_3mutA_WS |
| GGGGS | 17, 659 | MLVMS_P03355_3mutA_WS |
| GGGGSGGGGSGGGGS | 17, 660 | MLVBM_Q7SVK7_3mutA_WS |
| PAPAPAPAPAP | 17, 661 | PERV_Q4VFZ2_3mutA_WS |
| EAAAKEAAAKEAAAKEAAAKEAAAK | 17, 662 | MLVMS_P03355_3mut |
| GSSGGSEAAAK | 17, 663 | MLVMS_P03355_3mutA_WS |
| GGSGGSGGSGGS | 17, 664 | WMSV_P03359_3mutA |
| EAAAKGSSGGG | 17, 665 | WMSV_P03359_3mutA |
| EAAAKGGG | 17, 666 | PERV_Q4VFZ2_3mutA_WS |
| SGSETPGTSESATPES | 17, 667 | PERV_Q4VFZ2_3mut |
| PAPGSSGGS | 17, 668 | MLVMS_P03355_3mutA_WS |
| PAPEAAAKGSS | 17, 669 | PERV_Q4VFZ2_3mut |
| PAPEAAAK | 17, 670 | AVIRE_P03360_3mutA |
| GSSEAAAKGGG | 17, 671 | BAEVM_P10272_3mutA |
| GSSPAP | 17, 672 | MLVAV_P03356_3mutA |
| EAAAKEAAAKEAAAKEAAAK | 17, 673 | MLVFF_P26809_3mut |
| PAPGGSGSS | 17, 674 | MLVAV_P03356_3mutA |
| GGGGSGGGGSGGGGS | 17, 675 | PERV_Q4VFZ2_3mutA_WS |
| GSSGGSEAAAK | 17, 676 | MLVCB_P08361_3mutA |
| EAAAKGGS | 17, 677 | KORV_Q9TTC1-Pro_3mutA |
| EAAAKGGS | 17, 678 | MLVFF_P26809_3mutA |
| GGSPAP | 17, 679 | MLVMS_P03355_PLV919 |
| GGSGSS | 17, 680 | MLVMS_P03355_PLV919 |
| SGSETPGTSESATPES | 17, 681 | WMSV_P03359_3mut |
| GGGGGGG | 17, 682 | WMSV_P03359_3mut |
| GGSPAPGSS | 17, 683 | MLVCB_P08361_3mutA |
| GGGGSSGGS | 17, 684 | WMSV_P03359_3mut |
| PAPGGS | 17, 685 | MLVMS_P03355_PLV919 |
| PAPGSSGGS | 17, 686 | MLVCB_P08361_3mutA |
| EAAAKEAAAKEAAAKEAAAKEAAAK | 17, 687 | MLVFF_P26809_3mut |
| SGGSSGGSSGSETPGTSESATPESSGGSSGGSS | 17, 688 | PERV_Q4VFZ2_3mut |
| GGSGGSGGSGGSGGS | 17, 689 | BAEVM_P10272_3mutA |
| GSSEAAAK | 17, 690 | PERV_Q4VFZ2_3mut |
| EAAAKEAAAKEAAAKEAAAK | 17, 691 | KORV_Q9TTC1-Pro_3mutA |
| GGSGGSGGSGGSGGS | 17, 692 | MLVMS_P03355_3mut |
| PAPAPAPAPAPAP | 17, 693 | MLVMS_P03355_3mut |
| GGSPAPEAAAK | 17, 694 | MLVMS_P03355_PLV919 |
| EAAAK | 17, 695 | WMSV_P03359_3mutA |
| EAAAKGSSGGS | 17, 696 | MLVBM_Q7SVK7_3mutA_WS |
| GGSGGGGSS | 17, 697 | MLVMS_P03355_3mutA_WS |
| GGGEAAAKPAP | 17, 698 | MLVMS_P03355_3mut |
| EAAAKGGSGGG | 17, 699 | XMRV6_A1Z651_3mutA |
| GGGGGSEAAAK | 17, 700 | KORV_Q9TTC1-Pro_3mutA |
| GGGGGG | 17, 701 | BAEVM_P10272_3mutA |
| GGGGGG | 17, 702 | MLVMS_P03355_3mut |
| GGGGGGG | 17, 703 | MLVBM_Q7SVK7_3mutA_WS |
| AEAAAKEAAAKEAAAKEAAAKALEAEAAAKEAAAKEAAAKEAAAK | 17, 704 | AVIRE_P03360 |
| A | | |
| PAPGSSGGS | 17, 705 | PERV_Q4VFZ2_3mut |
| GGGGGS | 17, 706 | XMRV6_A1Z651_3mut |
| EAAAKPAP | 17, 707 | XMRV6_A1Z651_3mutA |
| GGG | | MLVMS_P03355_3mutA_WS |
| AEAAAKEAAAKEAAAKEAAAKALEAEAAAKEAAAKEAAAKEAAAK | 17, 709 | FLV_P10273_3mut |
| A | | |
| EAAAKGSSPAP | 17, 710 | MLVMS_P03355_3mut |
| SGSETPGTSESATPES | 17, 711 | BAEVM_P10272_3mutA |
| GGSPAPEAAAK | 17, 712 | MLVMS_P03355_3mut |
| GSSGSSGSSGSS | 17, 713 | MLVAV_P03356_3mutA |
| AEAAAKEAAAKEAAAKEAAAKALEAEAAAKEAAAKEAAAKEAAAK | 17, 714 | MLVMS_P03355_3mut |
| A | | |
| GGSPAP | 17, 715 | MLVCB_P08361_3mutA |
| GGGGGSEAAAK | 17, 716 | MLVMS_P03355_3mutA_WS |
| GGGGG | 17, 717 | MLVFF_P26809_3mutA |
| GSSEAAAK | 17, 718 | MLVAV_P03356_3mutA |
| GGS | | BAEVM_P10272_3mut |
| EAAAKGGSPAP | 17, 720 | MLVCB_P08361_3mutA |
| PAPAPAPAP | 17, 721 | FLV_P10273_3mutA |
| PAPGGGEAAAK | 17, 722 | MLVCB_P08361_3mutA |
| GGGGSSEAAAK | 17, 723 | MLVMS_P03355_3mutA_WS |
| GGGGG | 17, 724 | PERV_Q4VFZ2_3mutA_WS |
| GGSGGSGGSGGSGGSGGS | 17, 725 | PERV_Q4VFZ2_3mut |
| GGGGG | 17, 726 | MLVMS_P03355_3mut |
| PAPEAAAKGGG | 17, 727 | MLVBM_Q7SVK7_3mutA_WS |
| GSSGGGPAP | 17, 728 | XMRV6_A1Z651_3mutA |
| GSSGSSGSSGSSGSSGSS | 17, 729 | PERV_Q4VFZ2_3mutA_WS |
| EAAAKGGSPAP | 17, 730 | PERV_Q4VFZ2_3mut |
| GSSGGSEAAAK | 17, 731 | MLVMS_P03355_PLV919 |
| GSS | | PERV_Q4VFZ2_3mut |
| EAAAKGGS | 17, 733 | WMSV_P03359_3mutA |
| GGGGGSPAP | 17, 734 | PERV_Q4VFZ2_3mutA_WS |
| EAAAKGSS | 17, 735 | MLVMS_P03355_PLV919 |
| EAAAKGGGGSS | 17, 736 | KORV_Q9TTC1-Pro_3mutA |
| PAPGSSGGG | 17, 737 | PERV_Q4VFZ2_3mut |
| GGGGSSEAAAK | 17, 738 | MLVFF_P26809_3mut |
| PAPAPAP | 17, 739 | MLVMS_P03355_3mut |
| GSSGGSEAAAK | 17, 740 | XMRV6_A1Z651_3mut |
| PAPEAAAKGSS | 17, 741 | MLVMS_P03355_3mutA_WS |
| GGSGGSGGSGGSGGS | 17, 742 | MLVMS_P03355_3mutA_WS |
| GGSGSSPAP | 17, 743 | XMRV6_A1Z651_3mutA |
| GGGGSSPAP | 17, 744 | MLVMS_P03355_PLV919 |
| GGGGS | 17, 745 | MLVCB_P08361_3mutA |
| EAAAKEAAAKEAAAKEAAAK | 17, 746 | PERV_Q4VFZ2_3mutA_WS |
| EAAAKEAAAK | 17, 747 | KORV_Q9TTC1_3mutA |
| PAPGGGEAAAK | 17, 748 | BAEVM_P10272_3mutA |
| GSSGGSEAAAK | 17, 749 | XMRV6_A1Z651_3mutA |
| EAAAKEAAAKEAAAKEAAAKEAAAKEAAAK | 17, 750 | FLV_P10273_3mut |
| GSSEAAAKPAP | 17, 751 | MLVMS_P03355_3mutA_WS |
| EAAAKPAPGSS | 17, 752 | PERV_Q4VFZ2_3mutA_WS |
| GSSGGSPAP | 17, 753 | XMRV6_A1Z651_3mutA |
| GSSEAAAKGGG | 17, 754 | PERV_Q4VFZ2_3mut |
| GGGEAAAKGGS | 17, 755 | WMSV_P03359_3mutA |
| GSSEAAAKGGG | 17, 756 | MLVFF_P26809_3mut |
| PAPAPAP | 17, 757 | KORV_Q9TTC1-Pro_3mutA |
| EAAAKGGSPAP | 17, 758 | MLVMS_P03355_3mutA_WS |
| PAPGGSEAAAK | 17, 759 | PERV_Q4VFZ2_3mut |
| GGGGS | 17, 760 | MLVBM_Q7SVK7_3mutA_WS |
| EAAAKGSSGGG | 17, 761 | KORV_Q9TTC1_3mut |
| EAAAKGGGPAP | 17, 762 | MLVCB_P08361_3mutA |
| EAAAKGSS | 17, 763 | BAEVM_P10272_3mutA |
| GGSPAPGGG | 17, 764 | MLVBM_Q7SVK7_3mutA_WS |
| GGGGSEAAAKGGGGS | 17, 765 | MLVMS_P03355_3mutA_WS |
| GGGEAAAKGGS | 17, 766 | PERV_Q4VFZ2_3mutA_WS |
| EAAAKGGGGSS | 17, 767 | MLVMS_P03355_3mutA_WS |
| EAAAKGGGPAP | 17, 768 | MLVFF_P26809_3mut |
| GSSPAP | 17, 769 | PERV_Q4VFZ2_3mutA_WS |
| EAAAKGGS | 17, 770 | MLVMS_P03355_3mut |
| GGGGSS | 17, 771 | KORV_Q9TTC1-Pro_3mutA |
| EAAAKGSSPAP | 17, 772 | MLVMS_P03355_3mutA_WS |
| GGGPAP | 17, 773 | PERV_Q4VFZ2_3mut |
| EAAAKGSSGGS | 17, 774 | XMRV6_A1Z651_3mutA |
| PAPGGG | 17, 775 | MLVAV_P03356_3mutA |
| GSSPAPEAAAK | 17, 776 | BAEVM_P10272_3mutA |
| GGGPAP | 17, 777 | MLVBM_Q7SVK7_3mutA_WS |
| GSSGGGGGS | 17, 778 | AVIRE_P03360_3mutA |
| SGSETPGTSESATPES | 17, 779 | MLVMS_P03355_PLV919 |
| GGGPAP | 17, 780 | MLVFF_P26809_3mut |
| EAAAKGGGGSS | 17, 781 | XMRV6_A1Z651_3mutA |
| GGGGSSPAP | 17, 782 | XMRV6_A1Z651_3mut |
| GGGGSEAAAKGGGGS | 17, 783 | MLVMS_P03355_3mut |
| GSSPAP | 17, 784 | MLVBM_Q7SVK7_3mutA_WS |
| GGSGSSEAAAK | 17, 785 | FLV_P10273_3mutA |
| SGSETPGTSESATPES | 17, 786 | MLVBM_Q7SVK7_3mutA_WS |
| PAPGGG | 17, 787 | AVIRE_P03360_3mutA |
| GGGEAAAKPAP | 17, 788 | MLVMS_P03355_3mutA_WS |
| EAAAKGGSGSS | 17, 789 | PERV_Q4VFZ2_3mut |
| GGSPAPGGG | 17, 790 | MLVAV_P03356_3mutA |
| PAPGGSGSS | 17, 791 | BAEVM_P10272_3mutA |
| GSSGGSPAP | 17, 792 | MLVFF_P26809_3mutA |
| EAAAKGSSGGG | 17, 793 | PERV_Q4VFZ2_3mut |
| GGGGSGGGGS | 17, 794 | PERV_Q4VFZ2_3mutA_WS |
| GSSGGGGGS | 17, 795 | BAEVM_P10272_3mutA |
| GGGGSSGGS | 17, 796 | MLVBM_Q7SVK7_3mutA_WS |
| EAAAKGGS | 17, 797 | PERV_Q4VFZ2_3mutA_WS |
| GSSGSSGSSGSS | 17, 798 | MLVMS_P03355_3mut |
| GGS | | MLVMS_P03355_3mutA_WS |
| GSSGGSEAAAK | 17, 800 | MLVBM_Q7SVK7_3mutA_WS |
| SGGSSGGSSGSETPGTSESATPESSGGSSGGSS | 17, 801 | XMRV6_A1Z651 |
| GGGGG | 17, 802 | FLV_P10273_3mutA |
| PAPEAAAKGSS | 17, 803 | PERV_Q4VFZ2_3mut |
| GGGGGG | 17, 804 | WMSV_P03359_3mut |
| EAAAKGGG | 17, 805 | BAEVM_P10272_3mutA |
| GGGGSS | 17, 806 | MLVMS_P03355_3mutA_WS |
| GSSGGGEAAAK | 17, 807 | KORV_Q9TTC1_3mut |
| GGSGSS | 17, 808 | AVIRE_P03360_3mutA |
| EAAAKPAP | 17, 809 | MLVMS_P03355_3mut |
| EAAAKEAAAKEAAAK | 17, 810 | FLV_P10273_3mutA |
| GGGG | 17, 811 | XMRV6_A1Z651_3mutA |
| GSSPAPGGS | 17, 812 | BAEVM_P10272_3mutA |
| GSSGGGGGS | 17, 813 | MLVFF_P26809_3mutA |
| GGGGSSGGS | 17, 814 | MLVAV_P03356_3mutA |
| GGS | | PERV_Q4VFZ2_3mut |
| GGGGG | 17, 816 | WMSV_P03359_3mutA |
| GSSGSSGSSGSSGSSGSS | 17, 817 | FLV_P10273_3mutA |
| PAPGGGGSS | 17, 818 | MLVAV_P03356_3mutA |
| GGGGGGGG | 17, 819 | BAEVM_P10272_3mutA |
| SGSETPGTSESATPES | 17, 820 | MLVCB_P08361_3mutA |
| PAPGGG | 17, 821 | BAEVM_P10272_3mutA |
| GSSGSSGSS | 17, 822 | MLVCB_P08361_3mutA |
| GGSGSS | 17, 823 | MLVMS_P03355_3mutA_WS |
| EAAAKGGGGSEAAAK | 17, 824 | WMSV_P03359_3mutA |
| GGGGGGGG | 17, 825 | FLV_P10273_3mutA |
| GSSGSS | 17, 826 | MLVMS_P03355_3mutA_WS |
| PAPEAAAKGGS | 17, 827 | XMRV6_A1Z651_3mutA |
| EAAAKEAAAK | 17, 828 | MLVMS_P03355_3mut |
| GGGGSGGGGSGGGGS | 17, 829 | BAEVM_P10272_3mutA |
| EAAAKGSSPAP | 17, 830 | MLVMS_P03355_PLV919 |
| GGGGSSEAAAK | 17, 831 | MLVMS_P03355_3mut |
| GGGGSSEAAAK | 17, 832 | BAEVM_P10272_3mutA |
| PAPGGSGSS | 17, 833 | PERV_Q4VFZ2_3mut |
| GGSGGGEAAAK | 17, 834 | MLVFF_P26809_3mut |
| PAPEAAAKGGS | 17, 835 | PERV_Q4VFZ2_3mut |
| GGGPAPGSS | 17, 836 | AVIRE_P03360_3mut |
| PAPGGSGGG | 17, 837 | PERV_Q4VFZ2_3mutA_WS |
| GGGGGGGG | 17, 838 | PERV_Q4VFZ2_3mutA_WS |
| GSSEAAAK | 17, 839 | MLVMS_P03355_3mutA_WS |
| GGGGSGGGGSGGGGS | 17, 840 | PERV_Q4VFZ2_3mutA_WS |
| EAAAKGGS | 17, 841 | MLVMS_P03355_3mut |
| GGGGGSGSS | 17, 842 | MLVCB_P08361_3mut |
| GGGPAP | 17, 843 | KORV_Q9TTC1-Pro_3mutA |
| EAAAKPAPGGG | 17, 844 | MLVCB_P08361_3mut |
| GSSGGSPAP | 17, 845 | MLVCB_P08361_3mutA |
| SGGSSGGSSGSETPGTSESATPESSGGSSGGSS | 17, 846 | MLVMS_P03355_3mut |
| PAPAPAPAP | 17, 847 | MLVMS_P03355_3mut |
| GSSGGS | 17, 848 | XMRV6_A1Z651_3mutA |
| GSSEAAAKGGG | 17, 849 | MLVMS_P03355_3mut |
| GGSGSSPAP | 17, 850 | MLVMS_P03355_3mutA_WS |
| GSSEAAAKGGS | 17, 851 | MLVMS_P03355_PLV919 |
| EAAAKEAAAKEAAAKEAAAKEAAAK | 17, 852 | BAEVM_P10272_3mut |
| PAPGGGGSS | 17, 853 | KORV_Q9TTC1_3mutA |
| EAAAKGSS | 17, 854 | MLVMS_P03355_3mutA_WS |
| AEAAAKEAAAKEAAAKEAAAKALEAEAAAKEAAAKEAAAKEAAAK | 17, 855 | FFV_O93209_2mut |
| A | | |
| GGSGGSGGSGGSGGSGGS | 17, 856 | BAEVM_P10272_3mutA |
| GGGGGG | 17, 857 | MLVMS_P03355_PLV919 |
| PAPEAAAK | 17, 858 | BAEVM_P10272_3mutA |
| GGSGSSEAAAK | 17, 859 | MLVAV_P03356_3mutA |
| GGG | | MLVCB_P08361_3mutA |
| GGGGG | 17, 861 | MLVCB_P08361_3mutA |
| GGSGGSGGSGGS | 17, 862 | KORV_Q9TTC1-Pro_3mutA |
| GSSGSSGSSGSSGSSGSS | 17, 863 | XMRV6_A1Z651_3mutA |
| GSSEAAAKPAP | 17, 864 | FLV_P10273_3mutA |
| GGGEAAAKPAP | 17, 865 | MLVCB_P08361_3mutA |
| GSSGSSGSS | 17, 866 | MLVMS_P03355_3mutA_WS |
| PAPAPAPAP | 17, 867 | MLVMS_P03355_PLV919 |
| EAAAKGGG | 17, 868 | MLVMS_P03355_PLV919 |
| PAPAPAPAPAPAP | 17, 869 | FLV_P10273_3mutA |
| EAAAKGGSGSS | 17, 870 | MLVMS_P03355_3mut |
| GGGGGG | 17, 871 | PERV_Q4VFZ2_3mutA_WS |
| PAPGGG | 17, 872 | MLVCB_P08361_3mutA |
| GGGGGSGSS | 17, 873 | KORV_Q9TTC1_3mutA |
| GGGGSGGGGSGGGGSGGGGS | 17, 874 | XMRV6_A1Z651_3mut |
| GGSGGSGGS | 17, 875 | KORV_Q9TTC1-Pro_3mutA |
| EAAAKPAPGGG | 17, 876 | MLVMS_P03355_3mutA_WS |
| AEAAAKEAAAKEAAAKEAAAKALEAEAAAKEAAAKEAAAKEAAAK | 17, 877 | XMRV6_A1Z651 |
| A | | |
| GGGGSGGGGSGGGGSGGGGSGGGGSGGGGS | 17, 878 | FLV_P10273_3mutA |
| EAAAKGGGGSEAAAK | 17, 879 | PERV_Q4VFZ2_3mutA_WS |
| GGGPAPGSS | 17, 880 | AVIRE_P03360_3mutA |
| GGGGG | 17, 881 | MLVMS_P03355_3mutA_WS |
| GGGGSGGGGSGGGGSGGGGSGGGGSGGGGS | 17, 882 | MLVMS_P03355_3mut |
| GGGGSGGGGS | 17, 883 | MLVMS_P03355_3mutA_WS |
| EAAAKGGSPAP | 17, 884 | XMRV6_A1Z651_3mutA |
| EAAAKGSSPAP | 17, 885 | AVIRE_P03360_3mutA |
| PAPGGSGSS | 17, 886 | KORV_Q9TTC1-Pro_3mutA |
| GSS | | MLVBM_Q7SVK7_3mutA_WS |
| GSS | | WMSV_P03359_3mut |
| GGGPAPGSS | 17, 889 | MLVFF_P26809_3mutA |
| EAAAKPAP | 17, 890 | MLVMS_P03355_3mut |
| GSSPAPEAAAK | 17, 891 | FLV_P10273_3mutA |
| GGSPAPGSS | 17, 892 | MLVBM_Q7SVK7_3mutA_WS |
| GGGGGSEAAAK | 17, 893 | XMRV6_A1Z651_3mut |
| PAPEAAAKGGG | 17, 894 | WMSV_P03359_3mutA |
| PAPGGG | 17, 895 | PERV_Q4VFZ2_3mut |
| GGSPAPEAAAK | 17, 896 | WMSV_P03359_3mutA |
| GGSGGGGSS | 17, 897 | PERV_Q4VFZ2_3mut |
| EAAAKGGGGSS | 17, 898 | PERV_Q4VFZ2_3mut |
| EAAAKGGSPAP | 17, 899 | AVIRE_P03360_3mut |
| GGSGGGGSS | 17, 900 | WMSV_P03359_3mutA |
| PAPGSSEAAAK | 17, 901 | MLVFF_P26809_3mut |
| GSSEAAAK | 17, 902 | MLVMS_P03355_PLV919 |
| GSAGSAAGSGEF | 17, 903 | AVIRE_P03360_3mutA |
| EAAAKGGSGSS | 17, 904 | MLVMS_P03355_3mut |
| GGSEAAAKPAP | 17, 905 | MLVMS_P03355_PLV919 |
| GGGGSGGGGSGGGGSGGGGSGGGGS | 17, 906 | MLVFF_P26809_3mutA |
| PAPGSSEAAAK | 17, 907 | PERV_Q4VFZ2_3mutA_WS |
| GGGGSSPAP | 17, 908 | MLVMS_P03355_3mutA_WS |
| PAPAPAP | 17, 909 | MLVCB_P08361_3mutA |
| EAAAKPAPGGG | 17, 910 | MLVBM_Q7SVK7_3mutA_WS |
| GGGPAPGSS | 17, 911 | BAEVM_P10272_3mutA |
| PAP | | MLVMS_P03355_3mutA_WS |
| PAPGGSGGG | 17, 913 | MLVMS_P03355_3mutA_WS |
| GGSGGSGGSGGSGGS | 17, 914 | MLVBM_Q7SVK7_3mutA_WS |
| PAPAPAPAP | 17, 915 | XMRV6_A1Z651_3mut |
| GSSPAPGGG | 17, 916 | MLVMS_P03355_3mutA_WS |
| GSSPAPGGG | 17, 917 | MLVMS_P03355_3mut |
| PAPGGG | 17, 918 | MLVMS_P03355_PLV919 |
| GGGEAAAKGSS | 17, 919 | WMSV_P03359_3mut |
| EAAAKGSS | 17, 920 | KORV_Q9TTC1-Pro_3mutA |
| EAAAKGGS | 17, 921 | PERV_Q4VFZ2_3mut |
| EAAAKEAAAKEAAAKEAAAKEAAAK | 17, 922 | PERV_Q4VFZ2_3mut |
| PAPEAAAKGGG | 17, 923 | MLVMS_P03355_PLV919 |
| EAAAKGSSGGG | 17, 924 | MLVFF_P26809_3mut |
| AEAAAKEAAAKEAAAKEAAAKALEAEAAAKEAAAKEAAAKEAAAK | 17, 925 | PERV_Q4VFZ2 |
| A | | |
| EAAAKEAAAKEAAAKEAAAKEAAAKEAAAK | 17, 926 | MLVAV_P03356_3mutA |
| GSSGGSGGG | 17, 927 | MLVFF_P26809_3mut |
| GSSGSSGSSGSS | 17, 928 | PERV_Q4VFZ2_3mutA_WS |
| GGSPAPGGG | 17, 929 | MLVMS_P03355_PLV919 |
| GSS | | BAEVM_P10272_3mut |
| GGGPAPGSS | 17, 931 | MLVMS_P03355_3mutA_WS |
| GGGGSS | 17, 932 | KORV_Q9TTC1_3mutA |
| GSSGGSGGG | 17, 933 | BAEVM_P10272_3mutA |
| EAAAKEAAAKEAAAK | 17, 934 | MLVCB_P08361_3mutA |
| SGGSSGGSSGSETPGTSESATPESSGGSSGGSS | 17, 935 | FLV_P10273_3mutA |
| PAPGGGGGS | 17, 936 | PERV_Q4VFZ2_3mut |
| PAPAPAPAPAP | 17, 937 | KORV_Q9TTC1-Pro_3mutA |
| EAAAK | 17, 938 | MLVMS_P03355_3mutA_WS |
| GGG | | MLVCB_P08361_3mut |
| GGSEAAAKGGG | 17, 940 | BAEVM_P10272_3mutA |
| GGGGGSGSS | 17, 941 | MLVAV_P03356_3mutA |
| EAAAKGSSPAP | 17, 942 | MLVBM_Q7SVK7_3mutA_WS |
| GGSGGSGGS | 17, 943 | XMRV6_A1Z651_3mut |
| EAAAKPAPGGG | 17, 944 | KORV_Q9TTC1-Pro_3mutA |
| GGGPAPEAAAK | 17, 945 | FLV_P10273_3mutA |
| GGSPAPEAAAK | 17, 946 | MLVMS_P03355_3mutA_WS |
| GGSGGSGGSGGSGGS | 17, 947 | MLVFF_P26809_3mut |
| EAAAKGGSGSS | 17, 948 | MLVMS_P03355_PLV919 |
| GGGEAAAKGGS | 17, 949 | MLVBM_Q7SVK7_3mutA_WS |
| PAPAPAPAP | 17, 950 | BAEVM_P10272_3mutA |
| EAAAKEAAAKEAAAKEAAAK | 17, 951 | MLVMS_P03355_3mut |
| EAAAKPAP | 17, 952 | XMRV6_A1Z651_3mut |
| EAAAKEAAAK | 17, 953 | MLVBM_Q7SVK7_3mutA_WS |
| EAAAKGGG | 17, 954 | BAEVM_P10272_3mut |
| EAAAKGSS | 17, 955 | MLVAV_P03356_3mutA |
| EAAAKEAAAKEAAAKEAAAKEAAAKEAAAK | 17, 956 | MLVFF_P26809_3mut |
| GGGPAPGSS | 17, 957 | PERV_Q4VFZ2_3mutA_WS |
| GGGG | 17, 958 | PERV_Q4VFZ2_3mut |
| EAAAKGGSGSS | 17, 959 | MLVMS_P03355_PLV919 |
| GGGGSGGGGSGGGGS | 17, 960 | MLVMS_P03355_3mutA_WS |
| EAAAK | 17, 961 | MLVMS_P03355_3mutA_WS |
| GGGGSS | 17, 962 | PERV_Q4VFZ2 |
| PAPEAAAKGGS | 17, 963 | MLVCB_P08361_3mut |
| GSS | | MLVMS_P03355_3mut |
| GSAGSAAGSGEF | 17, 965 | MLVFF_P26809_3mutA |
| EAAAKEAAAKEAAAKEAAAKEAAAKEAAAK | 17, 966 | KORV_Q9TTC1-Pro_3mut |
| GGGGSGGGGS | 17, 967 | AVIRE_P03360_3mutA |
| EAAAK | 17, 968 | MLVMS_P03355_3mut |
| GGGPAPGGS | 17, 969 | PERV_Q4VFZ2_3mut |
| GGGGSGGGGSGGGGS | 17, 970 | MLVMS_P03355_PLV919 |
| PAPGGG | 17, 971 | MLVMS_P03355_3mutA_WS |
| GGGEAAAKPAP | 17, 972 | PERV_Q4VFZ2_3mutA_WS |
| EAAAKPAPGSS | 17, 973 | KORV_Q9TTC1-Pro_3mutA |
| PAPGSS | 17, 974 | KORV_Q9TTC1_3mutA |
| GSAGSAAGSGEF | 17, 975 | PERV_Q4VFZ2_3mut |
| PAPGGGGSS | 17, 976 | KORV_Q9TTC1-Pro_3mutA |
| GSSGGGEAAAK | 17, 977 | MLVCB_P08361_3mutA |
| GSS | | AVIRE_P03360_3mutA |
| GSSGSSGSSGSS | 17, 979 | XMRV6_A1Z651_3mutA |
| PAPEAAAKGGG | 17, 980 | MLVMS_P03355_PLV919 |
| GGGPAPEAAAK | 17, 981 | MLVCB_P08361_3mutA |
| PAPGGGGGS | 17, 982 | MLVCB_P08361_3mutA |
| EAAAKEAAAKEAAAKEAAAK | 17, 983 | PERV_Q4VFZ2_3mutA_WS |
| GGGGGSPAP | 17, 984 | MLVFF_P26809_3mutA |
| GSSGSSGSSGSSGSS | 17, 985 | PERV_Q4VFZ2 |
| GSSPAPEAAAK | 17, 986 | MLVMS_P03355_PLV919 |
| GSSGSSGSSGSSGSSGSS | 17, 987 | MLVBM_Q7SVK7_3mutA_WS |
| GSSGSSGSSGSSGSSGSS | 17, 988 | MLVMS_P03355_3mutA_WS |
| GGSPAPEAAAK | 17, 989 | MLVAV_P03356_3mutA |
| GSSGGG | 17, 990 | BAEVM_P10272_3mut |
| EAAAKGSSGGS | 17, 991 | KORV_Q9TTC1-Pro_3mutA |
| GGSGSSEAAAK | 17, 992 | MLVMS_P03355_3mutA_WS |
| GGGPAPEAAAK | 17, 993 | MLVFF_P26809_3mutA |
| GGGPAPGGS | 17, 994 | MLVMS_P03355_3mutA_WS |
| GGGGG | 17, 995 | MLVMS_P03355_PLV919 |
| GGGEAAAKPAP | 17, 996 | MLVBM_Q7SVK7_3mutA_WS |
| GGGGSGGGGS | 17, 997 | WMSV_P03359_3mut |
| GGGPAPEAAAK | 17, 998 | PERV_Q4VFZ2_3mut |
| GGSGSSEAAAK | 17, 999 | MLVMS_P03355_PLV919 |
| EAAAKGGGPAP | 18, 000 | MLVMS_P03355_3mutA_WS |
| GSSGSSGSSGSSGSS | 18, 001 | KORV_Q9TTC1-Pro_3mutA |
| PAPAP | 18, 002 | WMSV_P03359_3mutA |
| GGSPAPGSS | 18, 003 | MLVAV_P03356_3mutA |
| GGSGGGPAP | 18, 004 | MLVMS_P03355_3mut |
| GGSPAP | 18, 005 | MLVMS_P03355_PLV919 |
| EAAAKGGSPAP | 18, 006 | PERV_Q4VFZ2_3mut |
| GSSPAPGGG | 18, 007 | KORV_Q9TTC1-Pro_3mutA |
| GSAGSAAGSGEF | 18, 008 | MLVMS_P03355_3mut |
| GGSPAP | 18, 009 | PERV_Q4VFZ2_3mut |
| GSSGSS | 18, 010 | KORV_Q9TTC1-Pro_3mut |
| GGGPAPGSS | 18, 011 | MLVMS_P03355_3mutA_WS |
| AEAAAKEAAAKEAAAKEAAAKALEAEAAAKEAAAKEAAAKEAAAK | 18, 012 | FOAMV_P14350 |
| A | | |
| PAPGSSGGG | 18, 013 | MLVMS_P03355_PLV919 |
| GGSEAAAKPAP | 18, 014 | BAEVM_P10272_3mutA |
| GGGGGS | 18, 015 | MLVCB_P08361_3mutA |
| PAPEAAAKGGS | 18, 016 | MLVMS_P03355_3mutA_WS |
| EAAAKEAAAKEAAAKEAAAKEAAAKEAAAK | 18, 017 | BAEVM_P10272_3mutA |
| GGSEAAAK | 18, 018 | BAEVM_P10272_3mutA |
| GSSPAPEAAAK | 18, 019 | MLVMS_P03355_3mutA_WS |
| PAPGGG | 18, 020 | WMSV_P03359_3mut |
| EAAAKPAP | 18, 021 | PERV_Q4VFZ2_3mut |
| GSSGSSGSSGSSGSS | 18, 022 | WMSV_P03359_3mut |
| PAPGGG | 18, 023 | MLVBM_Q7SVK7_3mutA_WS |
| GGSGGGEAAAK | 18, 024 | BAEVM_P10272_3mutA |
| PAPGGS | 18, 025 | MLVMS_P03355_3mut |
| GGSGGSGGSGGS | 18, 026 | MLVBM_Q7SVK7_3mutA_WS |
| EAAAKEAAAKEAAAKEAAAK | 18, 027 | PERV_Q4VFZ2_3mut |
| GGSEAAAKGGG | 18, 028 | WMSV_P03359_3mutA |
| GGGPAP | 18, 029 | BAEVM_P10272_3mutA |
| GGGGSGGGGSGGGGSGGGGSGGGGSGGGGS | 18, 030 | XMRV6_A1Z651_3mut |
| GGSPAPGSS | 18, 031 | KORV_Q9TTC1_3mut |
| GGGPAPGSS | 18, 032 | MLVMS_P03355_3mut |
| GGGGSSGGS | 18, 033 | BAEVM_P10272_3mutA |
| GGGEAAAKGSS | 18, 034 | KORV_Q9TTC1-Pro_3mutA |
| PAPAP | 18, 035 | MLVBM_Q7SVK7_3mutA_WS |
| GGSPAPGGG | 18, 036 | PERV_Q4VFZ2_3mut |
| PAPGSS | 18, 037 | PERV_Q4VFZ2_3mutA_WS |
| GSSGGSPAP | 18, 038 | MLVBM_Q7SVK7_3mutA_WS |
| EAAAKGGGGSEAAAK | 18, 039 | PERV_Q4VFZ2_3mut |
| GSSEAAAKGGS | 18, 040 | KORV_Q9TTC1-Pro_3mut |
| PAPAPAPAP | 18, 041 | KORV_Q9TTC1-Pro_3mutA |
| GGSEAAAKPAP | 18, 042 | WMSV_P03359_3mutA |
| PAPGGS | 18, 043 | FLV_P10273_3mutA |
| EAAAKGGGPAP | 18, 044 | PERV_Q4VFZ2_3mut |
| GGSGSSGGG | 18, 045 | AVIRE_P03360_3mutA |
| EAAAKGGSGSS | 18, 046 | BAEVM_P10272_3mutA |
| SGGSSGGSSGSETPGTSESATPESSGGSSGGSS | 18, 047 | MLVCB_P08361_3mutA |
| GSSEAAAKGGS | 18, 048 | XMRV6_A1Z651_3mutA |
| GGGGG | 18, 049 | BAEVM_P10272_3mutA |
| GGGGSGGGGSGGGGSGGGGSGGGGSGGGGS | 18, 050 | SFV3L_P27401_2mutA |
| GGGEAAAKGSS | 18, 051 | MLVMS_P03355_PLV919 |
| EAAAKGGGGSEAAAK | 18, 052 | KORV_Q9TTC1_3mutA |
| EAAAKGGG | 18, 053 | AVIRE_P03360_3mut |
| GGSGGG | 18, 054 | MLVMS_P03355_3mutA_WS |
| GGSGSSGGG | 18, 055 | MLVMS_P03355_PLV919 |
| GGGGSGGGGSGGGGSGGGGSGGGGSGGGGS | 18, 056 | KORV_Q9TTC1_3mut |
| GGGGSEAAAKGGGGS | 18, 057 | KORV_Q9TTC1_3mutA |
| PAPAPAPAPAP | 18, 058 | FLV_P10273_3mutA |
| GGS | | MLVBM_Q7SVK7_3mutA_WS |
| GGGGGSEAAAK | 18, 060 | MLVBM_Q7SVK7_3mutA_WS |
| GSSGSSGSSGSSGSS | 18, 061 | MLVMS_P03355_3mutA_WS |
| EAAAKEAAAKEAAAKEAAAKEAAAK | 18, 062 | MLVMS_P03355_3mut |
| GGSGSSGGG | 18, 063 | PERV_Q4VFZ2_3mut |
| PAP | | MLVFF_P26809_3mut |
| GSSPAPEAAAK | 18, 065 | MLVAV_P03356_3mutA |
| EAAAKGGGGSS | 18, 066 | MLVMS_P03355_3mut |
| GGGEAAAKGGS | 18, 067 | XMRV6_A1Z651_3mut |
| GGSGGGPAP | 18, 068 | MLVBM_Q7SVK7_3mutA_WS |
| GSAGSAAGSGEF | 18, 069 | BAEVM_P10272_3mutA |
| GSSEAAAK | 18, 070 | MLVCB_P08361_3mut |
| PAPGSS | 18, 071 | MLVMS_P03355_3mut |
| EAAAKEAAAKEAAAK | 18, 072 | MLVAV_P03356_3mutA |
| GSAGSAAGSGEF | 18, 073 | XMRV6_A1Z651_3mutA |
| GSSGSSGSSGSS | 18, 074 | BAEVM_P10272_3mutA |
| AEAAAKEAAAKEAAAKEAAAKALEAEAAAKEAAAKEAAAKEAAAK | 18, 075 | KORV_Q9TTC1-Pro_3mut |
| A | | |
| GGGGSSEAAAK | 18, 076 | WMSV_P03359_3mut |
| GSSGGGEAAAK | 18, 077 | MLVBM_Q7SVK7_3mutA_WS |
| EAAAKPAP | 18, 078 | MLVFF_P26809_3mutA |
| GGSPAPGGG | 18, 079 | KORV_Q9TTC1_3mutA |
| PAPEAAAK | 18, 080 | FLV_P10273_3mutA |
| GSSGSSGSS | 18, 081 | MLVBM_Q7SVK7_3mutA_WS |
| GSSGGGEAAAK | 18, 082 | FLV_P10273_3mutA |
| GGSPAP | 18, 083 | MLVBM_Q7SVK7_3mutA_WS |
| GSAGSAAGSGEF | 18, 084 | KORV_Q9TTC1-Pro_3mutA |
| PAPGGSEAAAK | 18, 085 | MLVMS_P03355_PLV919 |
| GGSPAPEAAAK | 18, 086 | MLVBM_Q7SVK7_3mutA_WS |
| GGGGGSPAP | 18, 087 | MLVBM_Q7SVK7_3mutA_WS |
| EAAAKGSSPAP | 18, 088 | WMSV_P03359_3mut |
| EAAAKGGGPAP | 18, 089 | MLVBM_Q7SVK7_3mutA_WS |
| PAPGSS | 18, 090 | KORV_Q9TTC1-Pro_3mutA |
| GGSGSSGGG | 18, 091 | BAEVM_P10272_3mut |
| SGGSSGGSSGSETPGTSESATPESSGGSSGGSS | 18102 | FFV_O93209-Pro_2mut |
| GGSGGSGGSGGSGGSGGS | 18103 | WMSV_P03359_3mutA |
| GGSGGSGGS | 18104 | PERV_Q4VFZ2_3mutA_WS |
| GGGGG | 18105 | PERV_Q4VFZ2_3mutA_WS |
| GGGPAP | 18106 | FLV_P10273_3mutA |
| PAPGGSGGG | 18107 | XMRV6_A1Z651_3mutA |
| GGGGSEAAAKGGGGS | 18108 | XMRV6_A1Z651_3mut |
| EAAAKGSSGGG | 18109 | KORV_Q9TTC1-Pro_3mutA |
| GSSGGSEAAAK | 18110 | WMSV_P03359_3mut |
| EAAAKGGSGSS | 18111 | PERV_Q4VFZ2_3mut |
| PAPAPAPAPAP | 18112 | PERV_Q4VFZ2_3mut |
| GGGGSGGGGSGGGGSGGGGSGGGGSGGGGS | 18113 | MLVMS_P03355_3mutA_WS |
| GGGGGGG | 18114 | KORV_Q9TTC1_3mutA |
| EAAAK | 18115 | KORV_Q9TTC1-Pro_3mutA |
| GGGEAAAKGGS | 18116 | KORV_Q9TTC1-Pro_3mutA |
| GGGEAAAKGGS | 18117 | PERV_Q4VFZ2_3mutA_WS |
| GGGGGSPAP | 18118 | XMRV6_A1Z651_3mut |
| GGGGSGGGGSGGGGSGGGGS | 18119 | MLVFF_P26809_3mut |
| GGGGGGG | 18120 | MLVFF_P26809_3mut |
| PAPAPAPAPAPAP | 18121 | AVIRE_P03360_3mutA |
| GSSPAPGGG | 18122 | FLV_P10273_3mutA |
| GGGGGSPAP | 18123 | MLVMS_P03355_3mutA_WS |
| GGGGSGGGGSGGGGS | 18124 | MLVMS_P03355_3mut |
| GGGGSGGGGSGGGGS | 18125 | KORV_Q9TTC1_3mut |
| GSSEAAAKGGS | 18126 | MLVAV_P03356_3mutA |
| GSSGSSGSSGSSGSS | 18127 | MLVMS_P03355_3mut |
| EAAAKGGGGGS | 18128 | PERV_Q4VFZ2_3mutA_WS |
| GSSGGGGGS | 18129 | PERV_Q4VFZ2_3mut |
| GGGEAAAKPAP | 18130 | MLVMS_P03355_3mut |
| GSSGGSPAP | 18131 | PERV_Q4VFZ2_3mutA_WS |
| GSSGGGPAP | 18132 | BAEVM_P10272_3mutA |
| GGGGGSGSS | 18133 | MLVMS_P03355_PLV919 |
| AEAAAKEAAAKEAAAKEAAAKALEAEAAAKEAAAKEAAAKEAAAK | 18134 | BAEVM_P10272_3mut |
| A | | |
| PAPEAAAK | 18135 | MLVMS_P03355_3mut |
| GGGGSGGGGSGGGGS | 18136 | FLV_P10273_3mutA |
| GGSGSSGGG | 18137 | WMSV_P03359_3mutA |
| EAAAKGGS | 18138 | PERV_Q4VFZ2_3mut |
| EAAAKGSSPAP | 18139 | MLVCB_P08361_3mut |
| EAAAKGGSGSS | 18140 | WMSV_P03359_3mutA |
| GSSGSS | 18141 | PERV_Q4VFZ2_3mutA_WS |
| PAPAPAPAP | 18142 | MLVMS_P03355_PLV919 |
| GGSGGG | 18143 | PERV_Q4VFZ2_3mutA_WS |
| GSS | | MLVBM_Q7SVK7_3mutA_WS |
| PAP | | KORV_Q9TTC1-Pro_3mutA |
| GGSGSSEAAAK | 18144 | MLVFF_P26809_3mut |
| PAPEAAAKGSS | 18145 | KORV_Q9TTC1-Pro_3mutA |
| GGSGGS | 18146 | MLVCB_P08361_3mutA |
| GGGGGGG | 18147 | PERV_Q4VFZ2_3mutA_WS |
| GGSPAPEAAAK | 18148 | MLVBM_Q7SVK7_3mut |
| EAAAKEAAAKEAAAKEAAAKEAAAKEAAAK | 18149 | KORV_Q9TTC1_3mutA |
| GGSPAP | 18150 | MLVMS_P03355_3mut |
| GGSEAAAKGGG | 18151 | PERV_Q4VFZ2_3mut |
| GGGGSGGGGS | 18152 | FLV_P10273_3mutA |
| GGGEAAAK | 18153 | BAEVM_P10272_3mutA |
| GGGGGGGGSGGGGGGGGSGGGGSGGGGS | 18154 | SFV3L_P27401_2mut |
| GGSEAAAKPAP | 18155 | KORV_Q9TTC1-Pro_3mutA |
| GSSGGGEAAAK | 18156 | MLVMS_P03355_PLV919 |
| GGGGGSEAAAK | 18157 | MLVMS_P03355_PLV919 |
| EAAAKGGSGGG | 18158 | MLVMS_P03355_3mutA_WS |
| GGGGSSPAP | 18159 | MLVAV_P03356_3mutA |
| EAAAKEAAAK | 18160 | MLVMS_P03355_3mutA_WS |
| AEAAAKEAAAKEAAAKEAAAKALEAEAAAKEAAAKEAAAKEAAAK | 18161 | SFV3L_P27401_2mut |
| A | | |
| GSSGSSGSSGSSGSS | 18162 | MLVMS_P03355_PLV919 |
| GSSGGG | 18163 | KORV_Q9TTC1-Pro_3mutA |
| GSSGGS | 18164 | MLVFF_P26809_3mutA |
| GGGGSGGGGS | 18165 | XMRV6_A1Z651_3mutA |
| PAPGSS | 18166 | MLVBM_Q7SVK7_3mutA_WS |
| GGGPAPEAAAK | 18167 | XMRV6_A1Z651_3mutA |
| EAAAKGGS | 18168 | MLVFF_P26809_3mut |
| GSS | | KORV_Q9TTC1_3mutA |
| GGGG | 18169 | PERV_Q4VFZ2_3mut |
| GGGGGSEAAAK | 18170 | AVIRE_P03360_3mutA |
| GSSGSSGSSGSSGSS | 18171 | MLVMS_P03355_PLV919 |
| PAPGGSGGG | 18172 | PERV_Q4VFZ2_3mut |
| GGGPAP | 18173 | PERV_Q4VFZ2_3mut |
| GGGPAPEAAAK | 18174 | AVIRE_P03360_3mutA |
| GGGEAAAK | 18175 | MLVCB_P08361_3mut |
| GGG | | MLVFF_P26809_3mutA |
| EAAAKPAPGSS | 18176 | XMRV6_A1Z651_3mutA |
| GGSGSSEAAAK | 18177 | PERV_Q4VFZ2_3mutA_WS |
| EAAAKGSS | 18178 | MLVMS_P03355_3mut |
| GGSGSSEAAAK | 18179 | BAEVM_P10272_3mut |
| GGSGGG | 18180 | MLVBM_Q7SVK7_3mutA_WS |
| GGGPAP | 18181 | MLVMS_P03355_PLV919 |
| GGSPAPGGG | 18182 | PERV_Q4VFZ2_3mutA_WS |
| GGGGGSEAAAK | 18183 | MLVFF_P26809_3mutA |
| EAAAKGSSGGS | 18184 | MLVBM_Q7SVK7_3mut |
| PAPAP | 18185 | XMRV6_A1Z651_3mut |
| GSSPAPGGS | 18186 | MLVBM_Q7SVK7_3mutA_WS |
| GSSEAAAKGGG | 18187 | WMSV_P03359_3mutA |
| EAAAKGGGGGS | 18188 | PERV_Q4VFZ2_3mut |
| GSSGSSGSSGSSGSS | 18189 | MLVCB_P08361_3mutA |
| EAAAKGGGGSS | 18190 | PERV_Q4VFZ2_3mut |
| EAAAKGSS | 18191 | PERV_Q4VFZ2_3mut |
| EAAAKEAAAKEAAAKEAAAKEAAAKEAAAK | 18192 | AVIRE_P03360_3mutA |
| EAAAKGGS | 18193 | MLVCB_P08361_3mut |
| GSSGGSEAAAK | 18194 | MLVAV_P03356_3mutA |
| EAAAKPAPGGS | 18195 | PERV_Q4VFZ2_3mut |
| GGSGGS | 18196 | MLVAV_P03356_3mutA |
| EAAAKGSSGGG | 18197 | AVIRE_P03360_3mutA |
| GGSGGSGGSGGS | 18198 | PERV_Q4VFZ2_3mut |
| GGGGGGGG | 18199 | KORV_Q9TTC1_3mutA |
| GGSGSSEAAAK | 18200 | MLVCB_P08361_3mutA |
| EAAAKGGG | 18201 | MLVBM_Q7SVK7_3mutA_WS |
| GGGGSGGGGSGGGGS | 18202 | MLVCB_P08361_3mut |
| GGSGGSGGSGGS | 18203 | PERV_Q4VFZ2_3mutA_WS |
| PAPAPAPAPAP | 18204 | WMSV_P03359_3mut |
| EAAAKEAAAKEAAAKEAAAK | 18205 | PERV_Q4VFZ2_3mut |
| GGSGGSGGS | 18206 | XMRV6_A1Z651_3mutA |
| PAPGGGGSS | 18207 | BAEVM_P10272_3mutA |
| GSSEAAAKGGS | 18208 | MLVCB_P08361_3mut |
| GSSGGGPAP | 18209 | MLVCB_P08361_3mutA |
| GGSGSS | 18210 | MLVBM_Q7SVK7_3mutA_WS |
| GGGGGSEAAAK | 18211 | MLVAV_P03356_3mutA |
| GSSEAAAK | 18212 | PERV_Q4VFZ2_3mutA_WS |
| GGGGGSGSS | 18213 | MLVBM_Q7SVK7_3mutA_WS |
| EAAAKGGSGSS | 18214 | MLVFF_P26809_3mut |
| PAP | | FLV_P10273_3mutA |
| GGGGG | 18215 | MLVMS_P03355_3mutA_WS |
| EAAAK | 18216 | PERV_Q4VFZ2_3mut |
| GSS | | FLV_P10273_3mutA |
| PAPAPAPAPAPAP | 18217 | KORV_Q9TTC1-Pro_3mutA |
| EAAAKEAAAKEAAAKEAAAK | 18218 | MLVCB_P08361_3mut |
| EAAAKGGGGSEAAAK | 18219 | XMRV6_A1Z651_3mut |
| PAPGGSGGG | 18220 | MLVBM_Q7SVK7_3mutA_WS |
| GGSGGGPAP | 18221 | WMSV_P03359_3mutA |
| GGGGSSEAAAK | 18222 | MLVBM_Q7SVK7_3mutA_WS |
| PAPGGGGSS | 18223 | MLVCB_P08361_3mut |
| GGSGGSGGSGGS | 18224 | PERV_Q4VFZ2_3mutA_WS |
| PAPGGSGGG | 18225 | MLVMS_P03355_3mutA_WS |
| GSSPAPGGS | 18226 | MLVCB_P08361_3mutA |
| GSSGSSGSS | 18227 | MLVFF_P26809_3mut |
| PAPGGGGGS | 18228 | MLVBM_Q7SVK7_3mutA_WS |
| GSSPAP | 18229 | PERV_Q4VFZ2_3mut |
| GGSGGG | 18230 | KORV_Q9TTC1-Pro_3mut |
| EAAAKGGGGSEAAAK | 18231 | PERV_Q4VFZ2_3mutA_WS |
| GGSPAPEAAAK | 18232 | PERV_Q4VFZ2_3mutA_WS |
| EAAAKPAP | 18233 | BAEVM_P10272_3mut |
| GGGGSGGGGSGGGGSGGGGSGGGGSGGGGS | 18234 | MLVMS_P03355_3mut |
| EAAAKGGGGSS | 18235 | MLVFF_P26809_3mut |
| EAAAKEAAAK | 18236 | MLVCB_P08361_3mut |
| GSSEAAAKGGS | 18237 | PERV_Q4VFZ2_3mut |
| GGSPAP | 18238 | KORV_Q9TTC1-Pro_3mutA |
| EAAAKEAAAKEAAAKEAAAK | 18239 | MLVMS_P03355_3mutA_WS |
| GSSGSSGSSGSSGSS | 18240 | BAEVM_P10272_3mut |
| PAPEAAAK | 18241 | MLVMS_P03355_3mut |
| GSSGGSPAP | 18242 | PERV_Q4VFZ2 |
| GGGPAPGGS | 18243 | BAEVM_P10272_3mutA |
| EAAAKPAPGGS | 18244 | MLVMS_P03355_PLV919 |
| GGGGSGGGGS | 18245 | PERV_Q4VFZ2 |
| GGGEAAAK | 18246 | KORV_Q9TTC1-Pro_3mut |
| EAAAKGGGGGS | 18247 | FLV_P10273_3mutA |
| GGSPAPGSS | 18248 | MLVMS_P03355_3mut |
| GSSPAPEAAAK | 18249 | MLVMS_P03355_3mutA_WS |
| GSAGSAAGSGEF | 18250 | MLVBM_Q7SVK7_3mutA_WS |
| EAAAK | 18251 | BAEVM_P10272_3mutA |
| EAAAKGGGGSS | 18252 | BAEVM_P10272_3mutA |
| GGG | | WMSV_P03359_3mut |
| GGSGSSPAP | 18253 | BAEVM_P10272_3mut |
| GGSEAAAKPAP | 18254 | MLVBM_Q7SVK7_3mutA_WS |
| EAAAKGGSGSS | 18255 | MLVCB_P08361_3mut |
| PAPGSS | 18256 | MLVAV_P03356_3mutA |
| PAPEAAAKGGG | 18257 | MLVCB_P08361_3mutA |
| AEAAAKEAAAKEAAAKEAAAKALEAEAAAKEAAAKEAAAKEAAAK | 18258 | FOAMV_P14350-Pro_2mut |
| A | | |
| GSSGSSGSS | 18259 | PERV_Q4VFZ2_3mut |
| PAPGGG | 18260 | MLVMS_P03355_3mut |
| PAPGGS | 18261 | PERV_Q4VFZ2_3mut |
| GSSGGG | 18262 | MLVMS_P03355_PLV919 |
| GSSGSSGSSGSSGSSGSS | 18263 | WMSV_P03359_3mut |
| PAP | | AVIRE_P03360_3mutA |
| EAAAKGSSPAP | 18264 | MLVBM_Q7SVK7_3mutA_WS |
| GSSGSSGSSGSS | 18265 | MLVMS_P03355_PLV919 |
| GGGGSGGGGSGGGGSGGGGSGGGGS | 18266 | AVIRE_P03360 |
| GGGGS | 18267 | PERV_Q4VFZ2_3mut |
| EAAAKGSSGGG | 18268 | MLVBM_Q7SVK7_3mutA_WS |
| GGGGGG | 18269 | KORV_Q9TTC1-Pro_3mut |
| GGSGSSEAAAK | 18270 | PERV_Q4VFZ2_3mut |
| GSSPAPEAAAK | 18271 | MLVBM_Q7SVK7_3mutA_WS |
| GGGGSGGGGS | 18272 | MLVBM_Q7SVK7_3mutA_WS |
| GSSGGGGGS | 18273 | MLVAV_P03356_3mutA |
| GSAGSAAGSGEF | 18274 | WMSV_P03359_3mutA |
| GGGEAAAKGSS | 18275 | BAEVM_P10272_3mutA |
| AEAAAKEAAAKEAAAKEAAAKALEAEAAAKEAAAKEAAAKEAAAK | 18276 | FFV_O93209-Pro_2mut |
| A | | |
| PAPGGSGGG | 18277 | MLVCB_P08361_3mutA |
| EAAAKEAAAKEAAAKEAAAKEAAAK | 18278 | SFV3L_P27401_2mut |
| GGSGSSPAP | 18279 | MLVMS_P03355_PLV919 |
| GGGGGG | 18280 | PERV_Q4VFZ2_3mut |
| EAAAKEAAAKEAAAKEAAAKEAAAK | 18281 | PERV_Q4VFZ2_3mut |
| EAAAKGSSPAP | 18282 | MLVFF_P26809_3mut |
| GGGPAPGGS | 18283 | MLVBM_Q7SVK7_3mutA_WS |
| AEAAAKEAAAKEAAAKEAAAKALEAEAAAKEAAAKEAAAKEAAAK | 18284 | SFV3L_P27401 |
| A | | |
| PAP | | PERV_Q4VFZ2_3mut |
| EAAAKGGS | 18285 | MLVMS_P03355_PLV919 |
| GSSGGSEAAAK | 18286 | WMSV_P03359_3mutA |
| GGSGSSEAAAK | 18287 | KORV_Q9TTC1-Pro_3mutA |
| EAAAKEAAAKEAAAK | 18288 | PERV_Q4VFZ2 |
| GGSGGGEAAAK | 18289 | MLVMS_P03355_3mutA_WS |
| GGGGSGGGGSGGGGSGGGGS | 18290 | BAEVM_P10272_3mut |
| EAAAKGSS | 18291 | XMRV6_A1Z651_3mutA |
| GSSGGGGGS | 18292 | WMSV_P03359_3mutA |
| GSSGSSGSSGSSGSSGSS | 18293 | MLVFF_P26809_3mutA |
| GGSGSS | 18294 | MLVAV_P03356_3mutA |
| EAAAKGGGGSEAAAK | 18295 | MLVMS_P03355_PLV919 |
| EAAAKGGGPAP | 18296 | PERV_Q4VFZ2 |
| GGSEAAAKGGG | 18297 | MLVAV_P03356_3mutA |
| EAAAKEAAAKEAAAKEAAAKEAAAKEAAAK | 18298 | MLVBM_Q7SVK7_3mut |
| EAAAKEAAAKEAAAKEAAAKEAAAKEAAAK | 18299 | KORV_Q9TTC1-Pro_3mutA |
| GSSPAPEAAAK | 18300 | MLVFF_P26809_3mutA |
| GGGGSEAAAKGGGGS | 18301 | PERV_Q4VFZ2_3mut |
| GSSGSSGSSGSS | 18302 | PERV_Q4VFZ2_3mut |
| GGSEAAAK | 18303 | MLVFF_P26809_3mutA |
| GGGGGGGG | 18304 | MLVMS_P03355_3mut |
| GSSGGG | 18305 | XMRV6_A1Z651_3mutA |
| EAAAKGGS | 18306 | BAEVM_P10272_3mutA |
| GGGGS | 18307 | BAEVM_P10272_3mutA |
| GGSEAAAKGGG | 18308 | KORV_Q9TTC1-Pro_3mutA |
| GGSGSSGGG | 18309 | KORV_Q9TTC1_3mutA |
| GGSGSSEAAAK | 18310 | WMSV_P03359_3mut |
| EAAAKGGSGSS | 18311 | MLVBM_Q7SVK7_3mutA_WS |
| GGS | | BAEVM_P10272_3mutA |
| GGGPAPGSS | 18312 | WMSV_P03359_3mutA |
| GSSGSSGSSGSSGSS | 18313 | AVIRE_P03360_3mut |
| GGGEAAAKPAP | 18314 | XMRV6_A1Z651_3mut |
| GSSGGG | 18315 | MLVFF_P26809_3mutA |
| GGSPAPGSS | 18316 | PERV_Q4VFZ2_3mut |
| PAPGGS | 18317 | MLVCB_P08361_3mut |
| PAPAPAPAPAP | 18318 | KORV_Q9TTC1_3mutA |
| GSSGGS | 18319 | MLVCB_P08361_3mutA |
| GSSGGSEAAAK | 18320 | PERV_Q4VFZ2_3mut |
| EAAAKGSSGGS | 18321 | MLVMS_P03355_PLV919 |
| EAAAKGGG | 18322 | WMSV_P03359_3mut |
| PAPGGGGGS | 18323 | BAEVM_P10272_3mutA |
| GGGGSEAAAKGGGGS | 18324 | WMSV_P03359_3mutA |
| EAAAKEAAAKEAAAKEAAAKEAAAKEAAAK | 18325 | MLVMS_P03355_3mutA_WS |
| GGS | | KORV_Q9TTC1-Pro_3mutA |
| GSSGGSPAP | 18326 | BAEVM_P10272_3mutA |
| GGG | | MLVMS_P03355_PLV919 |
| PAPGSS | 18327 | KORV_Q9TTC1-Pro_3mut |
| GGSEAAAKGGG | 18328 | FLV_P10273_3mutA |
| GGSEAAAKPAP | 18329 | PERV_Q4VFZ2_3mutA_WS |
| GGGGSSPAP | 18330 | XMRV6_A1Z651_3mutA |
| EAAAKEAAAKEAAAKEAAAKEAAAK | 18331 | PERV_Q4VFZ2_3mutA_WS |
| GGGG | 18332 | PERV_Q4VFZ2_3mutA_WS |
| GGSEAAAKPAP | 18333 | MLVMS_P03355_3mut |
| PAPGSSGGG | 18334 | MLVMS_P03355_3mutA_WS |
| PAPEAAAKGGS | 18335 | AVIRE_P03360_3mut |
| GGGGSSPAP | 18336 | MLVMS_P03355_3mutA_WS |
| GGGGSGGGGSGGGGSGGGGS | 18337 | PERV_Q4VFZ2_3mut |
| GGGEAAAK | 18338 | MLVMS_P03355_3mut |
| GGGGSS | 18339 | MLVFF_P26809_3mut |
| GGSPAPGSS | 18340 | XMRV6_A1Z651_3mut |
| GGGGS | 18341 | KORV_Q9TTC1-Pro_3mutA |
| EAAAKGSSGGS | 18342 | FLV_P10273_3mutA |
| GSS | | MLVMS_P03355_PLV919 |
| GGGG | 18343 | MLVMS_P03355_PLV919 |
| GSSGGS | 18344 | MLVMS_P03355_PLV919 |
| GGSGGSGGSGGS | 18345 | MLVMS_P03355_3mut |
| PAPEAAAKGGS | 18346 | MLVMS_P03355_3mut |
| EAAAKGSSGGG | 18347 | BAEVM_P10272_3mutA |
| GSSEAAAK | 18348 | KORV_Q9TTC1-Pro_3mutA |
| GSAGSAAGSGEF | 18349 | KORV_Q9TTC1_3mutA |
| GGGGGSEAAAK | 18350 | MLVCB_P08361_3mut |
| GGGG | 18351 | WMSV_P03359_3mut |
| GGGGSSEAAAK | 18352 | MLVMS_P03355_PLV919 |
| PAPGGG | 18353 | WMSV_P03359_3mutA |
| EAAAKGGSGGG | 18354 | MLVAV_P03356_3mutA |
| GGGPAPGGS | 18355 | MLVMS_P03355_3mut |
| EAAAKPAP | 18356 | PERV_Q4VFZ2_3mutA_WS |
| GSSGSSGSS | 18357 | KORV_Q9TTC1-Pro_3mutA |
| GSSPAPGGS | 18358 | XMRV6_A1Z651_3mut |
| GGGGGSPAP | 18359 | BAEVM_P10272_3mutA |
| GGSGSSGGG | 18360 | PERV_Q4VFZ2_3mutA_WS |
| GGGEAAAKGSS | 18361 | AVIRE_P03360_3mut |
| GSSEAAAK | 18362 | FLV_P10273_3mutA |
| EAAAK | 18363 | MLVMS_P03355_3mut |
| EAAAKGGSGSS | 18364 | WMSV_P03359_3mut |
| GSSEAAAKGGG | 18365 | PERV_Q4VFZ2_3mut |
| PAPGSSGGG | 18366 | BAEVM_P10272_3mutA |
| EAAAKGGGGGS | 18367 | MLVMS_P03355_3mut |
| GGSEAAAKPAP | 18368 | AVIRE_P03360_3mut |
| GGGPAPGGS | 18369 | XMRV6_A1Z651_3mut |
| GGGGS | 18370 | KORV_Q9TTC1_3mutA |
| GGSGGSGGSGGSGGS | 18371 | XMRV6_A1Z651_3mut |
| GGGPAP | 18372 | KORV_Q9TTC1-Pro_3mut |
| EAAAKPAP | 18373 | MLVBM_Q7SVK7_3mutA_WS |
| GGSEAAAK | 18374 | MLVMS_P03355_PLV919 |
| GSSEAAAKPAP | 18375 | KORV_Q9TTC1-Pro_3mutA |
| GGSGSS | 18376 | MLVMS_P03355_3mut |
| EAAAKPAPGGG | 18377 | PERV_Q4VFZ2_3mut |
| GGSPAPEAAAK | 18378 | KORV_Q9TTC1_3mutA |
| GGSEAAAKGGG | 18379 | AVIRE_P03360_3mutA |
| GGGGSEAAAKGGGGS | 18380 | MLVMS_P03355_PLV919 |
| GSSGGGEAAAK | 18381 | KORV_Q9TTC1-Pro_3mutA |
| EAAAKGGGPAP | 18382 | WMSV_P03359_3mut |
| GSSPAP | 18383 | XMRV6_A1Z651_3mutA |
| AEAAAKEAAAKEAAAKEAAAKALEAEAAAKEAAAKEAAAKEAAAK | 18384 | SFV3L_P27401-Pro |
| A | | |
| GGSEAAAKGSS | 18385 | MLVMS_P03355_PLV919 |
| GSSGGSEAAAK | 18386 | KORV_Q9TTC1-Pro_3mutA |
| GGSEAAAKGSS | 18387 | KORV_Q9TTC1-Pro_3mutA |
| EAAAKGGG | 18388 | AVIRE_P03360_3mutA |
| GSSGGSEAAAK | 18389 | BAEVM_P10272_3mutA |
| GGGGSEAAAKGGGGS | 18390 | KORV_Q9TTC1-Pro_3mut |
| PAPGSSEAAAK | 18391 | MLVMS_P03355_3mut |
| PAPEAAAK | 18392 | WMSV_P03359_3mut |
| PAPGGSGSS | 18393 | PERV_Q4VFZ2_3mutA_WS |
| PAPGSS | 18394 | BAEVM_P10272_3mut |
| PAPGGGGGS | 18395 | MLVMS_P03355_3mut |
| EAAAKPAPGSS | 18396 | MLVBM_Q7SVK7_3mutA_WS |
| GSSPAPGGS | 18397 | MLVMS_P03355_PLV919 |
| GGSGSSEAAAK | 18398 | MLVMS_P03355_3mut |
| GGGGGG | 18399 | KORV_Q9TTC1-Pro_3mutA |
| EAAAKEAAAKEAAAKEAAAK | 18400 | MLVBM_Q7SVK7_3mut |
| GGSPAPGSS | 18401 | MLVMS_P03355_PLV919 |
| PAPAPAPAPAP | 18402 | MLVCB_P08361_3mut |
| GGSGSSPAP | 18403 | WMSV_P03359_3mutA |
| EAAAKGGSGGG | 18404 | PERV_Q4VFZ2_3mutA_WS |
| GSSGSSGSSGSSGSS | 18405 | PERV_Q4VFZ2_3mut |
| AEAAAKEAAAKEAAAKEAAAKALEAEAAAKEAAAKEAAAKEAAAK | 18406 | KORV_Q9TTC1_3mutA |
| A | | |
| GSSGGGEAAAK | 18407 | WMSV_P03359_3mutA |
| GSSGGSEAAAK | 18408 | FLV_P10273_3mutA |
| GGGGGGGG | 18409 | PERV_Q4VFZ2_3mut |
| PAPGGSEAAAK | 18410 | FLV_P10273_3mutA |
| GGGGSSPAP | 18411 | BAEVM_P10272_3mutA |
| PAPAPAPAP | 18412 | WMSV_P03359_3mut |
| GGSEAAAKPAP | 18413 | PERV_Q4VFZ2_3mut |
| PAPGGSGGG | 18414 | BAEVM_P10272_3mutA |
| EAAAKEAAAKEAAAKEAAAKEAAAKEAAAK | 18415 | MLVMS_P03355_3mut |
| GGGGSGGGGSGGGGS | 18416 | PERV_Q4VFZ2_3mut |
| GGSGGGPAP | 18417 | PERV_Q4VFZ2_3mut |
| GGGPAPEAAAK | 18418 | MLVFF_P26809_3mut |
| GGGGGSGSS | 18419 | MLVMS_P03355_3mutA_WS |
| GSS | | MLVCB_P08361_3mut |
| GGGGGSPAP | 18420 | MLVMS_P03355_PLV919 |
| GGSPAP | 18421 | MLVAV_P03356_3mutA |
| GGGPAPGGS | 18422 | KORV_Q9TTC1-Pro_3mutA |
| PAPGSSGGG | 18423 | FLV_P10273_3mutA |
| PAPGSSGGG | 18424 | WMSV_P03359_3mutA |
| PAPGGS | 18425 | MLVBM_Q7SVK7_3mutA_WS |
| GGGEAAAKGSS | 18426 | PERV_Q4VFZ2_3mutA_WS |
| GGSEAAAKGSS | 18427 | MLVBM_Q7SVK7_3mutA_WS |
| PAPGGSEAAAK | 18428 | MLVCB_P08361_3mut |
| GGSEAAAKGGG | 18429 | XMRV6_A1Z651_3mutA |
| GGSGGGGSS | 18430 | WMSV_P03359_3mut |
| GGGEAAAKPAP | 18431 | KORV_Q9TTC1_3mutA |
| EAAAKGSS | 18432 | KORV_Q9TTC1-Pro_3mut |
| PAPEAAAKGSS | 18433 | MLVFF_P26809_3mut |
| GSAGSAAGSGEF | 18434 | PERV_Q4VFZ2_3mut |
| EAAAKGGGGGS | 18435 | WMSV_P03359_3mut |
| EAAAKGSSPAP | 18436 | WMSV_P03359_3mutA |
| GGGGSEAAAKGGGGS | 18437 | XMRV6_A1Z651_3mutA |
| GSSEAAAKPAP | 18438 | SFV3L_P27401-Pro_2mutA |
| GGGGGG | 18439 | PERV_Q4VFZ2_3mutA_WS |
| PAPGGS | 18440 | BAEVM_P10272_3mut |
| PAP | | AVIRE_P03360_3mut |
| PAPAPAP | 18441 | MLVBM_Q7SVK7_3mutA_WS |
| GGGG | 18442 | PERV_Q4VFZ2_3mutA_WS |
| GSSGGSEAAAK | 18443 | MLVBM_Q7SVK7_3mut |
| GGSGGGGSS | 18444 | MLVFF_P26809_3mut |
| GGGGSSGGS | 18445 | AVIRE_P03360_3mutA |
| GSSPAPGGG | 18446 | PERV_Q4VFZ2_3mutA_WS |
| GGSEAAAKPAP | 18447 | MLVMS_P03355_PLV919 |
| PAP | | KORV_Q9TTC1-Pro_3mut |
| GSSGGS | 18448 | PERV_Q4VFZ2_3mut |
| GGGGG | 18449 | PERV_Q4VFZ2_3mut |
| GSSGGGPAP | 18450 | FLV_P10273_3mutA |
| GSSEAAAKGGG | 18451 | KORV_Q9TTC1-Pro_3mut |
| EAAAKEAAAKEAAAKEAAAKEAAAKEAAAK | 18452 | MLVCB_P08361_3mut |
| GGSEAAAKPAP | 18453 | MLVCB_P08361_3mut |
| PAPAPAPAPAPAP | 18454 | BAEVM_P10272_3mutA |
| GGGGSEAAAKGGGGS | 18455 | MLVMS_P03355_3mut |
| EAAAKPAPGSS | 18456 | MLVMS_P03355_3mut |
| GSSGSSGSSGSSGSS | 18457 | MLVBM_Q7SVK7_3mutA_WS |
| PAPEAAAKGSS | 18458 | MLVAV_P03356_3mut |
| AEAAAKEAAAKEAAAKEAAAKALEAEAAAKEAAAKEAAAKEAAAK | 18459 | AVIRE_P03360_3mut |
| A | | |
| AEAAAKEAAAKEAAAKEAAAKALEAEAAAKEAAAKEAAAKEAAAK | 18460 | PERV_Q4VFZ2_3mut |
| A | | |
| GGSEAAAKGGG | 18461 | PERV_Q4VFZ2_3mutA_WS |
| GGSGGGGSS | 18462 | MLVFF_P26809_3mutA |
| PAPEAAAKGSS | 18463 | MLVCB_P08361_3mut |
| GGG | | PERV_Q4VFZ2_3mutA_WS |
| GGSGGGEAAAK | 18464 | MLVMS_P03355_3mut |
| EAAAKGGGGSS | 18465 | WMSV_P03359_3mut |
| GSSPAPGGG | 18466 | WMSV_P03359_3mutA |
| EAAAKGSSGGG | 18467 | PERV_Q4VFZ2_3mut |
| GGSGGGEAAAK | 18468 | PERV_Q4VFZ2_3mutA_WS |
| GGSGGSGGSGGSGGS | 18469 | PERV_Q4VFZ2_3mutA_WS |
| EAAAKPAPGGS | 18470 | PERV_Q4VFZ2_3mutA_WS |
| GGGGGSEAAAK | 18471 | PERV_Q4VFZ2_3mutA_WS |
| GSSPAP | 18472 | MLVFF_P26809_3mut |
| GGGEAAAKPAP | 18473 | AVIRE_P03360_3mut |
| GSSGGSEAAAK | 18474 | MLVMS_P03355_PLV919 |
| EAAAKPAPGGS | 18475 | WMSV_P03359_3mutA |
| PAPGGG | 18476 | KORV_Q9TTC1_3mutA |
| EAAAKGSSPAP | 18477 | KORV_Q9TTC1-Pro_3mut |
| GSSPAPEAAAK | 18478 | MLVFF_P26809_3mut |
| GGSGGGEAAAK | 18479 | MLVFF_P26809_3mutA |
| GSSGSSGSS | 18480 | WMSV_P03359_3mutA |
| EAAAKGGS | 18481 | BAEVM_P10272_3mut |
| EAAAKPAPGGS | 18482 | KORV_Q9TTC1_3mutA |
| EAAAKPAPGGS | 18483 | BAEVM_P10272_3mutA |
| GSSGGGGGS | 18484 | PERV_Q4VFZ2_3mut |
| PAPGGGGSS | 18485 | PERV_Q4VFZ2_3mut |
| GSSGSSGSS | 18486 | WMSV_P03359_3mut |
| EAAAKEAAAKEAAAKEAAAK | 18487 | WMSV_P03359_3mut |
| GGS | | AVIRE_P03360_3mut |
| EAAAKPAPGSS | 18488 | MLVFF_P26809_3mut |
| EAAAKGGG | 18489 | KORV_Q9TTC1_3mut |
| PAPGSSEAAAK | 18490 | MLVMS_P03355_3mut |
| PAPGSSGGS | 18491 | MLVMS_P03355_PLV919 |
| GSSPAPEAAAK | 18492 | MLVMS_P03355_3mut |
| GSSGSSGSSGSSGSSGSS | 18493 | WMSV_P03359_3mutA |
| GGGGS | 18494 | BAEVM_P10272_3mut |
| GSSPAP | 18495 | MLVMS_P03355_3mut |
| EAAAKGGGGSEAAAK | 18496 | KORV_Q9TTC1-Pro_3mutA |
| EAAAKEAAAK | 18497 | WMSV_P03359_3mutA |
| GGGGSSGGS | 18498 | MLVCB_P08361_3mutA |
| PAPGGSEAAAK | 18499 | BAEVM_P10272_3mut |
| EAAAKGGSPAP | 18500 | MLVFF_P26809_3mut |
| GSSGGSGGG | 18501 | MLVBM_Q7SVK7_3mutA_WS |
| GSSGGS | 18502 | PERV_Q4VFZ2_3mut |
| PAPGGSGSS | 18503 | PERV_Q4VFZ2_3mutA_WS |
| EAAAKGGSGSS | 18504 | KORV_Q9TTC1-Pro_3mutA |
| PAPAP | 18505 | MLVCB_P08361_3mut |
| EAAAKGSSPAP | 18506 | PERV_Q4VFZ2_3mutA_WS |
| EAAAKPAPGGG | 18507 | MLVMS_P03355_PLV919 |
| GGGGSGGGGSGGGGSGGGGSGGGGSGGGGS | 18508 | MLVBM_Q7SVK7_3mut |
| EAAAKGGGGSS | 18509 | MLVMS_P03355_PLV919 |
| PAPEAAAK | 18510 | PERV_Q4VFZ2_3mut |
| EAAAKPAPGSS | 18511 | BAEVM_P10272_3mutA |
| GGSPAP | 18512 | PERV_Q4VFZ2_3mutA_WS |
| GGSGGS | 18513 | BAEVM_P10272_3mutA |
| PAPEAAAKGSS | 18514 | KORV_Q9TTC1_3mut |
| PAPGSS | 18515 | MLVMS_P03355_PLV919 |
| PAPAPAPAPAP | 18516 | MLVAV_P03356_3mutA |
| GGG | | XMRV6_A1Z651_3mutA |
| GGGPAP | 18517 | PERV_Q4VFZ2_3mutA_WS |
| GSSPAPEAAAK | 18518 | KORV_Q9TTC1_3mutA |
| PAP | | BAEVM_P10272_3mutA |
| GGSPAP | 18519 | BAEVM_P10272_3mutA |
| PAPEAAAKGGS | 18520 | MLVMS_P03355_PLV919 |
| PAPGSSGGS | 18521 | PERV_Q4VFZ2_3mutA_WS |
| PAPAPAPAPAPAP | 18522 | PERV_Q4VFZ2_3mut |
| EAAAKEAAAKEAAAK | 18523 | MLVCB_P08361_3mut |
| GGSGGSGGSGGSGGS | 18524 | MLVMS_P03355_PLV919 |
| EAAAKPAPGGS | 18525 | MLVMS_P03355_3mut |
| GGSGGS | 18526 | MLVMS_P03355_PLV919 |
| EAAAKPAP | 18527 | MLVMS_P03355_3mutA_WS |
| GGSEAAAK | 18528 | XMRV6_A1Z651_3mutA |
| GGSGGG | 18529 | KORV_Q9TTC1_3mut |
| GGSGGGEAAAK | 18530 | PERV_Q4VFZ2_3mut |
| PAPEAAAKGGG | 18531 | AVIRE_P03360 |
| PAPAP | 18532 | PERV_Q4VFZ2_3mut |
| GSS | | KORV_Q9TTC1-Pro_3mutA |
| EAAAKGSSGGG | 18533 | MLVAV_P03356_3mutA |
| GGSPAPGSS | 18534 | MLVBM_Q7SVK7_3mutA_WS |
| PAPEAAAK | 18535 | MLVAV_P03356_3mut |
| EAAAKGGSPAP | 18536 | BAEVM_P10272_3mutA |
| PAPAPAPAP | 18537 | WMSV_P03359_3mutA |
| PAPGGSEAAAK | 18538 | MLVMS_P03355_3mut |
| GGSGGSGGSGGS | 18539 | WMSV_P03359_3mut |
| GGGGGSGSS | 18540 | XMRV6_A1Z651_3mut |
| PAPGGSGGG | 18541 | KORV_Q9TTC1_3mutA |
| GGS | | MLVMS_P03355_3mut |
| EAAAK | 18542 | WMSV_P03359_3mut |
| GGGEAAAKGSS | 18543 | MLVBM_Q7SVK7_3mutA_WS |
| GGSPAPGSS | 18544 | MLVCB_P08361_3mut |
| GGSEAAAKPAP | 18545 | PERV_Q4VFZ2_3mut |
| GGGGSGGGGSGGGGSGGGGSGGGGS | 18546 | MLVCB_P08361_3mutA |
| GGSGSS | 18547 | BAEVM_P10272_3mutA |
| GGGEAAAKGSS | 18548 | WMSV_P03359_3mutA |
| EAAAKGGSPAP | 18549 | WMSV_P03359_3mut |
| GSSPAPEAAAK | 18550 | MLVMS_P03355_3mut |
| GGSGGSGGSGGS | 18551 | MLVMS_P03355_PLV919 |
| GSSPAPEAAAK | 18552 | WMSV_P03359_3mut |
| GSSGSSGSSGSS | 18553 | PERV_Q4VFZ2 |
| GGSGSSEAAAK | 18554 | WMSV_P03359_3mutA |
| GGSGGG | 18555 | MLVFF_P26809_3mut |
| GGSPAPGGG | 18556 | MLVFF_P26809_3mut |
| GGSGGSGGS | 18557 | BAEVM_P10272_3mutA |
| GGGGSSEAAAK | 18558 | MLVBM_Q7SVK7_3mut |
| GGSPAPGSS | 18559 | MLVMS_P03355_3mut |
| EAAAKPAPGSS | 18560 | AVIRE_P03360_3mut |
| GGGGSSGGS | 18561 | FLV_P10273_3mutA |
| GGSPAPEAAAK | 18562 | PERV_Q4VFZ2_3mut |
| GGSEAAAK | 18563 | MLVMS_P03355_3mutA_WS |
| GSSGSSGSSGSS | 18564 | MLVCB_P08361_3mutA |
| EAAAKEAAAKEAAAKEAAAKEAAAK | 18565 | MLVMS_P03355_PLV919 |
| GGGGG | 18566 | PERV_Q4VFZ2_3mut |
| GGSEAAAKGSS | 18567 | MLVCB_P08361_3mutA |
| GSSGGG | 18568 | MLVBM_Q7SVK7_3mutA_WS |
| PAPGSSGGG | 18569 | KORV_Q9TTC1-Pro_3mutA |
| GGSGGS | 18570 | BAEVM_P10272_3mut |
| EAAAKGGGGGS | 18571 | MLVBM_Q7SVK7_3mutA_WS |
| GGSGSSPAP | 18572 | MLVCB_P08361_3mut |
| PAPGSSGGG | 18573 | KORV_Q9TTC1 |
| PAPGGSGGG | 18574 | MLVMS_P03355_3mut |
| GGGG | 18575 | WMSV_P03359_3mutA |
| EAAAKGGSPAP | 18576 | MLVCB_P08361_3mut |
| GSSGSS | 18577 | FLV_P10273_3mutA |
| GGSEAAAKPAP | 18578 | SFV3L_P27401_2mut |
| EAAAKGSSGGS | 18579 | MLVAV_P03356_3mutA |
| AEAAAKEAAAKEAAAKEAAAKALEAEAAAKEAAAKEAAAKEAAAK | 18580 | MLVAV_P03356_3mutA |
| A | | |
| EAAAKGGSGSS | 18581 | PERV_Q4VFZ2_3mutA_WS |
| GGGGG | 18582 | MLVCB_P08361_3mut |
| GGGEAAAK | 18583 | BAEVM_P10272_3mut |
| GGSGGSGGSGGS | 18584 | MLVCB_P08361_3mut |
| EAAAKEAAAKEAAAKEAAAKEAAAKEAAAK | 18585 | PERV_Q4VFZ2 |
| PAPAPAPAPAP | 18586 | MLVMS_P03355_3mutA_WS |
| EAAAKEAAAK | 18587 | XMRV6_A1Z651_3mut |
| GSSGGSEAAAK | 18588 | PERV_Q4VFZ2_3mutA_WS |
| PAPGGSEAAAK | 18589 | KORV_Q9TTC1-Pro_3mutA |
| EAAAKGGGPAP | 18590 | MLVBM_Q7SVK7_3mutA_WS |
| PAPGGSGSS | 18591 | PERV_Q4VFZ2 |
| SGSETPGTSESATPES | 18592 | MLVMS_P03355_3mut |
| GGSGGS | 18593 | MLVMS_P03355_PLV919 |
| EAAAKGGS | 18594 | FLV_P10273_3mut |
| GGSPAPGSS | 18595 | MLVMS_P03355_3mutA_WS |
| EAAAKEAAAKEAAAKEAAAK | 18596 | FFV_O93209_2mut |
| GSSGGSGGG | 18597 | MLVMS_P03355_3mutA_WS |
| PAPGSSEAAAK | 18598 | WMSV_P03359_3mut |
| PAPAPAPAPAPAP | 18599 | KORV_Q9TTC1_3mutA |
| GGGGSS | 18600 | BAEVM_P10272_3mut |
| GGGGSEAAAKGGGGS | 18601 | AVIRE_P03360_3mut |
| GSSPAPEAAAK | 18602 | KORV_Q9TTC1-Pro_3mutA |
| PAPEAAAKGGG | 18603 | MLVBM_Q7SVK7_3mut |
| EAAAKEAAAK | 18604 | WMSV_P03359_3mut |
| EAAAK | 18605 | SFV3L_P27401-Pro_2mutA |
| GSSGGSGGG | 18606 | XMRV6_A1Z651_3mutA |
| GGGEAAAKPAP | 18607 | WMSV_P03359_3mutA |
| GGSGGS | 18608 | MLVFF_P26809_3mutA |
| EAAAKEAAAKEAAAKEAAAKEAAAKEAAAK | 18609 | FOAMV_P14350_2mutA |
| GGGGG | 18610 | MLVAV_P03356_3mutA |
| GSSGGSEAAAK | 18611 | BAEVM_P10272_3mut |
| SGGSSGGSSGSETPGTSESATPESSGGSSGGSS | 18612 | SFV1_P23074 |
| GGSGGGPAP | 18613 | MLVCB_P08361_3mut |
| GGSGSS | 18614 | PERV_Q4VFZ2_3mut |
| SGSETPGTSESATPES | 18615 | MLVFF_P26809_3mut |
| EAAAKGGSPAP | 18616 | MLVMS_P03355_3mut |
| PAPAP | 18617 | PERV_Q4VFZ2_3mut |
| AEAAAKEAAAKEAAAKEAAAKALEAEAAAKEAAAKEAAAKEAAAK | 18618 | MLVBM_Q7SVK7_3mut |
| A | | |
| GGGGGS | 18619 | BAEVM_P10272_3mutA |
| EAAAKEAAAK | 18620 | AVIRE_P03360_3mut |
| GSSGGSEAAAK | 18621 | PERV_Q4VFZ2_3mut |
| GGGEAAAK | 18622 | WMSV_P03359_3mut |
| GSSGGGEAAAK | 18623 | AVIRE_P03360_3mutA |
| GGG | | XMRV6_A1Z651_3mut |
| GGGGSEAAAKGGGGS | 18624 | BAEVM_P10272_3mut |
| GGGG | 18625 | MLVMS_P03355_3mut |
| GGSGGS | 18626 | MLVMS_P03355_3mutA_WS |
| GGSGGGGSS | 18627 | MLVBM_Q7SVK7_3mutA_WS |
| GSSPAPGGS | 18628 | PERV_Q4VFZ2_3mut |
| GSSPAPEAAAK | 18629 | PERV_Q4VFZ2_3mutA_WS |
| EAAAKGGS | 18630 | WMSV_P03359_3mut |
| GGSGGSGGSGGS | 18631 | PERV_Q4VFZ2_3mut |
| GGGGSSEAAAK | 18632 | KORV_Q9TTC1-Pro_3mut |
| PAPAPAPAPAPAP | 18633 | MLVAV_P03356_3mut |
| EAAAKGSSGGG | 18634 | MLVMS_P03355_PLV919 |
| GGGGG | 18635 | MLVBM_Q7SVK7_3mutA_WS |
| AEAAAKEAAAKEAAAKEAAAKALEAEAAAKEAAAKEAAAKEAAAK | 18636 | FFV_O93209_2mutA |
| A | | |
| SGGSSGGSSGSETPGTSESATPESSGGSSGGSS | 18637 | KORV_Q9TTC1-Pro_3mut |
| GGSPAPGGG | 18638 | MLVMS_P03355_3mutA_WS |
| GGGEAAAKGGS | 18639 | MLVMS_P03355_3mut |
| GGGEAAAK | 18640 | PERV_Q4VFZ2_3mut |
| PAPEAAAKGGG | 18641 | MLVMS_P03355_3mut |
| GSSGSSGSSGSSGSSGSS | 18642 | BAEVM_P10272_3mutA |
| AEAAAKEAAAKEAAAKEAAAKALEAEAAAKEAAAKEAAAKEAAAK | 18643 | GALV_P21414_3mutA |
| A | | |
| EAAAKGGSPAP | 18644 | FFV_O93209-Pro |
| EAAAKEAAAK | 18645 | MLVFF_P26809_3mut |
| GGGGSGGGGSGGGGSGGGGSGGGGSGGGGS | 18646 | PERV_Q4VFZ2_3mutA_WS |
| GGSGGSGGSGGS | 18647 | MLVAV_P03356_3mutA |
| EAAAKEAAAKEAAAKEAAAKEAAAK | 18648 | SFV3L_P27401_2mutA |
| GSSGSSGSSGSSGSSGSS | 18649 | BAEVM_P10272_3mut |
| GGGGS | 18650 | MLVMS_P03355_PLV919 |
| AEAAAKEAAAKEAAAKEAAAKALEAEAAAKEAAAKEAAAKEAAAK | 18651 | SFV1_P23074 |
| A | | |
| GGGGSGGGGS | 18652 | KORV_Q9TTC1-Pro_3mutA |
| GGGGSGGGGS | 18653 | MLVMS_P03355_3mut |
| GGSGSS | 18654 | KORV_Q9TTC1_3mutA |
| GSSPAPGGG | 18655 | PERV_Q4VFZ2_3mut |
| GSSGGSPAP | 18656 | PERV_Q4VFZ2_3mutA_WS |
| PAPGGS | 18657 | PERV_Q4VFZ2_3mutA_WS |
| GGSPAPEAAAK | 18658 | FOAMV_P14350_2mutA |
| GGGPAPGGS | 18659 | SFV3L_P27401_2mut |
| PAPGSSGGG | 18660 | MLVCB_P08361_3mut |
| GSSGGGEAAAK | 18661 | AVIRE_P03360_3mut |
| GSSGGG | 18662 | XMRV6_A1Z651_3mut |
| GSSGSS | 18663 | PERV_Q4VFZ2_3mut |
| GSSGGG | 18664 | MLVAV_P03356_3mutA |
| PAPGGGGGS | 18665 | PERV_Q4VFZ2_3mut |
| GSSEAAAK | 18666 | MLVMS_P03355_3mut |
| PAPGGG | 18667 | FLV_P10273_3mutA |
| GGGGSGGGGS | 18668 | PERV_Q4VFZ2_3mut |
| GSSGGS | 18669 | MLVMS_P03355_PLV919 |
| GGGGSGGGGS | 18670 | SFV3L_P27401_2mut |
| EAAAKGGSGSS | 18671 | FLV_P10273_3mutA |
| GSSEAAAKGGS | 18672 | MLVMS_P03355_3mutA_WS |
| PAPGSSEAAAK | 18673 | SFV3L_P27401_2mutA |
| GGGGSGGGGS | 18674 | SFV3L_P27401-Pro_2mutA |
| PAPGSSEAAAK | 18675 | PERV_Q4VFZ2_3mut |
| PAPGSSEAAAK | 18676 | PERV_Q4VFZ2 |
| GGSPAPGGG | 18677 | AVIRE_P03360_3mut |
| GGGGGS | 18678 | PERV_Q4VFZ2_3mutA_WS |
| GGGGSSGGS | 18679 | PERV_Q4VFZ2_3mut |
| PAPAPAPAP | 18680 | AVIRE_P03360_3mutA |
| GGSGGS | 18681 | WMSV_P03359_3mutA |
| GGGPAPGGS | 18682 | PERV_Q4VFZ2_3mut |
| GGSGGSGGSGGSGGS | 18683 | MLVMS_P03355_PLV919 |
| GGSGGG | 18684 | PERV_Q4VFZ2_3mut |
| EAAAKEAAAK | 18685 | SFV3L_P27401_2mut |
| PAPGSS | 18686 | XMRV6_A1Z651_3mut |
| GSSEAAAK | 18687 | MLVFF_P26809_3mut |
| GGSPAPGGG | 18688 | MLVMS_P03355_3mut |
| EAAAKGGG | 18689 | WMSV_P03359_3mutA |
| GSSEAAAKGGS | 18690 | PERV_Q4VFZ2_3mutA_WS |
| GSSGGSPAP | 18691 | FFV_O93209 |
| GGGGGS | 18692 | KORV_Q9TTC1-Pro_3mut |
| GSSGGG | 18693 | MLVCB_P08361_3mut |
| GSSGSS | 18694 | MLVCB_P08361_3mutA |
| GGSEAAAKPAP | 18695 | BAEVM_P10272_3mut |
| EAAAKGGGGSS | 18696 | MLVCB_P08361_3mut |
| EAAAKPAPGGS | 18697 | KORV_Q9TTC1-Pro_3mutA |
| GSSGSSGSSGSSGSS | 18698 | MLVAV_P03356_3mutA |
| GGGGSEAAAKGGGGS | 18699 | PERV_Q4VFZ2_3mutA_WS |
| GGSGSS | 18700 | KORV_Q9TTC1-Pro_3mut |
| GSS | | SFV3L_P27401-Pro_2mutA |
| PAPAP | 18701 | BAEVM_P10272_3mut |
| EAAAKPAP | 18702 | BAEVM_P10272 |
| EAAAKEAAAKEAAAKEAAAKEAAAK | 18703 | KORV_Q9TTC1-Pro_3mut |
| GGGGGGG | 18704 | PERV_Q4VFZ2_3mutA_WS |
| GGGGS | 18705 | MLVMS_P03355_3mut |
| GSSGGG | 18706 | FLV_P10273_3mutA |
| PAPAPAPAPAP | 18707 | FLV_P10273_3mut |
| EAAAKEAAAKEAAAK | 18708 | WMSV_P03359_3mutA |
| GSSGGS | 18709 | MLVBM_Q7SVK7_3mutA_WS |
| EAAAKPAPGGG | 18710 | MLVMS_P03355_3mut |
| GSSPAPGGS | 18711 | WMSV_P03359_3mut |
| PAPGSSGGG | 18712 | PERV_Q4VFZ2_3mutA_WS |
| GSSGGG | 18713 | AVIRE_P03360_3mutA |
| PAPGGSGSS | 18714 | MLVFF_P26809_3mut |
| PAPGSS | 18715 | PERV_Q4VFZ2_3mut |
| GGGGGSGSS | 18716 | WMSV_P03359_3mutA |
| EAAAKGGGGSS | 18717 | MLVBM_Q7SVK7_3mutA_WS |
| GGGGGGG | 18718 | BAEVM_P10272_3mut |
| PAPEAAAKGSS | 18719 | MLVMS_P03355_3mut |
| GGSGGGEAAAK | 18720 | MLVMS_P03355_PLV919 |
| EAAAKGGGGGS | 18721 | MLVCB_P08361_3mut |
| PAPGGS | 18722 | KORV_Q9TTC1-Pro_3mut |
| GGGG | 18723 | FLV_P10273_3mutA |
| EAAAKGGSGSS | 18724 | MLVBM_Q7SVK7_3mutA_WS |
| GGGGSSGGS | 18725 | MLVMS_P03355_3mutA_WS |
| GGGGGGGG | 18726 | WMSV_P03359_3mut |
| GGSGSSGGG | 18727 | MLVMS_P03355_PLV919 |
| GSSEAAAKGGS | 18728 | KORV_Q9TTC1-Pro_3mutA |
| EAAAKPAPGSS | 18729 | MLVCB_P08361_3mut |
| GGSPAPGSS | 18730 | KORV_Q9TTC1_3mutA |
| PAPGSSGGG | 18731 | BAEVM_P10272_3mut |
| EAAAKPAPGSS | 18732 | WMSV_P03359_3mut |
| GGSPAPEAAAK | 18733 | XMRV6_A1Z651_3mutA |
| GSSPAP | 18734 | FLV_P10273_3mutA |
| GSS | | BAEVM_P10272_3mutA |
| EAAAKPAPGGS | 18735 | FLV_P10273_3mutA |
| GGSGSSPAP | 18736 | FLV_P10273_3mutA |
| PAPGSSGGS | 18737 | MLVMS_P03355_3mut |
| GSAGSAAGSGEF | 18738 | PERV_Q4VFZ2_3mutA_WS |
| GSSGGSEAAAK | 18739 | KORV_Q9TTC1_3mutA |
| GSSGGS | 18740 | MLVMS_P03355_3mutA_WS |
| EAAAKGGGGSEAAAK | 18741 | SFV3L_P27401_2mut |
| GSSGGS | 18742 | PERV_Q4VFZ2_3mutA_WS |
| GGSPAPEAAAK | 18743 | FLV_P10273_3mut |
| GGSEAAAKGSS | 18744 | PERV_Q4VFZ2_3mutA_WS |
| GSSPAPEAAAK | 18745 | PERV_Q4VFZ2_3mutA_WS |
| GGSGSSGGG | 18746 | PERV_Q4VFZ2_3mut |
| GGGG | 18747 | AVIRE_P03360_3mutA |
| GGSEAAAKPAP | 18748 | WMSV_P03359_3mut |
| GSSGGSPAP | 18749 | MLVAV_P03356_3mutA |
| GSSGGSEAAAK | 18750 | MLVMS_P03355_3mut |
| PAPEAAAKGGS | 18751 | KORV_Q9TTC1-Pro_3mut |
| GGSPAP | 18752 | PERV_Q4VFZ2_3mutA_WS |
| GGSEAAAK | 18753 | MLVAV_P03356_3mutA |
| EAAAKGGGGSEAAAK | 18754 | KORV_Q9TTC1-Pro_3mut |
| SGGSSGGSSGSETPGTSESATPESSGGSSGGSS | 18755 | MLVMS_P03355_PLV919 |
| GSSEAAAK | 18756 | KORV_Q9TTC1_3mutA |
| GGG | | AVIRE_P03360 |
| GGSEAAAKGSS | 18757 | MLVBM_Q7SVK7_3mut |
| GGSEAAAKGSS | 18758 | MLVMS_P03355_3mut |
| GGSPAPEAAAK | 18759 | MLVCB_P08361_3mut |
| GGSGGGEAAAK | 18760 | MLVCB_P08361_3mut |
| GGSEAAAKPAP | 18761 | MLVMS_P03355_3mutA_WS |
| EAAAKGGSGSS | 18762 | KORV_Q9TTC1-Pro_3mut |
| GGGEAAAKGGS | 18763 | MLVCB_P08361_3mut |
| EAAAKGGGGSEAAAK | 18764 | FLV_P10273_3mutA |
| GGSPAP | 18765 | MLVFF_P26809_3mut |
| GGGGSSGGS | 18766 | XMRV6_A1Z651_3mutA |
| PAP | | MLVCB_P08361_3mut |
| GGS | | SFV3L_P27401-Pro_2mutA |
| GGGGSGGGGS | 18767 | MLVMS_P03355_3mut |
| GGGEAAAKGGS | 18768 | MLVAV_P03356_3mutA |
| GSSGSSGSSGSSGSSGSS | 18769 | MLVMS_P03355_PLV919 |
| PAPGSS | 18770 | MLVCB_P08361_3mut |
| GGSGGSGGS | 18771 | MLVMS_P03355_PLV919 |
| PAPGGSGGG | 18772 | FLV_P10273_3mutA |
| GGGGSGGGGSGGGGS | 18773 | FLV_P10273_3mut |
| GGSGSSGGG | 18774 | KORV_Q9TTC1-Pro_3mutA |
| GGSGGSGGS | 18775 | GALV_P21414_3mutA |
| GGGEAAAKGGS | 18776 | WMSV_P03359_3mut |
| SGSETPGTSESATPES | 18777 | KORV_Q9TTC1_3mutA |
| EAAAKGGGGGS | 18778 | KORV_Q9TTC1-Pro_3mut |
| EAAAKGSSPAP | 18779 | BAEVM_P10272_3mut |
| GGGG | 18780 | MLVCB_P08361_3mut |
| GGGGSGGGGSGGGGSGGGGSGGGGS | 18781 | MLVBM_Q7SVK7_3mut |
| GSSGGSGGG | 18782 | MLVMS_P03355_PLV919 |
| GGSGSS | 18783 | MLVFF_P26809_3mut |
| EAAAKGGS | 18784 | AVIRE_P03360_3mutA |
| GSSEAAAKGGS | 18785 | MLVBM_Q7SVK7_3mutA_WS |
| EAAAKPAPGGG | 18786 | WMSV_P03359_3mut |
| PAPGSSGGG | 18787 | MLVCB_P08361_3mutA |
| GGGGSSEAAAK | 18788 | KORV_Q9TTC1-Pro_3mutA |
| GSSEAAAKPAP | 18789 | BAEVM_P10272_3mutA |
| PAPGGGEAAAK | 18790 | MLVBM_Q7SVK7_3mutA_WS |
| GGSGGGEAAAK | 18791 | MLVCB_P08361_3mutA |
| GGGGSGGGGSGGGGSGGGGSGGGGSGGGGS | 18792 | FFV_O93209 |
| EAAAKGGGGGS | 18793 | GALV_P21414_3mutA |
| GGSPAPGGG | 18794 | MLVMS_P03355_3mut |
| GSSGSSGSS | 18795 | FLV_P10273_3mutA |
| EAAAK | 18796 | MLVBM_Q7SVK7_3mut |
| GGGGSSGGS | 18797 | MLVMS_P03355_3mut |
| GGSGSSPAP | 18798 | PERV_Q4VFZ2_3mut |
| EAAAKEAAAKEAAAKEAAAK | 18799 | BAEVM_P10272_3mut |
| GGGPAPGSS | 18800 | MLVMS_P03355_3mut |
| GSSPAPGGS | 18801 | PERV_Q4VFZ2_3mutA_WS |
| PAPAP | 18802 | FLV_P10273_3mutA |
| PAPAPAPAP | 18803 | PERV_Q4VFZ2_3mut |
| GGGGGSEAAAK | 18804 | GALV_P21414_3mutA |
| GGGGGSGSS | 18805 | BAEVM_P10272_3mutA |
| GGGEAAAKGSS | 18806 | KORV_Q9TTC1_3mutA |
| GGGGGSPAP | 18807 | AVIRE_P03360_3mut |
| GGGGGSEAAAK | 18808 | SFV3L_P27401_2mutA |
| GGS | | KORV_Q9TTC1_3mutA |
| GGGGGGG | 18809 | PERV_Q4VFZ2_3mut |
| SGSETPGTSESATPES | 18810 | SFV3L_P27401_2mutA |
| EAAAKGGSGGG | 18811 | MLVMS_P03355_3mut |
| GGGGS | 18812 | MLVFF_P26809_3mut |
| EAAAKGSSGGG | 18813 | BAEVM_P10272_3mut |
| EAAAKPAPGGS | 18814 | MLVF5_P26810_3mutA |
| SGGSSGGSSGSETPGTSESATPESSGGSSGGSS | 18815 | SFV3L_P27401_2mutA |
| GGSPAPGGG | 18816 | WMSV_P03359_3mutA |
| GSAGSAAGSGEF | 18817 | MLVFF_P26809_3mut |
| GGGGSSGGS | 18818 | MLVMS_P03355_3mutA_WS |
| GGGGGGG | 18819 | MLVCB_P08361_3mut |
| GSSEAAAK | 18820 | WMSV_P03359_3mut |
| PAPGSS | 18821 | FLV_P10273_3mutA |
| GSSGGG | 18822 | PERV_Q4VFZ2_3mutA_WS |
| PAPGGG | 18823 | MLVFF_P26809_3mut |
| GGGGGSPAP | 18824 | MLVMS_P03355_3mut |
| GGSEAAAK | 18825 | XMRV6_A1Z651_3mut |
| GSSGGG | 18826 | PERV_Q4VFZ2_3mut |
| GGSGGSGGSGGS | 18827 | MLVMS_P03355_3mut |
| PAPAP | 18828 | AVIRE_P03360_3mut |
| GGSEAAAK | 18829 | PERV_Q4VFZ2_3mut |
| GGGGS | 18830 | MLVMS_P03355_PLV919 |
| GGGG | 18831 | BAEVM_P10272_3mutA |
| EAAAKGGGGSS | 18832 | MLVCB_P08361_3mutA |
| EAAAKEAAAKEAAAK | 18833 | GALV_P21414_3mutA |
| PAPGGGEAAAK | 18834 | KORV_Q9TTC1 |
| EAAAKGGSPAP | 18835 | MLVMS_P03355_3mut |
| GGSGSSEAAAK | 18836 | MLVMS_P03355_3mut |
| GGSPAPEAAAK | 18837 | FLV_P10273_3mutA |
| GGGGGGG | 18838 | PERV_Q4VFZ2_3mut |
| EAAAKEAAAKEAAAKEAAAKEAAAKEAAAK | 18839 | SFV1_P23074_2mutA |
| EAAAKGSSGGS | 18840 | MLVMS_P03355_3mut |
| GSSEAAAKPAP | 18841 | MLVFF_P26809_3mut |
| GGGGSS | 18842 | FLV_P10273_3mutA |
| EAAAKGGSGGG | 18843 | AVIRE_P03360_3mutA |
| GGSGGS | 18844 | PERV_Q4VFZ2_3mutA_WS |
| GGGGGSPAP | 18845 | AVIRE_P03360_3mutA |
| EAAAKEAAAKEAAAK | 18846 | XMRV6_A1Z651_3mut |
| PAPEAAAKGGS | 18847 | FLV_P10273_3mutA |
| GSSGGSEAAAK | 18848 | MLVCB_P08361_3mut |
| EAAAKGGSGGG | 18849 | MLVMS_P03355 |
| GGSGGGPAP | 18850 | MLVMS_P03355_3mut |
| GGS | | XMRV6_A1Z651_3mut |
| GGSEAAAKPAP | 18851 | MLVFF_P26809_3mut |
| EAAAKGGG | 18852 | MLVMS_P03355_PLV919 |
| GSSGSSGSSGSS | 18853 | WMSV_P03359_3mut |
| GGSGSSPAP | 18854 | PERV_Q4VFZ2_3mut |
| GGGEAAAK | 18855 | MLVMS_P03355_3mutA_WS |
| GSSPAPGGS | 18856 | KORV_Q9TTC1-Pro_3mutA |
| GSSEAAAKGGG | 18857 | SFV3L_P27401_2mut |
| EAAAKPAPGGS | 18858 | MLVCB_P08361_3mut |
| GGSGGGEAAAK | 18859 | PERV_Q4VFZ2 |
| GGSGSS | 18860 | MLVCB_P08361_3mut |
| GGSGGGEAAAK | 18861 | MLVBM_Q7SVK7_3mutA_WS |
| GGSGGSGGSGGSGGSGGS | 18862 | FLV_P10273_3mut |
| PAPEAAAKGSS | 18863 | MLVMS_P03355_3mut |
| EAAAKGSSGGS | 18864 | WMSV_P03359_3mutA |
| GGSGSSEAAAK | 18865 | MLVCB_P08361_3mut |
| GGSGSSEAAAK | 18866 | KORV_Q9TTC1_3mutA |
| GSSGGSGGG | 18867 | MLVMS_P03355_PLV919 |
| EAAAKGGSGGG | 18868 | SFV3L_P27401-Pro_2mutA |
| GGSGGS | 18869 | AVIRE_P03360_3mutA |
| GSAGSAAGSGEF | 18870 | MLVMS_P03355_PLV919 |
| GGSGSS | 18871 | GALV_P21414_3mutA |
| GGGG | 18872 | MLVFF_P26809_3mutA |
| GGGGSGGGGSGGGGSGGGGS | 18873 | WMSV_P03359_3mut |
| SGSETPGTSESATPES | 18874 | BAEVM_P10272_3mut |
| EAAAKEAAAKEAAAKEAAAK | 18875 | FOAMV_P14350_2mutA |
| GGGEAAAKGGS | 18876 | FLV_P10273_3mutA |
| GSSGGSEAAAK | 18877 | MLVFF_P26809_3mut |
| EAAAKGGGGSS | 18878 | MLVAV_P03356_3mut |
| PAPGGSEAAAK | 18879 | KORV_Q9TTC1-Pro_3mut |
| EAAAK | 18880 | XMRV6_A1Z651_3mut |
| GSSGSSGSSGSSGSSGSS | 18881 | PERV_Q4VFZ2_3mut |
| GGGG | 18882 | MLVCB_P08361_3mutA |
| GSSGSS | 18883 | WMSV_P03359_3mutA |
| GSSGGSPAP | 18884 | AVIRE_P03360_3mut |
| GGSGGSGGS | 18885 | MLVCB_P08361_3mut |
| EAAAKGGGPAP | 18886 | FLV_P10273_3mutA |
| GGGGSGGGGS | 18887 | MLVCB_P08361_3mut |
| GGSEAAAKGSS | 18888 | PERV_Q4VFZ2_3mutA_WS |
| EAAAKEAAAKEAAAKEAAAKEAAAKEAAAK | 18889 | SFV3L_P27401_2mutA |
| GGSGSSEAAAK | 18890 | PERV_Q4VFZ2_3mutA_WS |
| EAAAKEAAAKEAAAKEAAAK | 18891 | SFV3L_P27401-Pro_2mutA |
| GSSEAAAKGGS | 18892 | FLV_P10273_3mutA |
| GGSGSS | 18893 | PERV_Q4VFZ2 |
| GGSGSSEAAAK | 18894 | SFV3L_P27401-Pro_2mutA |
| GSSGSSGSS | 18895 | XMRV6_A1Z651_3mutA |
| EAAAKGSSPAP | 18896 | KORV_Q9TTC1_3mutA |
| EAAAKPAP | 18897 | FLV_P10273_3mutA |
| GGSGSSEAAAK | 18898 | KORV_Q9TTC1-Pro_3mut |
| GGGGGGGGSGGGGSGGGGSGGGGSGGGGS | 18899 | KORV_Q9TTC1_3mutA |
| GGGGSGGGGSGGGGS | 18900 | KORV_Q9TTC1-Pro_3mutA |
| GGGGGGG | 18901 | FLV_P10273_3mut |
| EAAAKGSS | 18902 | WMSV_P03359_3mut |
| EAAAKGGGPAP | 18903 | MLVCB_P08361_3mut |
| GSSGSS | 18904 | MLVBM_Q7SVK7_3mutA_WS |
| EAAAKGGGGGS | 18905 | MLVFF_P26809_3mut |
| GGSGGGEAAAK | 18906 | FLV_P10273_3mutA |
| PAPGSS | 18907 | MLVFF_P26809_3mutA |
| PAPGSS | 18908 | BAEVM_P10272_3mutA |
| GGSPAPGSS | 18909 | AVIRE_P03360_3mut |
| GGGGSSEAAAK | 18910 | MLVMS_P03355_3mut |
| GSSGGGGGS | 18911 | FFV_O93209-Pro |
| EAAAKGSSPAP | 18912 | PERV_Q4VFZ2_3mut |
| GSSPAPGGS | 18913 | PERV_Q4VFZ2_3mut |
| GGGGGG | 18914 | BAEVM_P10272_3mut |
| EAAAKGGGGSS | 18915 | PERV_Q4VFZ2_3mutA_WS |
| PAPGGSEAAAK | 18916 | KORV_Q9TTC1_3mutA |
| SGGSSGGSSGSETPGTSESATPESSGGSSGGSS | 18917 | MLVMS_P03355_3mutA_WS |
| GSSGSSGSSGSS | 18918 | MLVMS_P03355_3mut |
| EAAAKGSSGGG | 18919 | MLVMS_P03355_PLV919 |
| GGSEAAAKPAP | 18920 | AVIRE_P03360_3mutA |
| GSSGSSGSSGSSGSS | 18921 | WMSV_P03359_3mutA |
| GGGEAAAKPAP | 18922 | FLV_P10273_3mutA |
| PAPGSSGGG | 18923 | KORV_Q9TTC1_3mutA |
| GSSGSS | 18924 | MLVMS_P03355_3mutA_WS |
| PAPEAAAK | 18925 | BAEVM_P10272_3mut |
| GGGPAPGSS | 18926 | PERV_Q4VFZ2 |
| GSSGGSPAP | 18927 | MLVFF_P26809_3mut |
| GGGGSS | 18928 | SFV3L_P27401_2mut |
| PAPEAAAKGSS | 18929 | SFV3L_P27401_2mut |
| GGSGGGPAP | 18930 | XMRV6_A1Z651_3mutA |
| PAPGGS | 18931 | BAEVM_P10272_3mutA |
| EAAAKGGGGGS | 18932 | AVIRE_P03360_3mut |
| GSSGGSPAP | 18933 | KORV_Q9TTC1-Pro_3mutA |
| GSSGGGGGS | 18934 | WMSV_P03359_3mut |
| GGGEAAAKGGS | 18935 | AVIRE_P03360_3mut |
| GGGEAAAKGSS | 18936 | BAEVM_P10272_3mut |
| PAPEAAAKGSS | 18937 | MLVAV_P03356_3mutA |
| GSSGSSGSSGSSGSS | 18938 | MLVCB_P08361_3mut |
| GGSPAPGSS | 18939 | FLV_P10273_3mutA |
| EAAAKGSSPAP | 18940 | BAEVM_P10272_3mutA |
| GGSGGSGGSGGSGGSGGS | 18941 | PERV_Q4VFZ2 |
| GGGGSSEAAAK | 18942 | FLV_P10273_3mutA |
| GGGGSSPAP | 18943 | FFV_O93209 |
| GSSGGSPAP | 18944 | MLVMS_P03355_3mut |
| GGGPAPGSS | 18945 | MLVMS_P03355_PLV919 |
| PAPGSSGGS | 18946 | PERV_Q4VFZ2_3mut |
| GGGGGSPAP | 18947 | MLVFF_P26809_3mut |
| SGSETPGTSESATPES | 18948 | MLVMS_P03355_3mutA_WS |
| GSSGSSGSSGSSGSS | 18949 | KORV_Q9TTC1_3mutA |
| GSSPAPGGG | 18950 | WMSV_P03359_3mut |
| PAPAPAPAPAPAP | 18951 | SFV3L_P27401_2mutA |
| GGGPAPGGS | 18952 | MLVMS_P03355_3mut |
| PAPGGSEAAAK | 18953 | WMSV_P03359_3mut |
| GGGGSSEAAAK | 18954 | FFV_O93209-Pro |
| GGSPAPGGG | 18955 | FLV_P10273_3mutA |
| GSSPAPEAAAK | 18956 | AVIRE_P03360_3mut |
| GGGEAAAK | 18957 | FLV_P10273_3mutA |
| PAPEAAAKGGG | 18958 | MLVCB_P08361_3mut |
| GGSPAPGGG | 18959 | MLVCB_P08361_3mut |
| GGSGGGGSS | 18960 | BAEVM_P10272_3mutA |
| GSSPAPEAAAK | 18961 | MLVCB_P08361_3mut |
| GGSPAPGGG | 18962 | KORV_Q9TTC1-Pro_3mutA |
| PAPGGSGSS | 18963 | KORV_Q9TTC1_3mutA |
| GSSPAP | 18964 | KORV_Q9TTC1-Pro_3mutA |
| SGSETPGTSESATPES | 18965 | MLVMS_P03355 |
| GSSGSSGSS | 18966 | MLVAV_P03356_3mutA |
| PAPGSSGGS | 18967 | PERV_Q4VFZ2_3mutA_WS |
| PAPGGS | 18968 | KORV_Q9TTC1-Pro_3mutA |
| PAPEAAAKGGG | 18969 | SFV3L_P27401-Pro_2mutA |
| GGSGGSGGS | 18970 | BAEVM_P10272_3mut |
| PAPGGS | 18971 | MLVFF_P26809_3mut |
| GSSGGSPAP | 18972 | MLVMS_P03355_PLV919 |
| GSSGGGGGS | 18973 | FLV_P10273_3mutA |
| GGGGGSPAP | 18974 | KORV_Q9TTC1-Pro_3mut |
| EAAAKPAPGSS | 18975 | SFV3L_P27401-Pro_2mutA |
| EAAAKGGSPAP | 18976 | KORV_Q9TTC1-Pro |
| GGGPAPEAAAK | 18977 | MLVMS_P03355_PLV919 |
| GGSEAAAKGSS | 18978 | MLVMS_P03355 |
| PAPEAAAKGSS | 18979 | KORV_Q9TTC1_3mutA |
| PAPEAAAKGGS | 18980 | WMSV_P03359_3mutA |
| GSSGGG | 18981 | PERV_Q4VFZ2_3mutA_WS |
| EAAAKGGGGSS | 18982 | MLVMS_P03355_PLV919 |
| EAAAKGGSPAP | 18983 | AVIRE_P03360_3mutA |
| GGGGSSGGS | 18984 | MLVMS_P03355_PLV919 |
| PAPEAAAKGSS | 18985 | PERV_Q4VFZ2_3mutA_WS |
| EAAAKGGGGGS | 18986 | BAEVM_P10272_3mut |
| GSSGGGGGS | 18987 | MLVMS_P03355_3mut |
| PAPAPAPAP | 18988 | KORV_Q9TTC1_3mutA |
| GGSGGSGGSGGS | 18989 | MLVAV_P03356_3mut |
| PAPAPAPAP | 18990 | SFV3L_P27401_2mut |
| GSSEAAAKPAP | 18991 | MLVMS_P03355_3mut |
| GGSGGGEAAAK | 18992 | SFV3L_P27401_2mutA |
| GSSGGSGGG | 18993 | MLVMS_P03355_3mutA_WS |
| GGGGGSPAP | 18994 | MLVCB_P08361_3mutA |
| GGGEAAAKGSS | 18995 | XMRV6_A1Z651_3mutA |
| GGGGSSPAP | 18996 | BAEVM_P10272_3mut |
| GGSGGG | 18997 | PERV_Q4VFZ2_3mut |
| GGGGSS | 18998 | MLVBM_Q7SVK7_3mutA_WS |
| EAAAKGSSGGS | 18999 | PERV_Q4VFZ2_3mutA_WS |
| GSSGGGGGS | 19000 | PERV_Q4VFZ2 |
| EAAAKGSSGGS | 19001 | PERV_Q4VFZ2_3mut |
| EAAAKEAAAK | 19002 | MLVAV_P03356_3mut |
| GSSGGGEAAAK | 19003 | MLVAV_P03356_3mut |
| GSSPAPGGG | 19004 | XMRV6_A1Z651_3mut |
| GGGGSGGGGSGGGGS | 19005 | PERV_Q4VFZ2_3mut |
| EAAAKEAAAKEAAAKEAAAK | 19006 | KORV_Q9TTC1_3mutA |
| EAAAKGGSGSS | 19007 | MLVBM_Q7SVK7_3mut |
| PAPEAAAK | 19008 | BLVJ_P03361 |
| GSSGGG | 19009 | FFV_O93209-Pro |
| GGSGGGEAAAK | 19010 | KORV_Q9TTC1-Pro_3mutA |
| EAAAK | 19011 | FLV_P10273_3mutA |
| GGGGSSPAP | 19012 | MLVMS_P03355_3mut |
| GSS | | SFV3L_P27401-Pro_2mut |
| PAPEAAAKGSS | 19013 | BAEVM_P10272_3mut |
| GGGGGSPAP | 19014 | PERV_Q4VFZ2_3mut |
| GSSGSSGSS | 19015 | BAEVM_P10272_3mutA |
| GGGGSGGGGSGGGGSGGGGS | 19016 | SFV1_P23074_2mut |
| GGGGSSEAAAK | 19017 | SFV3L_P27401_2mutA |
| GGGGSGGGGSGGGGSGGGGS | 19018 | FOAMV_P14350-Pro_2mut |
| PAPGSSEAAAK | 19019 | MLVBM_Q7SVK7_3mutA_WS |
| GGGGGSGSS | 19020 | MLVFF_P26809_3mutA |
| GGSEAAAKGGG | 19021 | MLVBM_Q7SVK7_3mut |
| PAPGSSGGG | 19022 | PERV_Q4VFZ2 |
| GGS | | PERV_Q4VFZ2_3mutA_WS |
| EAAAKGGSGSS | 19023 | FLV_P10273_3mut |
| GGGEAAAK | 19024 | WMSV_P03359_3mutA |
| GGSEAAAKPAP | 19025 | MLVBM_Q7SVK7_3mut |
| SGSETPGTSESATPES | 19026 | FOAMV_P14350-Pro_2mutA |
| EAAAKPAPGGS | 19027 | AVIRE_P03360_3mut |
| EAAAKGGGGGS | 19028 | KORV_Q9TTC1-Pro_3mutA |
| GGGGS | 19029 | PERV_Q4VFZ2_3mut |
| GGSEAAAKGSS | 19030 | MLVFF_P26809_3mutA |
| GGSEAAAKGGG | 19031 | AVIRE_P03360 |
| GGSGGSGGSGGSGGSGGS | 19032 | SFV3L_P27401_2mut |
| GGSEAAAKGSS | 19033 | SFV3L_P27401-Pro_2mutA |
| GGGEAAAKPAP | 19034 | MLVCB_P08361_3mut |
| GGSEAAAK | 19035 | MLVMS_P03355_PLV919 |
| GGSPAPGSS | 19036 | KORV_Q9TTC1-Pro_3mutA |
| GSSPAPEAAAK | 19037 | WMSV_P03359_3mutA |
| GGSGSS | 19038 | KORV_Q9TTC1-Pro_3mutA |
| PAPGGGGGS | 19039 | AVIRE_P03360_3mut |
| PAPEAAAKGSS | 19040 | FFV_O93209-Pro |
| GGSGGGEAAAK | 19041 | WMSV_P03359_3mut |
| PAPGGG | 19042 | MLVMS_P03355_3mut |
| EAAAKGGG | 19043 | FLV_P10273_3mutA |
| GSSGSSGSSGSS | 19044 | MLVCB_P08361_3mut |
| EAAAKGGSGGG | 19045 | FFV_O93209 |
| GSSPAPGGS | 19046 | PERV_Q4VFZ2_3mutA_WS |
| GSSPAPGGS | 19047 | MLVCB_P08361_3mut |
| GGGPAP | 19048 | WMSV_P03359_3mutA |
| GGGPAP | 19049 | KORV_Q9TTC1_3mutA |
| GGSPAPGSS | 19050 | KORV_Q9TTC1-Pro_3mut |
| PAPAP | 19051 | MLVMS_P03355_3mut |
| GGGGGGG | 19052 | MLVMS_P03355_3mut |
| GGGGG | 19053 | KORV_Q9TTC1-Pro_3mut |
| GSAGSAAGSGEF | 19054 | FOAMV_P14350_2mutA |
| PAPAP | 19055 | KORV_Q9TTC1-Pro_3mutA |
| GGSEAAAKGGG | 19056 | SFV3L_P27401-Pro_2mutA |
| PAPAP | 19057 | WMSV_P03359_3mut |
| GGGGSGGGGSGGGGS | 19058 | SFV3L_P27401_2mut |
| PAPGGS | 19059 | KORV_Q9TTC1_3mutA |
| GGGEAAAKPAP | 19060 | FLV_P10273_3mut |
| GGGGGS | 19061 | MLVAV_P03356_3mutA |
| GSSEAAAKGGG | 19062 | WMSV_P03359_3mut |
| EAAAKGGGGSS | 19063 | GALV_P21414_3mutA |
| GSSGGS | 19064 | MLVAV_P03356_3mutA |
| GSSGGG | 19065 | MLVBM_Q7SVK7_3mut |
| PAPAPAP | 19066 | SFV3L_P27401-Pro_2mutA |
| GGGG | 19067 | KORV_Q9TTC1_3mutA |
| EAAAKPAPGGS | 19068 | MLVFF_P26809_3mut |
| GGGGSGGGGS | 19069 | XMRV6_A1Z651_3mut |
| EAAAKGGG | 19070 | MLVCB_P08361_3mut |
| GGGGSSPAP | 19071 | KORV_Q9TTC1_3mutA |
| GSSEAAAKGGG | 19072 | KORV_Q9TTC1-Pro_3mutA |
| GGGGG | 19073 | BLVJ_P03361_2mutB |
| GGGEAAAKGSS | 19074 | FFV_O93209-Pro |
| GSSGSSGSS | 19075 | BAEVM_P10272_3mut |
| GSSGGSPAP | 19076 | PERV_Q4VFZ2_3mut |
| EAAAKGGS | 19077 | KORV_Q9TTC1_3mut |
| GGSPAPEAAAK | 19078 | AVIRE_P03360_3mut |
| GGSEAAAK | 19079 | WMSV_P03359_3mut |
| GSSGGS | 19080 | KORV_Q9TTC1-Pro_3mutA |
| GGGPAPEAAAK | 19081 | KORV_Q9TTC1_3mutA |
| PAPGSS | 19082 | WMSV_P03359_3mutA |
| GGSEAAAKGSS | 19083 | FLV_P10273_3mutA |
| EAAAKEAAAKEAAAKEAAAKEAAAK | 19084 | SFV3L_P27401 |
| GSSEAAAKGGG | 19085 | SFV3L_P27401-Pro_2mutA |
| GGGGSEAAAKGGGGS | 19086 | KORV_Q9TTC1-Pro_3mutA |
| GGSGGSGGS | 19087 | WMSV_P03359_3mut |
| GGGGGSGSS | 19088 | KORV_Q9TTC1-Pro |
| GGGGSGGGGSGGGGSGGGGS | 19089 | MLVMS_P03355_3mut |
| EAAAKGGG | 19090 | PERV_Q4VFZ2 |
| GGSEAAAKGGG | 19091 | KORV_Q9TTC1-Pro_3mut |
| GSSGGSGGG | 19092 | PERV_Q4VFZ2_3mutA_WS |
| GGGGGS | 19093 | PERV_Q4VFZ2_3mut |
| GSAGSAAGSGEF | 19094 | PERV_Q4VFZ2 |
| PAPEAAAKGSS | 19095 | BAEVM_P10272_3mutA |
| GSSPAPGGG | 19096 | MLVCB_P08361_3mut |
| GGGGSSPAP | 19097 | KORV_Q9TTC1-Pro_3mutA |
| PAPGGSGGG | 19098 | MLVFF_P26809_3mut |
| GSSPAP | 19099 | KORV_Q9TTC1_3mutA |
| PAPGSS | 19100 | SFV3L_P27401-Pro_2mut |
| GGSGGGGSS | 19101 | MLVMS_P03355_PLV919 |
| GSSGGS | 19102 | WMSV_P03359_3mutA |
| EAAAKGGGGGS | 19103 | PERV_Q4VFZ2 |
| GGGGG | 19104 | KORV_Q9TTC1_3mutA |
| EAAAKGSS | 19105 | MLVMS_P03355_PLV919 |
| EAAAKEAAAKEAAAKEAAAKEAAAK | 19106 | FLV_P10273_3mut |
| EAAAKEAAAKEAAAKEAAAK | 19107 | SFV3L_P27401-Pro_2mut |
| GSAGSAAGSGEF | 19108 | SFV3L_P27401_2mutA |
| GGGPAPGGS | 19109 | FLV_P10273_3mutA |
| GGSEAAAKGGG | 19110 | MLVCB_P08361_3mut |
| PAPGGGEAAAK | 19111 | BAEVM_P10272_3mut |
| EAAAKPAPGSS | 19112 | FOAMV_P14350_2mut |
| GGSEAAAK | 19113 | KORV_Q9TTC1_3mutA |
| GGSGSS | 19114 | AVIRE_P03360 |
| GGSPAPEAAAK | 19115 | MLVMS_P03355_PLV919 |
| GGGGS | 19116 | XMRV6_A1Z651_3mut |
| GGSPAPGGG | 19117 | XMRV6_A1Z651_3mut |
| EAAAKPAPGGS | 19118 | PERV_Q4VFZ2 |
| GSSPAP | 19119 | BAEVM_P10272_3mut |
| GGSGSSGGG | 19120 | FLV_P10273_3mutA |
| PAPGGG | 19121 | PERV_Q4VFZ2_3mutA_WS |
| GSSGGSEAAAK | 19122 | MLVBM_Q7SVK7_3mut |
| GGSEAAAK | 19123 | MLVMS_P03355_3mut |
| GGGPAPGGS | 19124 | MLVFF_P26809_3mut |
| GSAGSAAGSGEF | 19125 | MLVBM_Q7SVK7_3mutA_WS |
| EAAAKPAPGGS | 19126 | SFVCP_Q87040 |
| PAPGGG | 19127 | PERV_Q4VFZ2_3mutA_WS |
| GSSPAPEAAAK | 19128 | MLVBM_Q7SVK7 |
| PAPEAAAK | 19129 | MLVBM_Q7SVK7_3mut |
| PAPGGGGGS | 19130 | AVIRE_P03360_3mutA |
| GGSEAAAKPAP | 19131 | MLVBM_Q7SVK7_3mut |
| EAAAKGSS | 19132 | WMSV_P03359_3mutA |
| GGGEAAAK | 19133 | MLVFF_P26809_3mutA |
| EAAAKEAAAKEAAAK | 19134 | MLVMS_P03355_3mut |
| PAPEAAAKGGG | 19135 | BAEVM_P10272_3mut |
| PAPAPAP | 19136 | MLVCB_P08361_3mut |
| EAAAKPAPGGS | 19137 | BAEVM_P10272_3mut |
| GGGGSGGGGS | 19138 | FLV_P10273_3mut |
| GGGGSEAAAKGGGGS | 19139 | KORV_Q9TTC1_3mut |
| EAAAK | 19140 | FLV_P10273_3mut |
| PAPAPAP | 19141 | WMSV_P03359_3mut |
| GGGGSEAAAKGGGGS | 19142 | FFV_O93209-Pro |
| GGSPAPEAAAK | 19143 | MLVMS_P03355_3mut |
| GGSGSSGGG | 19144 | XMRV6_A1Z651_3mut |
| GGSPAPGSS | 19145 | PERV_Q4VFZ2_3mut |
| SGGSSGGSSGSETPGTSESATPESSGGSSGGSS | 19146 | SFV3L_P27401-Pro_2mutA |
| EAAAKGGGPAP | 19147 | BAEVM_P10272_3mutA |
| GSSGGSEAAAK | 19148 | MLVMS_P03355_3mutA_WS |
| SGSETPGTSESATPES | 19149 | PERV_Q4VFZ2_3mutA_WS |
| EAAAKEAAAKEAAAKEAAAKEAAAK | 19150 | KORV_Q9TTC1-Pro_3mutA |
| GSSGSSGSS | 19151 | KORV_Q9TTC1_3mutA |
| GSSPAPGGG | 19152 | SFV3L_P27401-Pro_2mutA |
| GSSGGGEAAAK | 19153 | KORV_Q9TTC1_3mutA |
| GGSGGGGSS | 19154 | PERV_Q4VFZ2_3mutA_WS |
| GSSGGGEAAAK | 19155 | MLVCB_P08361_3mut |
| GSSEAAAKGGG | 19156 | MLVCB_P08361_3mut |
| GGSGGGGSS | 19157 | KORV_Q9TTC1_3mutA |
| GGSGSSPAP | 19158 | PERV_Q4VFZ2_3mutA_WS |
| GSSPAP | 19159 | MLVMS_P03355_3mut |
| GGGGSSEAAAK | 19160 | AVIRE_P03360 |
| GGS | | WMSV_P03359_3mut |
| EAAAKEAAAK | 19161 | PERV_Q4VFZ2_3mut |
| PAPAPAPAP | 19162 | MLVAV_P03356_3mut |
| GGSEAAAKGGG | 19163 | KORV_Q9TTC1_3mutA |
| PAPGGG | 19164 | MLVAV_P03356_3mut |
| EAAAKGSS | 19165 | BAEVM_P10272_3mut |
| GGGGSGGGGS | 19166 | WMSV_P03359_3mutA |
| GGSGGSGGS | 19167 | SFV3L_P27401_2mut |
| EAAAK | 19168 | MLVCB_P08361_3mut |
| GGGGSSGGS | 19169 | WMSV_P03359_3mutA |
| GGGPAPEAAAK | 19170 | MLVAV_P03356_3mutA |
| EAAAKEAAAKEAAAK | 19171 | FFV_O93209 |
| GSSEAAAKGGG | 19172 | MLVBM_Q7SVK7_3mut |
| GGGPAPGGS | 19173 | FLV_P10273_3mut |
| GGSEAAAKGGG | 19174 | WMSV_P03359_3mut |
| EAAAKGGGGGS | 19175 | XMRV6_A1Z651_3mutA |
| EAAAKGGSGGG | 19176 | FLV_P10273_3mutA |
| GGSEAAAKGGG | 19177 | SFV3L_P27401_2mutA |
| GGGGS | 19178 | PERV_Q4VFZ2_3mutA_WS |
| GSSGGS | 19179 | MLVMS_P03355_3mut |
| GSSGSS | 19180 | MLVAV_P03356_3mutA |
| GGSPAPGGG | 19181 | MLVBM_Q7SVK7_3mutA_WS |
| GSSGGGGGS | 19182 | MLVF5_P26810_3mut |
| PAPAPAPAP | 19183 | MLVCB_P08361_3mut |
| PAPAP | 19184 | PERV_Q4VFZ2_3mutA_WS |
| PAPGSSGGS | 19185 | KORV_Q9TTC1_3mut |
| PAPGSSGGG | 19186 | PERV_Q4VFZ2_3mut |
| GGGEAAAK | 19187 | MLVMS_P03355_PLV919 |
| GGSGGSGGSGGSGGS | 19188 | SFV3L_P27401-Pro_2mutA |
| GGSGGG | 19189 | FLV_P10273_3mut |
| PAPEAAAKGGG | 19190 | MLVFF_P26809_3mut |
| PAP | | PERV_Q4VFZ2_3mutA_WS |
| PAPGGSGSS | 19191 | FFV_O93209_2mut |
| EAAAKEAAAKEAAAKEAAAKEAAAKEAAAK | 19192 | FFV_O93209-Pro_2mut |
| GSSGSSGSSGSS | 19193 | FFV_O93209-Pro |
| GSSGSSGSSGSSGSS | 19194 | FLV_P10273_3mutA |
| GGGEAAAKPAP | 19195 | PERV_Q4VFZ2 |
| PAPGSSGGG | 19196 | SFV3L_P27401_2mut |
| PAPGGSGSS | 19197 | KORV_Q9TTC1-Pro_3mut |
| PAPAPAPAPAP | 19198 | GALV_P21414_3mutA |
| GGSGGGEAAAK | 19199 | PERV_Q4VFZ2_3mut |
| GSSPAP | 19200 | MLVCB_P08361_3mut |
| EAAAKPAP | 19201 | MLVF5_P26810_3mut |
| GGGGSGGGGSGGGGSGGGGS | 19202 | MLVBM_Q7SVK7_3mut |
| GGSGGG | 19203 | WMSV_P03359_3mut |
| GGSGGSGGS | 19204 | KORV_Q9TTC1_3mut |
| GGGGGGGG | 19205 | MLVFF_P26809_3mut |
| GGGGSS | 19206 | MLVAV_P03356_3mut |
| GSSGGGGGS | 19207 | SFV3L_P27401_2mut |
| EAAAKEAAAKEAAAKEAAAKEAAAKEAAAK | 19208 | GALV_P21414_3mutA |
| GSSGSSGSS | 19209 | PERV_Q4VFZ2_3mut |
| GSSPAPGGS | 19210 | MLVFF_P26809_3mut |
| PAPAPAP | 19211 | AVIRE_P03360_3mutA |
| EAAAKEAAAKEAAAKEAAAK | 19212 | WMSV_P03359_3mutA |
| PAPAPAPAP | 19213 | SFV3L_P27401_2mutA |
| GGGGSS | 19214 | MLVAV_P03356_3mutA |
| GSSGSSGSSGSSGSS | 19215 | SFV3L_P27401_2mutA |
| PAPGGS | 19216 | WMSV_P03359_3mutA |
| GSSEAAAKGGG | 19217 | PERV_Q4VFZ2 |
| GSSGGSPAP | 19218 | MLVMS_P03355_PLV919 |
| GSSGSSGSSGSSGSSGSS | 19219 | SFV3L_P27401_2mutA |
| GGSGSSGGG | 19220 | MLVCB_P08361_3mut |
| GGGPAPGSS | 19221 | SFV3L_P27401-Pro_2mutA |
| GSSEAAAKGGS | 19222 | WMSV_P03359_3mut |
| GSSEAAAKGGG | 19223 | MLVAV_P03356_3mut |
| GGSGGGPAP | 19224 | FFV_O93209-Pro |
| GSSGSS | 19225 | PERV_Q4VFZ2_3mut |
| PAPGGGGGS | 19226 | GALV_P21414_3mutA |
| EAAAKPAPGGS | 19227 | MLVAV_P03356_3mut |
| GSSGSS | 19228 | MLVMS_P03355_3mut |
| EAAAKPAPGGS | 19229 | FFV_O93209-Pro |
| GGGPAPEAAAK | 19230 | MLVMS_P03355_3mutA_WS |
| GSSEAAAKGGG | 19231 | MLVBM_Q7SVK7_3mut |
| GGGEAAAKGGS | 19232 | BAEVM_P10272_3mut |
| GSSGSS | 19233 | KORV_Q9TTC1-Pro_3mutA |
| EAAAKEAAAKEAAAK | 19234 | SFV1_P23074 |
| PAPGSSGGS | 19235 | KORV_Q9TTC1-Pro_3mut |
| PAPAPAPAPAP | 19236 | MLVMS_P03355 |
| GSSEAAAK | 19237 | SFV3L_P27401_2mut |
| PAP | | PERV_Q4VFZ2_3mut |
| GGSEAAAKGGG | 19238 | MLVBM_Q7SVK7_3mut |
| GGSGGGPAP | 19239 | MLVBM_Q7SVK7_3mutA_WS |
| GSSGSS | 19240 | MLVMS_P03355_3mut |
| GGSEAAAK | 19241 | MLVMS_P03355 |
| GSSEAAAKGGS | 19242 | MLVMS_P03355_PLV919 |
| PAPGGGGGS | 19243 | MLVFF_P26809_3mut |
| GSSGGG | 19244 | PERV_Q4VFZ2_3mut |
| GSSGGS | 19245 | PERV_Q4VFZ2_3mutA_WS |
| PAPGGG | 19246 | BAEVM_P10272_3mut |
| PAPGSSGGG | 19247 | MLVBM_Q7SVK7_3mut |
| GGSEAAAK | 19248 | SFV3L_P27401_2mut |
| GSSPAPEAAAK | 19249 | SFV3L_P27401-Pro_2mut |
| GSSGGSPAP | 19250 | BAEVM_P10272_3mut |
| GGSPAPGSS | 19251 | PERV_Q4VFZ2_3mutA_WS |
| GGSGGSGGS | 19252 | PERV_Q4VFZ2 |
| GGSGGGPAP | 19253 | FLV_P10273_3mut |
| GGGPAPEAAAK | 19254 | SFV3L_P27401_2mutA |
| GGGGS | 19255 | FLV_P10273_3mutA |
| GSSGGSGGG | 19256 | XMRV6_A1Z651_3mut |
| EAAAKGGGGSS | 19257 | PERV_Q4VFZ2 |
| GGSGSSGGG | 19258 | SFV3L_P27401-Pro_2mutA |
| GGSGGSGGS | 19259 | MLVFF_P26809_3mut |
| GGGPAPEAAAK | 19260 | FLV_P10273_3mut |
| GSSGGGEAAAK | 19261 | MLVMS_P03355_3mut |
| GGG | | SFV3L_P27401_2mut |
| GSAGSAAGSGEF | 19262 | WMSV_P03359_3mut |
| GSSGGGPAP | 19263 | MLVMS_P03355_PLV919 |
| GGGGSS | 19264 | KORV_Q9TTC1-Pro_3mut |
| GGGGSSEAAAK | 19265 | KORV_Q9TTC1 |
| PAPGGSGGG | 19266 | SFV3L_P27401_2mut |
| GSSGSSGSSGSSGSS | 19267 | FFV_O93209 |
| GSSGGSPAP | 19268 | MLVMS_P03355_3mut |
| GGSEAAAK | 19269 | KORV_Q9TTC1-Pro_3mutA |
| GGGGSGGGGS | 19270 | BAEVM_P10272_3mut |
| GSSEAAAKGGG | 19271 | AVIRE_P03360_3mut |
| EAAAKPAPGGG | 19272 | FLV_P10273_3mut |
| EAAAKGGSPAP | 19273 | SFV3L_P27401-Pro_2mutA |
| GSSEAAAKPAP | 19274 | MLVBM_Q7SVK7_3mut |
| GGGPAPGGS | 19275 | MLVCB_P08361_3mut |
| GGG | | SFV3L_P27401_2mutA |
| EAAAKGGGGSEAAAK | 19276 | SFV3L_P27401_2mutA |
| GGSGSSGGG | 19277 | MLVBM_Q7SVK7_3mut |
| GSAGSAAGSGEF | 19278 | BAEVM_P10272_3mut |
| GGGEAAAK | 19279 | FOAMV_P14350_2mutA |
| PAPEAAAKGGS | 19280 | WMSV_P03359_3mut |
| PAPAPAPAPAPAP | 19281 | MLVF5_P26810_3mutA |
| GGSGGGGSS | 19282 | FLV_P10273_3mutA |
| PAPGSSGGS | 19283 | BAEVM_P10272_3mut |
| PAPEAAAK | 19284 | WMSV_P03359_3mutA |
| GSSGSSGSSGSSGSSGSS | 19285 | FFV_O93209-Pro_2mut |
| GGGGGSGSS | 19286 | FFV_O93209-Pro |
| GGGGGGGG | 19287 | SFV3L_P27401-Pro_2mutA |
| GGGGGG | 19288 | FLV_P10273_3mut |
| GSSGGSGGG | 19289 | MLVAV_P03356_3mutA |
| GGGGSS | 19290 | SFV3L_P27401-Pro_2mutA |
| GGSGGGPAP | 19291 | FOAMV_P14350_2mut |
| GSSGSS | 19292 | AVIRE_P03360_3mutA |
| EAAAKEAAAKEAAAKEAAAKEAAAK | 19293 | SFV3L_P27401-Pro_2mutA |
| EAAAKEAAAK | 19294 | BAEVM_P10272_3mut |
| GSSPAPEAAAK | 19295 | GALV_P21414_3mutA |
| GGSEAAAKPAP | 19296 | SFV3L_P27401_2mutA |
| GGSGGGEAAAK | 19297 | SFV3L_P27401-Pro_2mutA |
| EAAAKGSSPAP | 19298 | FOAMV_P14350_2mut |
| GGSGSSEAAAK | 19299 | SFV3L_P27401_2mut |
| GGG | | PERV_Q4VFZ2 |
| GGGGGSGSS | 19300 | FOAMV_P14350_2mut |
| GGSGGGEAAAK | 19301 | KORV_Q9TTC1-Pro_3mut |
| GSSGGSGGG | 19302 | AVIRE_P03360_3mutA |
| EAAAKPAPGGG | 19303 | SFV3L_P27401_2mutA |
| PAPGGSGGG | 19304 | KORV_Q9TTC1-Pro_3mut |
| PAPAPAP | 19305 | WMSV_P03359_3mutA |
| GSSEAAAKPAP | 19306 | SFV1_P23074 |
| SGGSSGGSSGSETPGTSESATPESSGGSSGGSS | 19307 | SRV2_P51517 |
| GSSGGSGGG | 19308 | PERV_Q4VFZ2_3mutA_WS |
| GSSGSSGSSGSSGSSGSS | 19309 | FFV_O93209 |
| GSSGGGPAP | 19310 | WMSV_P03359_3mut |
| PAPAPAPAPAPAP | 19311 | MLVBM_Q7SVK7_3mut |
| GGGGGSPAP | 19312 | KORV_Q9TTC1-Pro_3mutA |
| PAPGSS | 19313 | MLVBM_Q7SVK7_3mutA_WS |
| PAPEAAAKGGS | 19314 | SFV3L_P27401-Pro_2mut |
| GGGGSSPAP | 19315 | MLVMS_P03355_3mut |
| GGSEAAAK | 19316 | FFV_O93209-Pro |
| EAAAKPAPGGS | 19317 | AVIRE_P03360_3mutA |
| PAPGSS | 19318 | WMSV_P03359_3mut |
| PAPGSSGGG | 19319 | SFV3L_P27401-Pro_2mutA |
| EAAAKEAAAKEAAAK | 19320 | SFV3L_P27401_2mut |
| GGS | | MLVRD_P11227_3mut |
| GGGGS | 19321 | KORV_Q9TTC1-Pro_3mut |
| GGSGGGGSS | 19322 | KORV_Q9TTC1 |
| GGSGGG | 19323 | MLVMS_P03355_3mutA_WS |
| GGGEAAAKPAP | 19324 | BAEVM_P10272_3mut |
| EAAAKEAAAKEAAAKEAAAKEAAAK | 19325 | FLV_P10273 |
| PAPGGSGGG | 19326 | KORV_Q9TTC1-Pro_3mutA |
| GSSGSSGSSGSSGSSGSS | 19327 | HTL1L_P0C211 |
| GGGEAAAKPAP | 19328 | WMSV_P03359 |
| GSSGGSPAP | 19329 | FFV_O93209-Pro |
| PAPAPAPAPAP | 19330 | SFV3L_P27401-Pro_2mutA |
| GSSGGSEAAAK | 19331 | SFV3L_P27401_2mutA |
| GGSPAPGSS | 19332 | SFV3L_P27401_2mut |
| GGSGGSGGS | 19333 | KORV_Q9TTC1-Pro_3mut |
| PAPEAAAKGSS | 19334 | KORV_Q9TTC1-Pro_3mut |
| EAAAKGGS | 19335 | KORV_Q9TTC1_3mutA |
| EAAAKGGGGSEAAAK | 19336 | SFV3L_P27401-Pro_2mut |
| GGGGSSPAP | 19337 | FFV_O93209-Pro |
| EAAAK | 19338 | SFV3L_P27401_2mut |
| EAAAKGGGGSS | 19339 | BAEVM_P10272_3mut |
| GGGGGSEAAAK | 19340 | MLVBM_Q7SVK7_3mut |
| GGGG | 19341 | PERV_Q4VFZ2 |
| GGGGGSEAAAK | 19342 | FLV_P10273_3mut |
| EAAAKGGGPAP | 19343 | KORV_Q9TTC1-Pro |
| GGGGSGGGGSGGGGSGGGGS | 19344 | FFV_O93209_2mutA |
| GSSGGSGGG | 19345 | PERV_Q4VFZ2_3mut |
| GGGGSGGGGSGGGGS | 19346 | GALV_P21414_3mutA |
| GGSGGGEAAAK | 19347 | AVIRE_P03360_3mutA |
| PAPEAAAKGGG | 19348 | SFV3L_P27401_2mut |
| GGGGSGGGGS | 19349 | AVIRE_P03360 |
| GSSGGGEAAAK | 19350 | SFV3L_P27401_2mutA |
| GGGGG | 19351 | AVIRE_P03360_3mutA |
| GGSGSS | 19352 | KORV_Q9TTC1_3mut |
| PAPAPAPAPAPAP | 19353 | FOAMV_P14350_2mut |
| GGSEAAAKPAP | 19354 | KORV_Q9TTC1-Pro_3mut |
| GGGGGG | 19355 | PERV_Q4VFZ2_3mut |
| GSSGGGEAAAK | 19356 | MLVBM_Q7SVK7 |
| SGGSSGGSSGSETPGTSESATPESSGGSSGGSS | 19357 | MLVAV_P03356 |
| GGSPAPGSS | 19358 | BAEVM_P10272_3mut |
| GGGGSSPAP | 19359 | BAEVM_P10272 |
| GGGGSEAAAKGGGGS | 19360 | SFV3L_P27401_2mut |
| GGGGGGGG | 19361 | GALV_P21414_3mutA |
| PAPAP | 19362 | MLVAV_P03356_3mut |
| GGGEAAAK | 19363 | PERV_Q4VFZ2_3mutA_WS |
| GSSPAPGGG | 19364 | FFV_O93209_2mut |
| GGSGGSGGSGGSGGS | 19365 | BAEVM_P10272 |
| GGGGGS | 19366 | MLVF5_P26810_3mutA |
| PAPGGGGSS | 19367 | FLV_P10273_3mutA |
| GGGEAAAK | 19368 | MLVBM_Q7SVK7_3mut |
| PAPEAAAKGGG | 19369 | WMSV_P03359_3mut |
| GSSEAAAK | 19370 | MLVBM_Q7SVK7_3mut |
| EAAAKEAAAK | 19371 | AVIRE_P03360 |
| EAAAKGGGGGS | 19372 | MLVBM_Q7SVK7_3mut |
| GGGEAAAKGGS | 19373 | SFV3L_P27401-Pro_2mutA |
| PAPAPAPAPAP | 19374 | MLVF5_P26810_3mut |
| PAPGSSEAAAK | 19375 | SFV3L_P27401-Pro_2mutA |
| EAAAKEAAAKEAAAK | 19376 | BAEVM_P10272_3mutA |
| GGSPAPGSS | 19377 | MLVMS_P03355 |
| PAPGSSGGS | 19378 | FLV_P10273_3mutA |
| EAAAKEAAAKEAAAKEAAAK | 19379 | FOAMV_P14350-Pro_2mut |
| EAAAKGGG | 19380 | KORV_Q9TTC1_3mutA |
| EAAAKGGSGGG | 19381 | MLVBM_Q7SVK7_3mut |
| GGGGGS | 19382 | KORV_Q9TTC1-Pro_3mutA |
| PAPGGSGGG | 19383 | WMSV_P03359_3mut |
| GGGPAPGGS | 19384 | KORV_Q9TTC1_3mutA |
| GSS | | FFV_O93209 |
| GGSGGSGGS | 19385 | PERV_Q4VFZ2_3mut |
| GGGGS | 19386 | GALV_P21414_3mutA |
| GGGG | 19387 | MLVF5_P26810_3mut |
| GGSEAAAKPAP | 19388 | FFV_O93209-Pro_2mut |
| PAPAPAPAP | 19389 | FFV_O93209-Pro |
| PAP | | MLVF5_P26810_3mut |
| EAAAKEAAAKEAAAK | 19390 | FFV_O93209_2mut |
| EAAAKGSS | 19391 | MLVCB_P08361_3mut |
| EAAAKGGG | 19392 | MLVBM_Q7SVK7_3mut |
| PAPEAAAKGGG | 19393 | FFV_O93209_2mut |
| GSSGGGEAAAK | 19394 | SFV1_P23074-Pro_2mut |
| PAPGGGEAAAK | 19395 | GALV_P21414_3mutA |
| GGGGSGGGGSGGGGSGGGGS | 19396 | FOAMV_P14350-Pro_2mutA |
| GSSGGG | 19397 | FOAMV_P14350_2mut |
| GGGGSGGGGSGGGGSGGGGS | 19398 | SFV3L_P27401_2mutA |
| GGSGSS | 19399 | AVIRE_P03360_3mut |
| GGSGSSEAAAK | 19400 | MMTVB_P03365_WS |
| PAPAPAP | 19401 | MLVAV_P03356_3mutA |
| GSSGGSPAP | 19402 | SFV3L_P27401-Pro_2mut |
| GGSPAP | 19403 | AVIRE_P03360 |
| GGSGGGPAP | 19404 | FFV_O93209 |
| GSSEAAAK | 19405 | PERV_Q4VFZ2 |
| GSSGGGPAP | 19406 | PERV_Q4VFZ2_3mutA_WS |
| GGGGSSEAAAK | 19407 | KORV_Q9TTC1_3mutA |
| GGSEAAAKPAP | 19408 | SFVCP_Q87040 |
| GGSGGGPAP | 19409 | FOAMV_P14350_2mutA |
| GGGGSGGGGSGGGGSGGGGS | 19410 | BLVJ_P03361_2mutB |
| GGGGSSPAP | 19411 | SFV3L_P27401_2mutA |
| EAAAKGGS | 19412 | MLVF5_P26810_3mut |
| GGSEAAAKGSS | 19413 | MLVCB_P08361_3mut |
| GGGGSSEAAAK | 19414 | SFV3L_P27401_2mut |
| EAAAKGGSGGG | 19415 | FOAMV_P14350_2mut |
| GGSGGS | 19416 | FLV_P10273_3mut |
| EAAAKGGG | 19417 | FFV_O93209-Pro |
| GSSGSSGSSGSSGSS | 19418 | SFV3L_P27401 |
| GSSGGGPAP | 19419 | PERV_Q4VFZ2_3mutA_WS |
| PAPGGSEAAAK | 19420 | SFV3L_P27401-Pro_2mutA |
| GGSPAP | 19421 | KORV_Q9TTC1 |
| EAAAKPAPGSS | 19422 | KORV_Q9TTC1_3mutA |
| SGSETPGTSESATPES | 19423 | SFV1_P23074 |
| GSSPAP | 19424 | SFV3L_P27401-Pro_2mutA |
| GSSPAPGGG | 19425 | SFV3L_P27401_2mut |
| GGGEAAAKGSS | 19426 | SFV1_P23074_2mut |
| GGGPAPGGS | 19427 | BAEVM_P10272_3mut |
| EAAAKGGG | 19428 | KORV_Q9TTC1-Pro_3mutA |
| GSSGGG | 19429 | SFV3L_P27401-Pro_2mut |
| GGSPAPEAAAK | 19430 | BAEVM_P10272_3mut |
| EAAAKGSSPAP | 19431 | FFV_O93209 |
| EAAAKGGGGSEAAAK | 19432 | SFV3L_P27401-Pro_2mutA |
| GSSGSSGSSGSSGSS | 19433 | SFV1_P23074_2mut |
| EAAAKGGSPAP | 19434 | FOAMV_P14350_2mut |
| GGSGGS | 19435 | KORV_Q9TTC1-Pro_3mutA |
| EAAAKGSSGGS | 19436 | GALV_P21414 |
| GSSGGGPAP | 19437 | MLVAV_P03356 |
| PAPEAAAKGGS | 19438 | FOAMV_P14350_2mut |
| EAAAKPAPGGG | 19439 | AVIRE_P03360_3mut |
| GGSPAP | 19440 | SFV3L_P27401_2mutA |
| GGGGSGGGGS | 19441 | SFV3L_P27401_2mutA |
| GGGGSS | 19442 | AVIRE_P03360_3mutA |
| GGSPAPGGG | 19443 | SFV3L_P27401-Pro_2mutA |
| EAAAKPAPGSS | 19444 | SFV3L_P27401 |
| EAAAKPAP | 19445 | FOAMV_P14350-Pro_2mut |
| PAPEAAAKGSS | 19446 | PERV_Q4VFZ2_3mutA_WS |
| EAAAKGGSGSS | 19447 | SFV3L_P27401_2mutA |
| GGGEAAAKGSS | 19448 | GALV_P21414_3mutA |
| GGGGSEAAAKGGGGS | 19449 | PERV_Q4VFZ2_3mut |
| PAPGGSGSS | 19450 | FFV_O93209-Pro_2mutA |
| GGSEAAAKPAP | 19451 | GALV_P21414_3mutA |
| GGSGGSGGSGGSGGS | 19452 | FFV_O93209-Pro |
| GSSGGSEAAAK | 19453 | SFV3L_P27401-Pro_2mut |
| GGS | | GALV_P21414_3mutA |
| PAPGGSEAAAK | 19454 | MLVMS_P03355 |
| PAPEAAAKGGS | 19455 | BAEVM_P10272_3mutA |
| GGSGSSPAP | 19456 | SFV3L_P27401-Pro_2mutA |
| GSSPAP | 19457 | WMSV_P03359_3mut |
| GGGEAAAK | 19458 | MMTVB_P03365 |
| GGGGSS | 19459 | PERV_Q4VFZ2_3mut |
| GGSPAPGSS | 19460 | SFV3L_P27401-Pro_2mut |
| PAPGGS | 19461 | MLVBM_Q7SVK7_3mut |
| EAAAKGSSPAP | 19462 | MLVBM_Q7SVK7_3mut |
| GGGGSSGGS | 19463 | PERV_Q4VFZ2_3mut |
| PAPAPAPAPAPAP | 19464 | SFV1_P23074 |
| GGSEAAAKGGG | 19465 | SFV3L_P27401-Pro_2mut |
| GGSGGS | 19466 | SFV1_P23074_2mut |
| GSSGGGGGS | 19467 | MLVF5_P26810_3mutA |
| EAAAKGGGPAP | 19468 | SFV3L_P27401 |
| EAAAKEAAAKEAAAKEAAAK | 19469 | FOAMV_P14350-Pro_2mutA |
| GGGPAPGSS | 19470 | SFV3L_P27401_2mutA |
| GGGGSGGGGSGGGGSGGGGS | 19471 | SFV3L_P27401_2mut |
| EAAAKEAAAKEAAAKEAAAK | 19472 | MMTVB_P03365_WS |
| PAPGSSGGS | 19473 | KORV_Q9TTC1-Pro_3mutA |
| PAPGSSEAAAK | 19474 | FOAMV_P14350-Pro_2mut |
| GSSPAPEAAAK | 19475 | BAEVM_P10272_3mut |
| EAAAKGGGGSEAAAK | 19476 | FFV_O93209-Pro |
| GGSPAP | 19477 | PERV_Q4VFZ2 |
| GGSGSSEAAAK | 19478 | XMRV6_A1Z651_3mut |
| GGSEAAAKGGG | 19479 | GALV_P21414_3mutA |
| PAPGGGGSS | 19480 | AVIRE_P03360_3mutA |
| GGSGGSGGSGGS | 19481 | PERV_Q4VFZ2 |
| GGGGSSGGS | 19482 | PERV_Q4VFZ2_3mutA_WS |
| SGGSSGGSSGSETPGTSESATPESSGGSSGGSS | 19483 | BAEVM_P10272_3mutA |
| GGGPAP | 19484 | MLVAV_P03356_3mut |
| GGGGSGGGGSGGGGSGGGGS | 19485 | FFV_O93209_2mut |
| GSSEAAAK | 19486 | FFV_O93209 |
| GGSPAPEAAAK | 19487 | FOAMV_P14350_2mut |
| GGGGGSEAAAK | 19488 | FOAMV_P14350_2mut |
| GSSPAPGGS | 19489 | MLVBM_Q7SVK7_3mut |
| GSS | | SFVCP_Q87040_2mut |
| EAAAKPAP | 19490 | FOAMV_P14350-Pro |
| EAAAKGGG | 19491 | SFV3L_P27401_2mut |
| GGGEAAAK | 19492 | AVIRE_P03360_3mutA |
| PAPGSSGGG | 19493 | WMSV_P03359_3mut |
| EAAAKGGSPAP | 19494 | SFV3L_P27401 |
| GSSGGSGGG | 19495 | SFV3L_P27401-Pro_2mutA |
| GSSGGGEAAAK | 19496 | GALV_P21414_3mutA |
| GGGPAPGSS | 19497 | MLVBM_Q7SVK7_3mutA_WS |
| PAPGGGEAAAK | 19498 | FFV_O93209-Pro_2mut |
| GSSGSSGSSGSS | 19499 | SFV1_P23074_2mut |
| GGSEAAAK | 19500 | PERV_Q4VFZ2_3mutA_WS |
| GGGEAAAKPAP | 19501 | SFV3L_P27401_2mut |
| EAAAKGGGPAP | 19502 | SFV3L_P27401_2mut |
| GGGGSSPAP | 19503 | FLV_P10273_3mut |
| EAAAKPAPGSS | 19504 | FFV_O93209_2mut |
| GGGGSSPAP | 19505 | SFV3L_P27401_2mut |
| GSSGSS | 19506 | KORV_Q9TTC1_3mutA |
| GGGGSGGGGSGGGGSGGGGSGGGGS | 19507 | BLVJ_P03361_2mut |
| GGGGSSGGS | 19508 | GALV_P21414_3mutA |
| EAAAKGGSGSS | 19509 | FFV_O93209-Pro |
| EAAAKPAP | 19510 | PERV_Q4VFZ2 |
| GSSGGGEAAAK | 19511 | MLVBM_Q7SVK7_3mut |
| PAPGGSGGG | 19512 | BAEVM_P10272 |
| EAAAKGGGPAP | 19513 | MLVF5_P26810 |
| GSSGSSGSS | 19514 | MLVBM_Q7SVK7_3mut |
| GSSGGS | 19515 | AVIRE_P03360_3mutA |
| GGSEAAAKGGG | 19516 | FOAMV_P14350_2mut |
| EAAAKGGS | 19517 | MLVF5_P26810_3mutA |
| GGSGSSGGG | 19518 | WMSV_P03359_3mut |
| EAAAK | 19519 | SFV1_P23074_2mut |
| GSSGGSPAP | 19520 | SFV3L_P27401-Pro_2mutA |
| GGGGSSGGS | 19521 | KORV_Q9TTC1_3mut |
| PAPGGSGGG | 19522 | FFV_O93209-Pro_2mut |
| GGGPAPGGS | 19523 | SFV3L_P27401_2mutA |
| GSSPAPEAAAK | 19524 | FLV_P10273_3mut |
| GGSGSSPAP | 19525 | SFV3L_P27401_2mut |
| GSSEAAAKGGS | 19526 | SFV3L_P27401_2mut |
| PAPGGG | 19527 | SFV3L_P27401_2mutA |
| SGSETPGTSESATPES | 19528 | KORV_Q9TTC1-Pro_3mut |
| GGGGS | 19529 | SFV1_P23074-Pro_2mutA |
| GSSGGGEAAAK | 19530 | WMSV_P03359 |
| EAAAKGGGGSEAAAK | 19531 | MLVF5_P26810_3mutA |
| GSSEAAAKPAP | 19532 | FFV_O93209 |
| GGGGGG | 19533 | SFV1_P23074_2mutA |
| EAAAKEAAAKEAAAK | 19534 | MMTVB_P03365-Pro |
| EAAAKPAPGSS | 19535 | MLVBM_Q7SVK7_3mut |
| GGSGSSEAAAK | 19536 | SFV3L_P27401_2mutA |
| GGSEAAAK | 19537 | MLVMS_P03355_3mut |
| GGSPAPEAAAK | 19538 | SFV3L_P27401_2mut |
| GGGPAPGSS | 19539 | SFV1_P23074 |
| GGGGGSEAAAK | 19540 | MLVBM_Q7SVK7_3mutA_WS |
| EAAAKPAPGSS | 19541 | KORV_Q9TTC1-Pro |
| GSSGSSGSSGSS | 19542 | SFV3L_P27401_2mut |
| EAAAKPAP | 19543 | SFV3L_P27401_2mut |
| GGGEAAAK | 19544 | PERV_Q4VFZ2_3mut |
| GGSGGS | 19545 | SFV3L_P27401_2mutA |
| EAAAKGSSGGS | 19546 | MMTVB_P03365 |
| SGSETPGTSESATPES | 19547 | SFV3L_P27401 |
| EAAAKGSSGGG | 19548 | PERV_Q4VFZ2 |
| EAAAKEAAAKEAAAKEAAAKEAAAKEAAAK | 19549 | MMTVB_P03365 |
| GGSGGGPAP | 19550 | KORV_Q9TTC1_3mutA |
| PAPAPAPAP | 19551 | SFV3L_P27401 |
| GGGEAAAKGGS | 19552 | SFV1_P23074_2mut |
| GSSGGSGGG | 19553 | PERV_Q4VFZ2_3mut |
| PAPEAAAKGGS | 19554 | FOAMV_P14350_2mutA |
| GGGEAAAKGSS | 19555 | SFV3L_P27401_2mut |
| GGGGSGGGGSGGGGSGGGGS | 19556 | MLVBM_Q7SVK7 |
| PAPGSSGGG | 19557 | FLV_P10273 |
| GGSGSSGGG | 19558 | FFV_O93209 |
| EAAAKPAPGSS | 19559 | MLVBM_Q7SVK7 |
| GSSEAAAKGGG | 19560 | SFV3L_P27401_2mutA |
| GGSGGSGGSGGSGGS | 19561 | MLVF5_P26810 |
| GGSEAAAKPAP | 19562 | SFV3L_P27401-Pro_2mutA |
| EAAAKGGSPAP | 19563 | SFV3L_P27401_2mutA |
| EAAAKGGGGGS | 19564 | SFV3L_P27401_2mut |
| GSSPAPEAAAK | 19565 | SFV3L_P27401_2mutA |
| PAPAP | 19566 | MLVBM_Q7SVK7_3mut |
| PAPGGSEAAAK | 19567 | KORV_Q9TTC1-Pro |
| GGSGSS | 19568 | MLVF5_P26810_3mutA |
| GGSEAAAKPAP | 19569 | FFV_O93209_2mut |
| GSS | | MLVMS_P03355 |
| SGGSSGGSSGSETPGTSESATPESSGGSSGGSS | 19570 | SFV3L_P27401-Pro |
| PAPGGGEAAAK | 19571 | SFV3L_P27401_2mut |
| PAPGGGGGS | 19572 | SFV3L_P27401-Pro_2mut |
| PAPGGSGSS | 19573 | BAEVM_P10272_3mut |
| GSSGGGEAAAK | 19574 | FFV_O93209 |
| GGSEAAAKPAP | 19575 | SFV1_P23074_2mut |
| GGGGG | 19576 | FLV_P10273_3mut |
| GGGEAAAKGSS | 19577 | SFV3L_P27401 |
| GSSGSSGSSGSSGSS | 19578 | SFV1_P23074-Pro |
| SGSETPGTSESATPES | 19579 | AVIRE_P03360 |
| PAPGSSGGG | 19580 | MLVBM_Q7SVK7_3mut |
| GGGGSSPAP | 19581 | HTL3P_Q4U0X6_2mut |
| GGGEAAAK | 19582 | SFV1_P23074 |
| GGSGGG | 19583 | AVIRE_P03360 |
| EAAAKGSSGGG | 19584 | SFV3L_P27401_2mutA |
| GSSPAPEAAAK | 19585 | FOAMV_P14350-Pro_2mutA |
| GGGPAPGSS | 19586 | WMSV_P03359 |
| EAAAKGSSGGG | 19587 | MLVMS_P03355 |
| GGGGGSEAAAK | 19588 | MLVMS_P03355 |
| EAAAKPAPGGS | 19589 | SFV3L_P27401 |
| EAAAKGSSPAP | 19590 | SFV3L_P27401 |
| GGGGGGG | 19591 | FOAMV_P14350_2mutA |
| EAAAKEAAAKEAAAK | 19592 | SFV3L_P27401 |
| GSSPAPGGS | 19593 | FFV_O93209_2mutA |
| GGGGSSEAAAK | 19594 | SFV3L_P27401-Pro_2mutA |
| GGSEAAAKGSS | 19595 | GALV_P21414_3mutA |
| GGSEAAAKGSS | 19596 | BAEVM_P10272_3mutA |
| EAAAKPAPGGG | 19597 | MLVCB_P08361 |
| GSSGSSGSSGSSGSSGSS | 19598 | SFV1_P23074-Pro |
| GGGGSEAAAKGGGGS | 19599 | FOAMV_P14350_2mut |
| GSSPAPGGS | 19600 | MLVMS_P03355_PLV919 |
| GGGGSGGGGS | 19601 | FFV_O93209-Pro |
| GSSGGSPAP | 19602 | KORV_Q9TTC1_3mutA |
| GGSGGS | 19603 | GALV_P21414_3mutA |
| PAPGSSEAAAK | 19604 | WMSV_P03359 |
| PAPGGGGSS | 19605 | MMTVB_P03365-Pro |
| GGGGSSGGS | 19606 | PERV_Q4VFZ2_3mutA_WS |
| GGGGSGGGGS | 19607 | FFV_O93209_2mut |
| GGGGSGGGGSGGGGSGGGGS | 19608 | XMRV6_A1Z651 |
| GGSGSSEAAAK | 19609 | SFV1_P23074_2mut |
| GGSGGGGSS | 19610 | GALV_P21414_3mutA |
| GGSEAAAKPAP | 19611 | MLVBM_Q7SVK7 |
| EAAAKGGSPAP | 19612 | SFV1_P23074_2mutA |
| PAPAPAPAP | 19613 | FFV_O93209 |
| GSSGGSPAP | 19614 | MMTVB_P03365-Pro |
| GGGGGSPAP | 19615 | KORV_Q9TTC1_3mutA |
| EAAAKGGGPAP | 19616 | PERV_Q4VFZ2 |
| GSSGGSPAP | 19617 | BAEVM_P10272 |
| GGGGG | 19618 | FFV_O93209 |
| GGGGGS | 19619 | FLV_P10273_3mutA |
| EAAAKEAAAKEAAAK | 19620 | FOAMV_P14350 |
| PAPGGG | 19621 | MLVCB_P08361_3mut |
| GSSGGSEAAAK | 19622 | FOAMV_P14350_2mutA |
| GGSPAPGGG | 19623 | FLV_P10273_3mut |
| GSSGSSGSSGSSGSSGSS | 19624 | SFV1_P23074-Pro_2mutA |
| GGSPAPEAAAK | 19625 | SFV3L_P27401 |
| PAPGGGGSS | 19626 | HTL3P_Q4U0X6_2mutB |
| GGGGSSEAAAK | 19627 | MMTVB_P03365_2mut_WS |
| PAPGGS | 19628 | MLVRD_P11227_3mut |
| GGSGGSGGSGGSGGS | 19629 | MMTVB_P03365 |
| GSAGSAAGSGEF | 19630 | AVIRE_P03360 |
| GSSGGS | 19631 | BAEVM_P10272_3mutA |
| GGSGGGGSS | 19632 | MMTVB_P03365 |
| GGSGGGGSS | 19633 | WMSV_P03359 |
| PAPEAAAKGSS | 19634 | SFV1_P23074 |
| GSSGSSGSSGSS | 19635 | SFV1_P23074-Pro_2mutA |
| PAPAPAPAPAPAP | 19636 | SFV3L_P27401 |
| PAPGSSGGG | 19637 | FLV_P10273_3mut |
| GGSGSSPAP | 19638 | MLVMS_P03355 |
| GGSGGGPAP | 19639 | FOAMV_P14350 |
| PAPGGGGGS | 19640 | KORV_Q9TTC1_3mutA |
| EAAAKGSSPAP | 19641 | GALV_P21414_3mutA |
| GGSGSSPAP | 19642 | MLVBM_Q7SVK7_3mut |
| EAAAKGSS | 19643 | SFV3L_P27401_2mut |
| GGGGGSEAAAK | 19644 | WMSV_P03359 |
| GGGGGGGG | 19645 | SFV1_P23074-Pro |
| EAAAKEAAAK | 19646 | MLVBM_Q7SVK7 |
| GGGEAAAKGGS | 19647 | MLVBM_Q7SVK7 |
| EAAAKGGSPAP | 19648 | SFV3L_P27401_2mut |
| GSSEAAAK | 19649 | XMRV6_A1Z651 |
| PAPGGGEAAAK | 19650 | MMTVB_P03365_WS |
| GGSPAP | 19651 | GALV_P21414_3mutA |
| GSSPAPGGG | 19652 | MLVBM_Q7SVK7_3mutA_WS |
| GGSGSSPAP | 19653 | SFV1_P23074_2mutA |
| GGS | | HTL32_Q0R5R2_2mut |
| GGSGGGGSS | 19654 | MMTVB_P03365-Pro |
| GGGGSGGGGSGGGGSGGGGS | 19655 | SFVCP_Q87040_2mutA |
| EAAAKGGGPAP | 19656 | FOAMV_P14350_2mut |
| GSSGGGEAAAK | 19657 | MMTVB_P03365 |
| SGGSSGGSSGSETPGTSESATPESSGGSSGGSS | 19658 | MLVBM_Q7SVK7_3mutA_WS |
| AEAAAKEAAAKEAAAKEAAAKALEAEAAAKEAAAKEAAAKEAAAK | 19659 | MMTVB_P03365_WS |
| A | | |
| EAAAKEAAAK | 19660 | FOAMV_P14350-Pro_2mut |
| GSSPAPEAAAK | 19661 | FOAMV_P14350_2mutA |
| EAAAKPAPGGS | 19662 | GALV_P21414_3mutA |
| GSSGGSPAP | 19663 | KORV_Q9TTC1-Pro_3mut |
| GGGPAPEAAAK | 19664 | MLVAV_P03356 |
| GGGEAAAKPAP | 19665 | SFV1_P23074-Pro_2mut |
| GGGGGSEAAAK | 19666 | SFV3L_P27401_2mut |
| GGGPAPGSS | 19667 | SFV3L_P27401_2mut |
| GGSEAAAKPAP | 19668 | AVIRE_P03360 |
| GSSGSSGSSGSSGSSGSS | 19669 | SFV1_P23074-Pro_2mut |
| EAAAKGSSGGS | 19670 | FOAMV_P14350_2mutA |
| GGGGGG | 19671 | MLVBM_Q7SVK7_3mut |
| GSSPAPGGS | 19672 | PERV_Q4VFZ2 |
| GGSGSSPAP | 19673 | GALV_P21414_3mutA |
| GGGPAPEAAAK | 19674 | SFV3L_P27401 |
| GGSGGGEAAAK | 19675 | WMSV_P03359 |
| GSAGSAAGSGEF | 19676 | SFV1_P23074_2mut |
| GSSGGGEAAAK | 19677 | MLVMS_P03355 |
| GGG | | MMTVB_P03365-Pro |
| PAPGSSGGS | 19678 | FOAMV_P14350_2mut |
| GGGGSSPAP | 19679 | FFV_O93209_2mut |
| SGGSSGGSSGSETPGTSESATPESSGGSSGGSS | 19680 | MMTVB_P03365_WS |
| GGGGGGG | 19681 | XMRV6_A1Z651 |
| PAPAPAPAPAP | 19682 | FOAMV_P14350 |
| GGGGSGGGGSGGGGSGGGGS | 19683 | MMTVB_P03365_2mut_WS |
| GGSGGGPAP | 19684 | SFV3L_P27401_2mut |
| GGGGGG | 19685 | SFV1_P23074-Pro |
| EAAAKPAPGSS | 19686 | SFV3L_P27401_2mut |
| GGGGSSGGS | 19687 | HTL3P_Q4U0X6_2mut |
| PAPGSSEAAAK | 19688 | MMTVB_P03365-Pro |
| GGGGSSPAP | 19689 | FOAMV_P14350-Pro_2mut |
| PAPGSSGGS | 19690 | MMTVB_P03365 |
| AEAAAKEAAAKEAAAKEAAAKALEAEAAAKEAAAKEAAAKEAAAK | 19691 | SRV2_P51517 |
| A | | |
| PAPAPAP | 19692 | MMTVB_P03365_2mut_WS |
| PAPGGGGGS | 19693 | MMTVB_P03365_2mutB |
| GGGGSS | 19694 | SFV1_P23074-Pro_2mutA |
| EAAAKEAAAKEAAAKEAAAK | 19695 | SFV3L_P27401-Pro |
| GGSGGSGGSGGSGGS | 19696 | MMTVB_P03365-Pro |
| GGGGGGG | 19697 | SFV3L_P27401_2mut |
| PAPGGGEAAAK | 19698 | SFV3L_P27401 |
| PAPGSS | 19699 | FOAMV_P14350_2mutA |
| GGGGSGGGGS | 19700 | SFVCP_Q87040_2mutA |
| GSSGGSGGG | 19701 | XMRV6_A1Z651 |
| GGGGSGGGGSGGGGSGGGGSGGGGSGGGGS | 19702 | MLVBM_Q7SVK7 |
| GSSEAAAKGGG | 19703 | FFV_O93209-Pro_2mut |
| GGSEAAAKPAP | 19704 | SFV3L_P27401-Pro |
| GSSGGSGGG | 19705 | SFV1_P23074_2mut |
| EAAAKGGGGSS | 19706 | FOAMV_P14350_2mutA |
| GGGGGG | 19707 | SFV3L_P27401_2mut |
| GGGGG | 19708 | MLVBM_Q7SVK7_3mut |
| PAPEAAAKGGG | 19709 | SFV3L_P27401 |
| EAAAKGGSPAP | 19710 | KORV_Q9TTC1_3mutA |
| GGGEAAAKPAP | 19711 | SFV1_P23074_2mut |
| GSSGSSGSSGSSGSSGSS | 19712 | KORV_Q9TTC1-Pro |
| EAAAKEAAAKEAAAKEAAAK | 19713 | SFVCP_Q87040 |
| PAPGSSEAAAK | 19714 | MLVBM_Q7SVK7 |
| GSSGSSGSS | 19715 | FFV_O93209-Pro_2mut |
| GSSGGGPAP | 19716 | SFV3L_P27401-Pro_2mut |
| GGGPAPEAAAK | 19717 | WMSV_P03359_3mut |
| GGGEAAAK | 19718 | MMTVB_P03365-Pro |
| GSSGSSGSSGSS | 19719 | SFV3L_P27401-Pro_2mutA |
| PAPAPAPAPAP | 19720 | FFV_O93209-Pro |
| GGSPAPEAAAK | 19721 | FFV_O93209-Pro_2mut |
| GSSGSSGSSGSSGSSGSS | 19722 | GALV_P21414 |
| EAAAKEAAAKEAAAKEAAAKEAAAK | 19723 | FOAMV_P14350 |
| GGGPAPEAAAK | 19724 | MMTVB_P03365-Pro |
| PAPGGSGGG | 19725 | MLVF5_P26810_3mutA |
| PAPGGSGGG | 19726 | FLV_P10273_3mut |
| GGGEAAAKGGS | 19727 | SFV3L_P27401 |
| GSAGSAAGSGEF | 19728 | MLVBM_Q7SVK7_3mut |
| GSSPAPGGG | 19729 | MPMV_P07572_2mutB |
| GSSGSSGSSGSSGSSGSS | 19730 | FOAMV_P14350 |
| GGSGGGGSS | 19731 | BLVJ_P03361_2mut |
| PAPEAAAKGSS | 19732 | SFV1_P23074-Pro |
| GGG | | FFV_O93209 |
| EAAAKGGGGSS | 19733 | SFV1_P23074_2mut |
| EAAAKEAAAKEAAAKEAAAKEAAAKEAAAK | 19734 | SRV2_P51517 |
| GGGGSGGGGGGGGSGGGGSGGGGSGGGGS | 19735 | MMTVB_P03365 |
| GGGEAAAKGGS | 19736 | MMTVB_P03365_WS |
| GSSGSS | 19737 | SFV1_P23074 |
| GSSGGGGGS | 19738 | SFV3L_P27401 |
| GGGGSSEAAAK | 19739 | SFV1_P23074 |
| EAAAKGSSGGS | 19740 | HTL1A_P03362_2mutB |
| GSSEAAAKGGS | 19741 | GALV_P21414_3mutA |
| EAAAKGSSPAP | 19742 | SFV1_P23074 |
| EAAAKPAPGSS | 19743 | SFV3L_P27401_2mutA |
| PAPGSSGGG | 19744 | SFV3L_P27401-Pro_2mut |
| GGGGSGGGGSGGGGSGGGGSGGGGSGGGGS | 19745 | SFV3L_P27401-Pro |
| EAAAKEAAAKEAAAKEAAAKEAAAK | 19746 | MMTVB_P03365_WS |
| GGGGSSEAAAK | 19747 | MLVF5_P26810_3mutA |
| EAAAKGGSPAP | 19748 | GALV_P21414 |
| PAPEAAAKGSS | 19749 | MMTVB_P03365_WS |
| GSSGGGGGS | 19750 | SFVCP_Q87040_2mut |
| GGGGSSPAP | 19751 | SFV1_P23074 |
| EAAAKGGGGSS | 19752 | XMRV6_A1Z651 |
| PAPAPAPAP | 19753 | MMTVB_P03365 |
| GGSEAAAKGSS | 19754 | SFV3L_P27401_2mutA |
| GSSPAPGGG | 19755 | MMTVB_P03365_WS |
| GGGGGG | 19756 | SFV3L_P27401-Pro |
| GGSGGSGGS | 19757 | FOAMV_P14350-Pro_2mut |
| PAPAPAPAPAPAP | 19758 | WMSV_P03359 |
| GSSPAP | 19759 | MLVBM_Q7SVK7 |
| GGGGGSGSS | 19760 | MMTVB_P03365_2mut_WS |
| EAAAKGSSGGS | 19761 | MMTVB_P03365_2mutB_WS |
| EAAAK | 19762 | FFV_O93209_2mutA |
| PAPEAAAK | 19763 | SFV1_P23074-Pro |
| EAAAKGGSGSS | 19764 | SFV3L_P27401 |
| GGSGGSGGS | 19765 | FFV_O93209-Pro |
| GSSGGGEAAAK | 19766 | MMTVB_P03365 |
| SGGSSGGSSGSETPGTSESATPESSGGSSGGSS | 19767 | MLVFF_P26809_3mutA |
| GGSGGSGGSGGSGGSGGS | 19768 | HTL1L_P0C211_2mutB |
| GGGEAAAK | 19769 | SFV3L_P27401-Pro_2mutA |
| GGGGGSGSS | 19770 | MMTVB_P03365 |
| GSSPAPGGS | 19771 | FOAMV_P14350_2mutA |
| EAAAKGSS | 19772 | MLVMS_P03355 |
| GSSGGSGGG | 19773 | FFV_O93209-Pro |
| GGSGGGGSS | 19774 | MMTVB_P03365-Pro_2mut |
| GGSPAPGSS | 19775 | FOAMV_P14350_2mut |
| GGSGGSGGSGGSGGSGGS | 19776 | SFVCP_Q87040-Pro_2mut |
| GSSEAAAKGGG | 19777 | FOAMV_P14350_2mutA |
| GGSGGSGGS | 19778 | MMTVB_P03365-Pro |
| GSSGSSGSSGSSGSSGSS | 19779 | MMTVB_P03365_2mut_WS |
| GSSGSSGSSGSSGSS | 19780 | MMTVB_P03365-Pro |
| PAPEAAAK | 19781 | WDSV_O92815 |
| GSSGSSGSSGSSGSS | 19782 | FFV_O93209-Pro_2mut |
| EAAAKGGGGSEAAAK | 19783 | MMTVB_P03365-Pro |
| GGSPAPEAAAK | 19784 | FOAMV_P14350 |
| GSSGSS | 19785 | PERV_Q4VFZ2 |
| GGG | | MMTVB_P03365-Pro |
| GGGGSGGGGSGGGGS | 19786 | FFV_O93209_2mut |
| EAAAKEAAAKEAAAKEAAAKEAAAKEAAAK | 19787 | MMTVB_P03365-Pro |
| GGSGSSPAP | 19788 | WMSV_P03359 |
| GGGGGGGG | 19789 | SFV3L_P27401_2mut |
| PAPGSSEAAAK | 19790 | FOAMV_P14350-Pro_2mutA |
| GGGGSSPAP | 19791 | FOAMV_P14350_2mut |
| GSSGGSPAP | 19792 | MLVBM_Q7SVK7_3mut |
| GSSGGGGGS | 19793 | GALV_P21414_3mutA |
| EAAAKEAAAKEAAAKEAAAKEAAAK | 19794 | MMTVB_P03365 |
| GSSGGGGGS | 19795 | SFV1_P23074_2mut |
| GGGGSEAAAKGGGGS | 19796 | SFV1_P23074 |
| GGGEAAAKPAP | 19797 | FFV_O93209 |
| PAPGGGEAAAK | 19798 | SFV1_P23074 |
| GGSGGGEAAAK | 19799 | PERV_Q4VFZ2_3mutA_WS |
| GSSGGG | 19800 | MMTVB_P03365-Pro |
| EAAAKGSSGGS | 19801 | FFV_O93209_2mut |
| GGGGG | 19802 | SFV1_P23074_2mut |
| GGGPAP | 19803 | SFV3L_P27401 |
| GSSGGSEAAAK | 19804 | FFV_O93209 |
| SGGSSGGSSGSETPGTSESATPESSGGSSGGSS | 19805 | MMTVB_P03365-Pro |
| GSSGGGEAAAK | 19806 | SFV1_P23074_2mutA |
| GSSGSSGSSGSSGSS | 19807 | SFV3L_P27401_2mut |
| GGSEAAAKPAP | 19808 | FLV_P10273 |
| GGGGSGGGGS | 19809 | FOAMV_P14350-Pro_2mutA |
| GSSEAAAKPAP | 19810 | SFV3L_P27401 |
| GGGGSEAAAKGGGGS | 19811 | MMTVB_P03365-Pro |
| PAPGSSEAAAK | 19812 | MLVF5_P26810_3mut |
| EAAAKGGSGGG | 19813 | SFV3L_P27401 |
| GGGPAPGGS | 19814 | SFV3L_P27401 |
| GSSEAAAKGGS | 19815 | FOAMV_P14350_2mutA |
| EAAAKGGSGGG | 19816 | HTL1L_P0C211 |
| GSSGGSPAP | 19817 | SFV3L_P27401_2mutA |
| PAPAP | 19818 | FFV_O93209 |
| PAPGGSGSS | 19819 | MMTVB_P03365_WS |
| EAAAKGGGGGS | 19820 | FOAMV_P14350_2mut |
| PAPEAAAKGGS | 19821 | SFV3L_P27401_2mut |
| GSSEAAAKPAP | 19822 | MMTVB_P03365-Pro |
| GGSGGS | 19823 | PERV_Q4VFZ2_3mut |
| GSSEAAAKGGG | 19824 | FFV_O93209-Pro_2mutA |
| EAAAK | 19825 | HTL1L_P0C211 |
| GSSPAP | 19826 | MLVMS_P03355 |
| EAAAKPAPGGG | 19827 | FFV_O93209-Pro_2mut |
| GGGGSEAAAKGGGGS | 19828 | SFV1_P23074-Pro_2mut |
| EAAAKGSSGGS | 19829 | SFV3L_P27401 |
| GSAGSAAGSGEF | 19830 | FFV_O93209_2mutA |
| PAPEAAAKGGS | 19831 | MMTVB_P03365_2mutB_WS |
| EAAAKEAAAKEAAAKEAAAKEAAAKEAAAK | 19832 | MMTVB_P03365 |
| GGS | | MMTVB_P03365 |
| GGSEAAAKPAP | 19833 | SFV1_P23074 |
| EAAAKGSSGGG | 19834 | HTLV2_P03363_2mut |
| GGSEAAAKGGG | 19835 | MMTVB_P03365_WS |
| GGSGGS | 19836 | FFV_O93209-Pro |
| GSSEAAAKGGS | 19837 | MMTVB_P03365-Pro |
| PAPAPAPAPAP | 19838 | SFV1_P23074_2mutA |
| GGSEAAAKGGG | 19839 | MMTVB_P03365_2mutB_WS |
| PAPAPAPAP | 19840 | MMTVB_P03365_WS |
| GGGGSGGGGSGGGGSGGGGSGGGGS | 19841 | HTL3P_Q4U0X6_2mut |
| PAPGGSEAAAK | 19842 | SFV1_P23074-Pro_2mut |
| GGSGGGPAP | 19843 | MMTVB_P03365 |
| GSSGSSGSSGSSGSSGSS | 19844 | MMTVB_P03365-Pro |
| GGSEAAAKPAP | 19845 | SFV1_P23074-Pro |
| GGGEAAAKGSS | 19846 | SFV3L_P27401_2mutA |
| GGGPAPGGS | 19847 | AVIRE_P03360 |
| PAPGGG | 19848 | MLVRD_P11227 |
| GGSEAAAKGSS | 19849 | SFV3L_P27401_2mut |
| GGGEAAAKGSS | 19850 | FOAMV_P14350_2mut |
| GGGEAAAKGSS | 19851 | SFV1_P23074-Pro |
| EAAAKEAAAKEAAAKEAAAK | 19852 | MLVAV_P03356 |
| EAAAKGGGPAP | 19853 | JSRV_P31623_2mutB |
| EAAAKGGGGSS | 19854 | FOAMV_P14350_2mut |
| EAAAKEAAAKEAAAKEAAAKEAAAK | 19855 | SRV2_P51517 |
| GSSGGGGGS | 19856 | FFV_O93209 |
| PAPAPAP | 19857 | FOAMV_P14350_2mutA |
| GGSGGSGGSGGS | 19858 | FOAMV_P14350 |
| GGGEAAAK | 19859 | MMTVB_P03365_WS |
| GGGGGS | 19860 | SFV1_P23074_2mutA |
| GGSGGS | 19861 | WMSV_P03359_3mut |
| EAAAKGGS | 19862 | MMTVB_P03365-Pro |
| GGGGSS | 19863 | BLVJ_P03361_2mut |
| PAPAP | 19864 | MMTVB_P03365-Pro_2mut |
| PAPGGG | 19865 | SMRVH_P03364 |
| EAAAKGGGGSS | 19866 | SFV3L_P27401 |
| PAPAPAPAPAP | 19867 | MMTVB_P03365 |
| GGGPAP | 19868 | MMTVB_P03365-Pro |
| GSSGGSGGG | 19869 | MMTVB_P03365 |
| EAAAKGGGPAP | 19870 | FOAMV_P14350_2mutA |
| GSSGSSGSSGSS | 19871 | SFV1_P23074 |
| GGGGSGGGGS | 19872 | SFV3L_P27401 |
| GSSGGSGGG | 19873 | MLVF5_P26810 |
| GGGEAAAKPAP | 19874 | MMTVB_P03365-Pro |
| PAPEAAAK | 19875 | HTLV2_P03363_2mut |
| GSSGSSGSSGSS | 19876 | FOAMV_P14350_2mut |
| GSSEAAAKPAP | 19877 | MMTVB_P03365-Pro |
| PAPEAAAKGGG | 19878 | HTL3P_Q4U0X6_2mut |
| GGSEAAAKGSS | 19879 | MMTVB_P03365-Pro |
| EAAAKPAPGGS | 19880 | MMTVB_P03365_2mut_WS |
| GSSGGSEAAAK | 19881 | MLVF5_P26810_3mutA |
| GGGGSGGGGSGGGGSGGGGSGGGGSGGGGS | 19882 | MLVF5_P26810_3mut |
| EAAAKGGGGSS | 19883 | MMTVB_P03365-Pro |
| GGGGGSGSS | 19884 | HTL1A_P03362_2mutB |
| PAPAP | 19885 | FFV_O93209-Pro_2mut |
| GGGGGSPAP | 19886 | HTL1C_P14078_2mut |
| GGGPAP | 19887 | HTLV2_P03363_2mut |
| EAAAKGGGGSEAAAK | 19888 | SFVCP_Q87040 |
| GGSEAAAKGGG | 19889 | FFV_O93209-Pro_2mutA |
| GSSPAPGGS | 19890 | FOAMV_P14350-Pro_2mut |
| GGGGGGG | 19891 | MMTVB_P03365-Pro |
| EAAAKGSS | 19892 | SFV3L_P27401_2mutA |
| EAAAKGGGGSEAAAK | 19893 | MMTVB_P03365-Pro |
| GGGGSEAAAKGGGGS | 19894 | SFV1_P23074-Pro_2mutA |
| EAAAKGGGGSS | 19895 | MMTVB_P03365 |
| GGGEAAAKGGS | 19896 | SFV1_P23074 |
| PAPEAAAKGGG | 19897 | MLVF5_P26810 |
| GGGGSSGGS | 19898 | MMTVB_P03365 |
| GGSGSS | 19899 | MMTVB_P03365 |
| PAPAPAPAPAPAP | 19900 | KORV_Q9TTC1 |
| EAAAKGGG | 19901 | SFV1_P23074-Pro_2mut |
| PAPAPAPAPAPAP | 19902 | SRV2_P51517 |
| GSSGSSGSSGSSGSS | 19903 | FFV_O93209-Pro_2mutA |
| GGGGSS | 19904 | FOAMV_P14350_2mut |
| PAPGGGEAAAK | 19905 | MMTVB_P03365_WS |
| GGSGGGEAAAK | 19906 | FFV_O93209-Pro_2mut |
| PAPAPAPAPAP | 19907 | MMTVB_P03365_WS |
| GGGEAAAKGGS | 19908 | MMTVB_P03365-Pro |
| GGGEAAAKGSS | 19909 | MMTVB_P03365_2mutB |
| GSSPAPEAAAK | 19910 | MMTVB_P03365_WS |
| EAAAKEAAAKEAAAKEAAAKEAAAK | 19911 | SFV1_P23074-Pro_2mutA |
| PAPGGG | 19912 | SFV3L_P27401 |
| GSSEAAAKGGG | 19913 | MMTVB_P03365_WS |
| GGGGSSEAAAK | 19914 | FOAMV_P14350_2mut |
| PAPGSSGGS | 19915 | SFV1_P23074-Pro_2mut |
| GSSGSSGSSGSSGSSGSS | 19916 | SFV3L_P27401 |
| EAAAKGSSGGG | 19917 | MMTVB_P03365 |
| PAPGGGGSS | 19918 | WDSV_O92815_2mutA |
| GGSPAP | 19919 | MMTVB_P03365-Pro |
| GGSGGSGGSGGSGGS | 19920 | SFVCP_Q87040-Pro_2mut |
| PAPAPAPAP | 19921 | MMTVB_P03365-Pro |
| GGGGG | 19922 | HTL1A_P03362 |
| GGSGGSGGSGGS | 19923 | SFV1_P23074_2mutA |
| GSSGSSGSSGSSGSS | 19924 | FOAMV_P14350-Pro_2mut |
| PAPGGSEAAAK | 19925 | MMTVB_P03365_2mutB_WS |
| PAPAPAPAP | 19926 | SFV1_P23074_2mut |
| PAPGGGGSS | 19927 | MMTVB_P03365 |
| GGSGSS | 19928 | SFV3L_P27401_2mut |
| EAAAKEAAAKEAAAKEAAAK | 19929 | MMTVB_P03365_2mut |
| EAAAKGGSGGG | 19930 | HTL3P_Q4U0X6_2mut |
| PAPGGGGSS | 19931 | SFVCP_Q87040-Pro_2mutA |
| EAAAKGGGGGS | 19932 | MLVAV_P03356 |
| GGGGGS | 19933 | FOAMV_P14350_2mut |
| GGGEAAAKGGS | 19934 | FFV_O93209-Pro_2mutA |
| EAAAKPAPGGG | 19935 | MMTVB_P03365_2mutB |
| GGSGGGPAP | 19936 | FFV_O93209_2mut |
| GSSEAAAKPAP | 19937 | MMTVB_P03365 |
| PAPAPAPAPAPAP | 19938 | SFV1_P23074_2mut |
| GGSPAPGGG | 19939 | MMTVB_P03365-Pro |
| GGSGGGEAAAK | 19940 | MMTVB_P03365 |
| PAPAP | 19941 | SFVCP_Q87040 |
| GSSEAAAK | 19942 | SFVCP_Q87040 |
| GGGGSGGGGSGGGGS | 19943 | MMTVB_P03365-Pro |
| GSSGSSGSS | 19944 | SFV3L_P27401 |
| EAAAKGGSGGG | 19945 | MMTVB_P03365-Pro |
| GSSPAP | 19946 | SFV1_P23074_2mut |
| GGGEAAAK | 19947 | SFV1_P23074-Pro |
| AEAAAKEAAAKEAAAKEAAAKALEAEAAAKEAAAKEAAAKEAAAK | 19948 | MMTVB_P03365-Pro |
| A | | |
| PAPGGS | 19949 | HTL1C_P14078_2mut |
| PAPGSSGGS | 19950 | SFV1_P23074_2mut |
| PAPEAAAK | 19951 | MMTVB_P03365_WS |
| PAPAP | 19952 | MMTVB_P03365-Pro |
| EAAAKGGS | 19953 | HTL1A_P03362_2mut |
| GGGGSEAAAKGGGGS | 19954 | HTL1C_P14078 |
| EAAAKGSSGGS | 19955 | FOAMV_P14350-Pro |
| PAPGGSGSS | 19956 | MMTVB_P03365-Pro |
| PAPGGSEAAAK | 19957 | SFV1_P23074_2mut |
| PAPGSSEAAAK | 19958 | FFV_O93209-Pro_2mut |
| PAPGSSGGG | 19959 | FOAMV_P14350-Pro_2mutA |
| GSSGGGEAAAK | 19960 | AVIRE_P03360 |
| GGGGGG | 19961 | SMRVH_P03364_2mut |
| PAPEAAAKGGG | 19962 | MMTVB_P03365-Pro |
| GGGEAAAKGGS | 19963 | SFVCP_Q87040_2mutA |
| PAPAPAPAPAP | 19964 | SRV2_P51517 |
| GSSGSSGSSGSSGSSGSS | 19965 | MMTVB_P03365 |
| EAAAKGGGPAP | 19966 | MLVAV_P03356 |
| PAPAPAPAPAP | 19967 | FOAMV_P14350-Pro_2mutA |
| PAPGGSEAAAK | 19968 | FOAMV_P14350 |
| GSSGGGPAP | 19969 | HTL32_Q0R5R2_2mutB |
| GGGGGSPAP | 19970 | HTL3P_Q4U0X6_2mutB |
| GSSGGSGGG | 19971 | MMTVB_P03365-Pro |
| PAPAP | 19972 | SFVCP_Q87040-Pro |
| GSSGGGPAP | 19973 | MMTVB_P03365-Pro |
| GGSGSS | 19974 | MMTVB_P03365-Pro_2mut |
| GGSPAPEAAAK | 19975 | SFV1_P23074-Pro_2mut |
| EAAAKGGSGGG | 19976 | SFV3L_P27401_2mut |
| GGGGSSEAAAK | 19977 | MMTVB_P03365_WS |
| GGGGGSGSS | 19978 | MMTVB_P03365_2mut |
| GGGGSSGGS | 19979 | SFV1_P23074-Pro_2mutA |
| EAAAKGGGGSEAAAK | 19980 | MMTVB_P03365_WS |
| PAPGGGEAAAK | 19981 | SFV1_P23074-Pro |
| PAPEAAAKGGG | 19982 | MMTVB_P03365 |
| AEAAAKEAAAKEAAAKEAAAKALEAEAAAKEAAAKEAAAKEAAAK | 19983 | MMTVB_P03365 |
| A | | |
| GSSGGSEAAAK | 19984 | FOAMV_P14350-Pro_2mut |
| GGSPAP | 19985 | MLVBM_Q7SVK7_3mut |
| GSSEAAAK | 19986 | FOAMV_P14350 |
| GSSEAAAK | 19987 | MMTVB_P03365-Pro |
| EAAAKGSSGGS | 19988 | HTL1A_P03362_2mut |
| GGGEAAAKPAP | 19989 | FOAMV_P14350-Pro_2mut |
| EAAAKGGSPAP | 19990 | FOAMV_P14350 |
| GSSEAAAKPAP | 19991 | MMTVB_P03365_WS |
| GSSGSSGSS | 19992 | FOAMV_P14350_2mut |
| EAAAKEAAAKEAAAKEAAAK | 19993 | MMTVB_P03365_WS |
| EAAAK | 19994 | MMTVB_P03365 |
| PAPGSS | 19995 | BAEVM_P10272 |
| PAPGGS | 19996 | FFV_O93209-Pro_2mut |
| GGSGGS | 19997 | SFV1_P23074-Pro_2mutA |
| SGGSSGGSSGSETPGTSESATPESSGGSSGGSS | 19998 | HTLV2_P03363_2mut |
| GGSGGGEAAAK | 19999 | MMTVB_P03365_WS |
| PAPGSSGGG | 20000 | HTL1A_P03362 |
| GGSGGS | 20001 | SFV3L_P27401-Pro |
| GSSGSS | 20002 | SFV1_P23074-Pro |
| PAPGGSEAAAK | 20003 | MMTVB_P03365 |
| GSAGSAAGSGEF | 20004 | MMTVB_P03365-Pro |
| PAPGGG | 20005 | FOAMV_P14350_2mut |
| EAAAKGGSGSS | 20006 | MMTVB_P03365_WS |
| GSSGGGEAAAK | 20007 | SFV3L_P27401-Pro |
| GGSGGGPAP | 20008 | FOAMV_P14350-Pro_2mut |
| PAPAPAPAPAPAP | 20009 | WDSV_O92815 |
| SGSETPGTSESATPES | 20010 | SFVCP_Q87040-Pro_2mutA |
| GGSGGSGGS | 20011 | SFV1_P23074 |
| GGGGSS | 20012 | SFVCP_Q87040_2mut |
| GGGGGSEAAAK | 20013 | MMTVB_P03365 |
| SGSETPGTSESATPES | 20014 | MMTVB_P03365_WS |
| PAPAPAP | 20015 | SFV3L_P27401 |
| PAPEAAAKGSS | 20016 | MMTVB_P03365_2mutB_WS |
| GSSGSSGSSGSSGSS | 20017 | SRV2_P51517 |
| GGGPAPGSS | 20018 | HTL32_Q0R5R2_2mutB |
| GGSGGGGSS | 20019 | MMTVB_P03365-Pro |
| SGSETPGTSESATPES | 20020 | SRV2_P51517 |
| EAAAKGSSGGS | 20021 | MMTVB_P03365-Pro |
| GSSPAPEAAAK | 20022 | MMTVB_P03365-Pro |
| GSSPAPEAAAK | 20023 | SRV2_P51517 |
| GGGGSSPAP | 20024 | MMTVB_P03365-Pro |
| PAPGGGEAAAK | 20025 | SFV1_P23074-Pro_2mutA |
| PAPEAAAKGGS | 20026 | MMTVB_P03365 |
| GSSGSSGSSGSSGSSGSS | 20027 | FOAMV_P14350-Pro |
| GGSPAPGSS | 20028 | SFV3L_P27401 |
| GGGPAPGGS | 20029 | SFV1_P23074-Pro_2mutA |
| GGGPAPGSS | 20030 | MMTVB_P03365-Pro |
| EAAAKPAP | 20031 | MLVBM_Q7SVK7 |
| EAAAKEAAAKEAAAK | 20032 | HTL1C_P14078 |
| GSSGGSEAAAK | 20033 | SRV2_P51517 |
| PAPGGGGGS | 20034 | SRV2_P51517 |
| GGGEAAAK | 20035 | FFV_O93209-Pro_2mut |
| EAAAKGGGPAP | 20036 | HTL32_Q0R5R2 |
| GGSGSSGGG | 20037 | MMTVB_P03365 |
| PAPEAAAKGSS | 20038 | MMTVB_P03365-Pro |
| PAPGGGGGS | 20039 | MMTVB_P03365-Pro |
| EAAAKGGGGGS | 20040 | MMTVB_P03365_WS |
| GGGGGS | 20041 | MMTVB_P03365-Pro |
| GGGGSGGGGSGGGGSGGGGSGGGGS | 20042 | HTL1C_P14078 |
| EAAAKGGSPAP | 20043 | MMTVB_P03365 |
| GGGGSSPAP | 20044 | FFV_O93209-Pro_2mut |
| GGGGSSGGS | 20045 | MMTVB_P03365-Pro |
| PAPGSSGGS | 20046 | MMTVB_P03365-Pro |
| GGGGGS | 20047 | SRV2_P51517 |
| GGSGSSGGG | 20048 | MMTVB_P03365 |
| GSSGGSEAAAK | 20049 | MMTVB_P03365-Pro |
| EAAAKEAAAKEAAAKEAAAK | 20050 | GALV_P21414 |
| GGSEAAAKGGG | 20051 | MMTVB_P03365-Pro |
| SGGSSGGSSGSETPGTSESATPESSGGSSGGSS | 20052 | MMTVB_P03365-Pro |
| GSSEAAAKGGS | 20053 | MMTVB_P03365 |
| GGGGSGGGGSGGGGSGGGGSGGGGSGGGGS | 20054 | HTL3P_Q4U0X6_2mutB |
| GGGEAAAK | 20055 | MMTVB_P03365-Pro |
| PAPAPAPAP | 20056 | MMTVB_P03365-Pro |
| PAPGSSGGG | 20057 | MMTVB_P03365 |
| GSSGSSGSSGSSGSS | 20058 | GALV_P21414 |
| GGSPAP | 20059 | MMTVB_P03365_WS |
| GGGGSGGGGSGGGGSGGGGSGGGGSGGGGS | 20060 | MMTVB_P03365-Pro |
| PAPEAAAK | 20061 | MMTVB_P03365-Pro |
| PAPGSSGGG | 20062 | SFV1_P23074-Pro_2mutA |
| GGGGGSEAAAK | 20063 | MMTVB_P03365_2mutB_WS |
| PAPAPAPAPAP | 20064 | MMTVB_P03365-Pro |
| EAAAKGGSGSS | 20065 | MMTVB_P03365-Pro |
| EAAAKEAAAKEAAAKEAAAK | 20066 | MLVRD_P11227_3mut |
| PAPAPAPAP | 20067 | FOAMV_P14350_2mutA |
| GGGPAPGSS | 20068 | SFVCP_Q87040_2mut |
| PAPEAAAKGSS | 20069 | SFVCP_Q87040_2mut |
| GGSPAPGGG | 20070 | MMTVB_P03365-Pro |
| GGGGSGGGGSGGGGSGGGGS | 20071 | MMTVB_P03365 |
| EAAAKGGS | 20072 | HTL3P_Q4U0X6_2mut |
| PAPGSSGGS | 20073 | MMTVB_P03365_WS |
| GGGGSGGGGS | 20074 | MMTVB_P03365 |
| GGSGGS | 20075 | FOAMV_P14350 |
| EAAAKGGGGSEAAAK | 20076 | SFVCP_Q87040-Pro_2mut |
| EAAAKEAAAKEAAAKEAAAK | 20077 | MMTVB_P03365-Pro_2mutB |
| PAPGGGEAAAK | 20078 | SFVCP_Q87040-Pro |
| GSSGSS | 20079 | JSRV_P31623_2mutB |
| EAAAKGGGGGS | 20080 | MMTVB_P03365_2mut_WS |
| GSSPAPEAAAK | 20081 | MMTVB_P03365-Pro |
| GGGEAAAK | 20082 | HTL1C_P14078 |
| PAPEAAAKGSS | 20083 | HTL32_Q0R5R2_2mutB |
| GGGGSSEAAAK | 20084 | MMTVB_P03365-Pro |
| PAPGSSGGS | 20085 | MMTVB_P03365-Pro |
| EAAAKGGGGGS | 20086 | MMTVB_P03365 |
| GGGGSGGGGSGGGGSGGGGS | 20087 | MMTVB_P03365 |
| EAAAKGGGGSS | 20088 | HTL3P_Q4U0X6_2mut |
| GGGEAAAKGGS | 20089 | SFVCP_Q87040-Pro |
| GGGGGSPAP | 20090 | MMTVB_P03365-Pro_2mutB |
| GGSGGGEAAAK | 20091 | SFV3L_P27401-Pro |
| PAPGGGGGS | 20092 | SFV3L_P27401-Pro |
| EAAAKGGGGSEAAAK | 20093 | MMTVB_P03365 |
| PAPEAAAKGSS | 20094 | MMTVB_P03365-Pro |
| GGSEAAAKGGG | 20095 | MMTVB_P03365-Pro |
| GGSGGSGGSGGSGGS | 20096 | SMRVH_P03364_2mutB |
| GGSGGSGGSGGSGGS | 20097 | HTL1L_P0C211_2mut |
| GGGGGG | 20098 | WDSV_O92815 |
| GGGGGSGSS | 20099 | MMTVB_P03365-Pro |
| GGSEAAAKPAP | 20100 | SFV3L_P27401-Pro_2mut |
| GGGPAPGSS | 20101 | MMTVB_P03365_2mut_WS |
| GGGGGS | 20102 | MMTVB_P03365_WS |
| GGSPAPEAAAK | 20103 | MMTVB_P03365 |
| PAPEAAAKGGS | 20104 | HTL1A_P03362 |
| EAAAKGGSGSS | 20105 | MMTVB_P03365_2mut_WS |
| GGGPAPEAAAK | 20106 | SFV3L_P27401-Pro_2mut |
| PAPGGGGSS | 20107 | HTL32_Q0R5R2_2mut |
| GSSPAPGGG | 20108 | HTL3P_Q4U0X6_2mut |
| GGGGSSGGS | 20109 | BLVAU_P25059_2mut |
| EAAAKGGGGGS | 20110 | HTL1L_P0C211 |
| GGSEAAAKGSS | 20111 | JSRV_P31623_2mutB |
| GSSGGG | 20112 | JSRV_P31623 |
| GGSGGSGGSGGS | 20113 | MMTVB_P03365-Pro |
| EAAAKPAP | 20114 | SFV1_P23074-Pro_2mutA |
| GGGGSSGGS | 20115 | MMTVB_P03365_WS |
| GGSGGS | 20116 | MMTVB_P03365_WS |
| EAAAKGGGGGS | 20117 | MMTVB_P03365-Pro |
| GGGGSGGGGSGGGGSGGGGSGGGGSGGGGS | 20118 | MMTVB_P03365 |
| GGSGGSGGS | 20119 | MMTVB_P03365 |
| GGGGGSEAAAK | 20120 | MLVBM_Q7SVK7 |
| GGSGSSPAP | 20121 | MMTVB_P03365_WS |
| EAAAKEAAAKEAAAK | 20122 | JSRV_P31623 |
| PAPEAAAKGGS | 20123 | MMTVB_P03365-Pro |
| GGSGSSEAAAK | 20124 | FOAMV_P14350 |
| GGGGGSGSS | 20125 | MMTVB_P03365-Pro_2mut |
| GGGPAPGGS | 20126 | MMTVB_P03365 |
| SGSETPGTSESATPES | 20127 | SFVCP_Q87040_2mut |
| GSSPAPGGS | 20128 | SFV1_P23074-Pro_2mutA |
| GSSGSSGSSGSSGSS | 20129 | MMTVB_P03365 |
| EAAAKGGGPAP | 20130 | MMTVB_P03365 |
| GSSGGG | 20131 | MMTVB_P03365_2mut_WS |
| GGGEAAAKPAP | 20132 | MMTVB_P03365 |
| PAPGGSGGG | 20133 | MMTVB_P03365-Pro |
| GSSGGSGGG | 20134 | WDSV_O92815_2mut |
| GGSGGG | 20135 | HTL32_Q0R5R2_2mut |
| EAAAKGGSPAP | 20136 | HTLV2_P03363_2mut |
| GGSPAPEAAAK | 20137 | MMTVB_P03365-Pro |
| GSSGGSEAAAK | 20138 | MMTVB_P03365_2mut |
| GSAGSAAGSGEF | 20139 | MMTVB_P03365_WS |
| PAPGGSGSS | 20140 | FFV_O93209 |
| GGSEAAAKGGG | 20141 | MMTVB_P03365 |
| GGSPAPGSS | 20142 | MMTVB_P03365-Pro |
| GSSGGSGGG | 20143 | SFV3L_P27401 |
| PAPEAAAKGGG | 20144 | HTL1A_P03362_2mutB |
| GGGEAAAKPAP | 20145 | MMTVB_P03365-Pro |
| GGSEAAAK | 20146 | HTL32_Q0R5R2_2mutB |
| GGGEAAAKGSS | 20147 | MPMV_P07572 |
| GGGGGSEAAAK | 20148 | MMTVB_P03365-Pro |
| PAPAPAPAPAP | 20149 | SFVCP_Q87040-Pro_2mutA |
| PAPAPAPAPAP | 20150 | HTL1L_P0C211_2mut |
| GGGGSSGGS | 20151 | HTL3P_Q4U0X6 |
| PAPGGSEAAAK | 20152 | MMTVB_P03365_2mut_WS |
| PAPAPAPAPAP | 20153 | HTL1A_P03362 |
| EAAAKPAPGGG | 20154 | MMTVB_P03365_2mut_WS |
| GGSEAAAK | 20155 | MMTVB_P03365_2mut_WS |
| GGGEAAAKGSS | 20156 | SFV1_P23074-Pro_2mutA |
| GGSPAPGSS | 20157 | MMTVB_P03365-Pro |
| GGSEAAAKPAP | 20158 | MLVBM_Q7SVK7 |
| PAPEAAAKGGG | 20159 | MMTVB_P03365_2mut_WS |
| GSSEAAAKPAP | 20160 | MMTVB_P03365-Pro_2mutB |
| GGGGSEAAAKGGGGS | 20161 | MMTVB_P03365-Pro_2mut |
| GSSEAAAKGGS | 20162 | MMTVB_P03365-Pro_2mutB |
| GSSGSSGSSGSSGSS | 20163 | SRV2_P51517_2mutB |
| GGGGGSPAP | 20164 | HTL1L_P0C211_2mut |
| GGSEAAAK | 20165 | MMTVB_P03365 |
| GSSPAPEAAAK | 20166 | SMRVH_P03364_2mutB |
| GGGPAPGGS | 20167 | HTL1C_P14078_2mut |
| GGSPAPEAAAK | 20168 | MMTVB_P03365_WS |
| GGSEAAAKPAP | 20169 | HTL1A_P03362_2mut |
| PAPAPAPAP | 20170 | HTLV2_P03363_2mut |
| GSSPAPGGG | 20171 | MMTVB_P03365 |
| GSSGSSGSSGSS | 20172 | MMTVB_P03365-Pro |
| GGSEAAAKGSS | 20173 | MMTVB_P03365_WS |
| GGSGSSGGG | 20174 | MMTVB_P03365_2mutB |
| GSSGSSGSSGSSGSSGSS | 20175 | JSRV_P31623_2mutB |
| GGSEAAAKPAP | 20176 | MMTVB_P03365-Pro |
| GSSGGSGGG | 20177 | HTLV2_P03363_2mut |
| AEAAAKEAAAKEAAAKEAAAKALEAEAAAKEAAAKEAAAKEAAAK | 20178 | WDSV_O92815_2mut |
| A | | |
| GGSPAPEAAAK | 20179 | MMTVB_P03365 |
| GGGGSSEAAAK | 20180 | MMTVB_P03365 |
| GGSGGGEAAAK | 20181 | SFV1_P23074-Pro_2mutA |
| GGGGSEAAAKGGGGS | 20182 | WDSV_O92815_2mut |
| GGSGSSEAAAK | 20183 | MMTVB_P03365_2mutB_WS |
| GGSEAAAKPAP | 20184 | MMTVB_P03365_WS |
| GSSGGGEAAAK | 20185 | SFVCP_Q87040-Pro |
| GSSGGS | 20186 | SFVCP_Q87040-Pro_2mut |
| GGSEAAAKPAP | 20187 | SFVCP_Q87040_2mut |
| GSSGGSEAAAK | 20188 | SFVCP_Q87040_2mut |
| GSSPAPEAAAK | 20189 | SRV2_P51517_2mutB |
| GGSGGSGGSGGSGGSGGS | 20190 | BLVAU_P25059 |
| GSSGSSGSSGSSGSS | 20191 | HTL1C_P14078_2mut |
| EAAAKGGGGSS | 20192 | MMTVB_P03365_2mutB |
| GGGEAAAKGSS | 20193 | SFVCP_Q87040-Pro |

### Example 6: Generation of Exemplary Drivers and Trans Templates

[0867] This example describes the generation of exemplary drivers and trans templates for use in the three, four, or five component RNA-based gene modifying systems described in Examples 1-5.

### 1) Gene Modifying Polypeptide:

[0868] A series of 216 exemplary gene modifying polypeptides were generated containing:
[0869] 1. a Cas-nuclease with one endonuclease domain inactivated (in this example, Spy N863A Cas9),
[0870] 2. either of two reverse transcriptases (RTs) (the RTs of the gene modifying polypeptide encoded by: PLV10993 or PLV10990/RNAIVT338), and
[0871] 3. an RNA binding protein (RBP) containing 1, 2, or 4 RBP repeats (in this example, 1, 2, or 4 MCPv2 domains as provided in Table 31), with each RBP repeat connected to the other RBP repeats by one of 4 linker peptides from Table 10.
   These 3 domains were connected using peptide linkers, e.g., as found in Table 10.

[0872] The sequence of the RT of the gene modifying polypeptide encoded by PLV10990/RNAIVT338 and the sequence of the RT of the gene modifying polypeptide encoded by PLV10993 are provided below.

PLV10990/RNAIVT338 RT:
(SEQ ID NO: 16,706)
TAPLEEEYRLFLEAPIQNVTLLEQWKREIPKVWAEINPPGLASTQAPIHVQLLSTALPVRVRQYPIT
LEAKRSLRETIRKFRAAGILRPVHSPWNTPLLPVRKSGTSEYRMVQDLREVNKRVETIHPTVPNP
YTLLSLLPPDRIWYSVLDLKDAFFCIPLAPESQLIFAFEWADAEEGESGQLTWTRLPQGFKNSPTL
FNEALNRDLQGFRLDHPSVSLLQYVDDLLIAADTQAACLSATRDLLMTLAELGYRVSGKKAQLC
QEEVTYLGFKIHKGSRSLSNSRTQAILQIPVPKTKRQVREFLGKIGYCRLFIPGFAELAQPLYAATR
PGNDPLVWGEKEEEAFQSLKLALTQPPALALPSLDKPFQLFVEETSGAAKGVLTQALGPWKRPV
AYLSKRLDPVAAGWPRCLRAIAAAALLTREASKLTFGQDIEITSSHNLESLLRSPPDKWLTNARIT
QYQVLLLDPPRVRFKQTAALNPATLLPETDDTLPIHHCLDTLDSLTSTRPDLTDQPLAQAEATLFT
DGSSYIRDGKRYAGAAVVTLDSVIWAEPLPIGTSAQKAELIALTKALEWSKDKSVNIYTDSRYAF
ATLHVHGMIYRERGWLTAGGKAIKNAPEILALLTAVWLPKRVAVMHCKGHQKDDAPTSTGNR
RADEVAREVAIRPLSTQATIS
PLV10993 RT:
(SEQ ID NO: 16,707)
TLNIEDEHRLHETSKEPDVSLGSTWLSDFPQAWAETGGMGLAVRQAPLIIPLKATSTPVSIKQYP
MSQEARLGIKPHIQRLLDQGILVPCQSPWNTPLLPVKKPGTNDYRPVQDLREVNKRVEDIHPTVP
NPYNLLSGLPPSHQWYTVLDLKDAFFCLRLHPTSQPLFAFEWRDPEMGISGQLTWTRLPQGFKN
SPTLFNEALHRDLADFRIQHPDLILLQYVDDLLLAATSELDCQQGTRALLQTLGNLGYRASAKKA
QICQKQVKYLGYLLKEGQRWLTEARKETVMGQPTPKTPRQLREFLGKAGFCRLFIPGFAEMAAP
LYPLTKPGTLFNWGPDQQKAYQEIKQALLTAPALGLPDLTKPFELFVDEKQGYAKGVLTQKLGP
WRRPVAYLSKKLDPVAAGWPPCLRMVAAIAVLTKDAGKLTMGQPLVILAPHAVEALVKQPPDR
WLSNARMTHYQALLLDTDRVQFGPVVALNPATLLPLPEEGLQHNCLDILAEAHGTRPDLTDQPL
PDADHTWYTDGSSLLQEGQRKAGAAVTTETEVIWAKALPAGTSAQRAELIALTQALKMAEGKK
LNVYTDSRYAFATAHIHGEIYRRRGWLTSEGKEIKNKDEILALLKALFLPKRLSIIHCPGHQKGHS
AEARGNRMADQAARKAAITETPDTSTLL

[0873] The series of 216 exemplary gene modifying polypeptides encompassed a subset of the configurations set forth in Examples 1 and 2:
[0874] Configuration 1: Cas9-linker (RBP)ₙ-linker-RT
[0875] Configuration 2: RT-linker-(RBP)ₙ-linker-Cas9
[0876] Configuration 3: Cas9-linker-RT-linker-(RBP)ₙ

[0877] The sequences of the exemplary gene modifying polypeptides are given below:

TABLE S1
Exemplary gene modifying sequences for Configuration 1 (i.e., Cas9-linker (RBP)n-linke -RT)

| | | SEQ ID |
|---|---|---|
| Identifier | Full Amino Acid Sequence | NO: |
| PL11941 | MPAAKRVKLDGGDKKYSIGLDIGTNSVGWAVITDEYKVPSKKFKVLGNTDRHSIKKNLIGALLFDSGETAEATRLKRTARRRYTRRKNRICYLQEIFSNEMAKV | 16,001 |
| | DDSFFHRLEESFLVEEDKKHERHPIFGNIVDEVAYHEKYPTIYHLRKKLVDSTDKADLRLIYLALAHMIKFRGHFLIEGDLNPDNSDVDKLFIQLVQTYNQLFEE | |
| | NPINASGVDAKAILSARLSKSRRLENLIAQLPGEKKNGLFGNLIALSLGLTPNFKSNFDLAEDAKLQLSKDTYDDDLDNLLAQIGDQYADLFLAAKNLSDAILLS | |
| | DILRVNTEITKAPLSASMIKRYDEHHQDLTLLKALVRQQLPEKYKEIFFDQSKNGYAGYIDGGASQEEFYKFIKPILEKMDGTEELLVKLNREDLLRKQRTFDNG | |
| | SIPHQIHLGELHAILRRQEDFYPFLKDNREKIEKILTFRIPYYVGPLARGNSRFAWMTRKSEETITPWNFEEVVDKGASAQSFIERMTNFDKNLPNEKVLPKHSL | |
| | LYEYFTVYNELTKVKYVTEGMRKPAFLSGEQKKAIVDLLFKTNRKVTVKQLKEDYFKKIECFDSVEISGVEDRFNASLGTYHDLLKIIKDKDFLDNEENEDILEDIV | |
| | LTLTLFEDREMIEERLKTYAHLFDDKVMKQLKRRRYTGWGRLSRKLINGIRDKQSGKTILDFLKSDGFANRNFMQLIHDDSLTFKEDIQKAQVSGQGDSLHE | |
| | HIANLAGSPAIKKGILQTVKVVDELVKVMGRHKPENIVIEMARENQTTQKGQKNSRERMKRIEEGIKELGSQILKEHPVENTQLQNEKLYLYYLQNGRDMYV | |
| | DQELDINRLSDYDVDHIVPQSFLKDDSIDNKVLTRSDKARGKSDNVPSEEVVKKMKNYWRQLLNAKLITQRKFDNLTKAERGGLSELDKAGFIKRQLVETRQI | |
| | TKHVAQILDSRMNTKYDENDKLIREVKVITLKSKLVSDFRKDFQFYKVREINNYHHAHDAYLNAVVGTALIKKYPKLESEFVYGDYKVYDVRKMIAKSEQEIGK | |
| | ATAKYFFYSNIMNFFKTEITLANGEIRKRPLIETNGETGEIVWDKGRDFATVRKVLSMPQVNIVKKTEVQTGGFSKESILPKRNSDKLIARKKDWDPKKYGGFD | |
| | SPTVAYSVLVVAKVEKGKSKKLKSVKELLGITIMERSSFEKNPIDFLEAKGYKEVKKDLIIKLPKYSLFELENGRKRMLASAGELQKGNELALPSKYVNFLYLASHY | |
| | EKLKGSPEDNEQKQLFVEQHKHYLDEIIEQISEFSKRVILADANLDKVLSAYNKHRDKPIREQAENIIHLFTLTNLGAPAAFKYFDTTIDRKRYTSTKEVLDATLIH | |
| | QSITGLYETRIDLSQLGGDAEAAAKEAAAKEAAAKEAAAKALEAEAAAKEAAAKEAAAKEAAAKAMASNFTQFVLVDNGGTGDVTVAPSNFANGIAEWIS | |
| | SNSRSQAYKVTCSVRQSSAQNRKYTIKVEVPKGAWRSYLNMELTIPIFATNSDCELIVKAMQGLLKDGNPIPSAIAANSGIYAEAAAKEAAAKEAAAKEAAAK | |
| | ALEAEAAAKEAAAKEAAAKEAAAKATAPLEEEYRLFLEAPIQNVTLLEQWKREIPKVWAEINPPGLASTQAPIHVQLLSTALPVRVRQYPITLEAKRSLRETIRK | |
| | FRAAGILRPVHSPWNTPLLPVRKSGTSEYRMVQDLREVNKRVETIHPTVPNPYTLLSLLPPDRIWYSVLDLKDAFFCIPLAPESQLIFAFEWADAEEGESGQLT | |
| | WTRLPQGFKNSPTLFNEALNRDLQGFRLDHPSVSLLQYVDDLLIAADTQAACLSATRDLLMTLAELGYRVSGKKAQLCQEEVTYLGFKIHKGSRSLSNSRTQA | |
| | ILQIPVPKTKRQVREFLGKIGYCRLFIPGFAELAQPLYAATRPGNDPLVWGEKEEEAFQSLKLALTQPPALALPSLDKPFQLFVEETSGAAKGVLTQALGPWKR | |
| | PVAYLSKRLDPVAAGWPRCLRAIAAAALLTREASKLTFGQDIEITSSHNLESLLRSPPDKWLTNARITQYQVLLLDPPRVRFKQTAALNPATLLPETDDTLPIHH | |
| | CLDTLDSLTSTRPDLTDQPLAQAEATLFTDGSSYIRDGKRYAGAAVVTLDSVIWAEPLPIGTSAQKAELIALTKALEWSKDKSVNIYTDSRYAFATLHVHGMIY | |
| | RERGWLTAGGKAIKNAPEILALLTAVWLPKRVAVMHCKGHQKDDAPTSTGNRRADEVAREVAIRPLSTQATISKRTADGSEFESPKKKAKVE | |
| PL11942 | MPAAKRVKLDGGDKKYSIGLDIGTNSVGWAVITDEYKVPSKKFKVLGNTDRHSIKKNLIGALLFDSGETAEATRLKRTARRRYTRRKNRICYLQEIFSNEMAKV | 16,002 |
| | DDSFFHRLEESFLVEEDKKHERHPIFGNIVDEVAYHEKYPTIYHLRKKLVDSTDKADLRLIYLALAHMIKFRGHFLIEGDLNPDNSDVDKLFIQLVQTYNQLFEE | |
| | NPINASGVDAKAILSARLSKSRRLENLIAQLPGEKKNGLFGNLIALSLGLTPNFKSNFDLAEDAKLQLSKDTYDDDLDNLLAQIGDQYADLFLAAKNLSDAILLS | |
| | DILRVNTEITKAPLSASMIKRYDEHHQDLTLLKALVRQQLPEKYKEIFFDQSKNGYAGYIDGGASQEEFYKFIKPILEKMDGTEELLVKLNREDLLRKQRTFDNG | |
| | SIPHQIHLGELHAILRRQEDFYPFLKDNREKIEKILTFRIPYYVGPLARGNSRFAWMTRKSEETITPWNFEEVVDKGASAQSFIERMTNFDKNLPNEKVLPKHSL | |
| | LYEYFTVYNELTKVKYVTEGMRKPAFLSGEQKKAIVDLLFKTNRKVTVKQLKEDYFKKIECFDSVEISGVEDRFNASLGTYHDLLKIIKDKDFLDNEENEDILEDIV | |
| | LTLTLFEDREMIEERLKTYAHLFDDKVMKQLKRRRYTGWGRLSRKLINGIRDKQSGKTILDFLKSDGFANRNFMQLIHDDSLTFKEDIQKAQVSGQGDSLHE | |
| | HIANLAGSPAIKKGILQTVKVVDELVKVMGRHKPENIVIEMARENQTTQKGQKNSRERMKRIEEGIKELGSQILKEHPVENTQLQNEKLYLYYLQNGRDMYV | |
| | DQELDINRLSDYDVDHIVPQSFLKDDSIDNKVLTRSDKARGKSDNVPSEEVVKKMKNYWRQLLNAKLITQRKFDNLTKAERGGLSELDKAGFIKRQLVETRQI | |
| | TKHVAQILDSRMNTKYDENDKLIREVKVITLKSKLVSDFRKDFQFYKVREINNYHHAHDAYLNAVVGTALIKKYPKLESEFVYGDYKVYDVRKMIAKSEQEIGK | |
| | ATAKYFFYSNIMNFFKTEITLANGEIRKRPLIETNGETGEIVWDKGRDFATVRKVLSMPQVNIVKKTEVQTGGFSKESILPKRNSDKLIARKKDWDPKKYGGFD | |
| | SPTVAYSVLVVAKVEKGKSKKLKSVKELLGITIMERSSFEKNPIDFLEAKGYKEVKKDLIIKLPKYSLFELENGRKRMLASAGELQKGNELALPSKYVNFLYLASHY | |
| | EKLKGSPEDNEQKQLFVEQHKHYLDEIIEQISEFSKRVILADANLDKVLSAYNKHRDKPIREQAENIIHLFTLTNLGAPAAFKYFDTTIDRKRYTSTKEVLDATLIH | |
| | QSITGLYETRIDLSQLGGDAEAAAKEAAAKEAAAKEAAAKALEAEAAAKEAAAKEAAAKEAAAKAMASNFTQFVLVDNGGTGDVTVAPSNFANGIAEWIS | |
| | SNSRSQAYKVTCSVRQSSAQNRKYTIKVEVPKGAWRSYLNMELTIPIFATNSDCELIVKAMQGLLKDGNPIPSAIAANSGIYSGGSSGGSSGSETPGTSESATP | |
| | ESSGGSSGGSSTAPLEEEYRLFLEAPIQNVTLLEQWKREIPKVWAEINPPGLASTQAPIHVQLLSTALPVRVRQYPITLEAKRSLRETIRKFRAAGILRPVHSPW | |
| | NTPLLPVRKSGTSEYRMVQDLREVNKRVETIHPTVPNPYTLLSLLPPDRIWYSVLDLKDAFFCIPLAPESQLIFAFEWADAEEGESGQLTWTRLPQGFKNSPTL | |
| | FNEALNRDLQGFRLDHPSVSLLQYVDDLLIAADTQAACLSATRDLLMTLAELGYRVSGKKAQLCQEEVTYLGFKIHKGSRSLSNSRTQAILQIPVPKTKRQVRE | |
| | FLGKIGYCRLFIPGFAELAQPLYAATRPGNDPLVWGEKEEEAFQSLKLALTQPPALALPSLDKPFQLFVEETSGAAKGVLTQALGPWKRPVAYLSKRLDPVAA | |
| | GWPRCLRAIAAAALLTREASKLTFGQDIEITSSHNLESLLRSPPDKWLTNARITQYQVLLLDPPRVRFKQTAALNPATLLPETDDTLPIHHCLDTLDSLTSTRPDL | |
| | TDQPLAQAEATLFTDGSSYIRDGKRYAGAAVVTLDSVIWAEPLPIGTSAQKAELIALTKALEWSKDKSVNIYTDSRYAFATLHVHGMIYRERGWLTAGGKAIK | |
| | NAPEILALLTAVWLPKRVAVMHCKGHQKDDAPTSTGNRRADEVAREVAIRPLSTQATISKRTADGSEFESPKKKAKVE | |
| PL11943 | MPAAKRVKLDGGDKKYSIGLDIGTNSVGWAVITDEYKVPSKKFKVLGNTDRHSIKKNLIGALLFDSGETAEATRLKRTARRRYTRRKNRICYLQEIFSNEMAKV | 16,003 |
| | DDSFFHRLEESFLVEEDKKHERHPIFGNIVDEVAYHEKYPTIYHLRKKLVDSTDKADLRLIYLALAHMIKFRGHFLIEGDLNPDNSDVDKLFIQLVQTYNQLFEE | |
| | NPINASGVDAKAILSARLSKSRRLENLIAQLPGEKKNGLFGNLIALSLGLTPNFKSNFDLAEDAKLQLSKDTYDDDLDNLLAQIGDQYADLFLAAKNLSDAILLS | |
| | DILRVNTEITKAPLSASMIKRYDEHHQDLTLLKALVRQQLPEKYKEIFFDQSKNGYAGYIDGGASQEEFYKFIKPILEKMDGTEELLVKLNREDLLRKQRTFDNG | |
| | SIPHQIHLGELHAILRRQEDFYPFLKDNREKIEKILTFRIPYYVGPLARGNSRFAWMTRKSEETITPWNFEEVVDKGASAQSFIERMTNFDKNLPNEKVLPKHSL | |
| | LYEYFTVYNELTKVKYVTEGMRKPAFLSGEQKKAIVDLLFKTNRKVTVKQLKEDYFKKIECFDSVEISGVEDRFNASLGTYHDLLKIIKDKDFLDNEENEDILEDIV | |
| | LTLTLFEDREMIEERLKTYAHLFDDKVMKQLKRRRYTGWGRLSRKLINGIRDKQSGKTILDFLKSDGFANRNFMQLIHDDSLTFKEDIQKAQVSGQGDSLHE | |
| | HIANLAGSPAIKKGILQTVKVVDELVKVMGRHKPENIVIEMARENQTTQKGQKNSRERMKRIEEGIKELGSQILKEHPVENTQLQNEKLYLYYLQNGRDMYV | |
| | DQELDINRLSDYDVDHIVPQSFLKDDSIDNKVLTRSDKARGKSDNVPSEEVVKKMKNYWRQLLNAKLITQRKFDNLTKAERGGLSELDKAGFIKRQLVETRQI | |
| | TKHVAQILDSRMNTKYDENDKLIREVKVITLKSKLVSDFRKDFQFYKVREINNYHHAHDAYLNAVVGTALIKKYPKLESEFVYGDYKVYDVRKMIAKSEQEIGK | |
| | ATAKYFFYSNIMNFFKTEITLANGEIRKRPLIETNGETGEIVWDKGRDFATVRKVLSMPQVNIVKKTEVQTGGFSKESILPKRNSDKLIARKKDWDPKKYGGFD | |
| | SPTVAYSVLVVAKVEKGKSKKLKSVKELLGITIMERSSFEKNPIDFLEAKGYKEVKKDLIIKLPKYSLFELENGRKRMLASAGELQKGNELALPSKYVNFLYLASHY | |
| | EKLKGSPEDNEQKQLFVEQHKHYLDEIIEQISEFSKRVILADANLDKVLSAYNKHRDKPIREQAENIIHLFTLTNLGAPAAFKYFDTTIDRKRYTSTKEVLDATLIH | |
| | QSITGLYETRIDLSQLGGDAEAAAKEAAAKEAAAKEAAAKALEAEAAAKEAAAKEAAAKEAAAKAMASNFTQFVLVDNGGTGDVTVAPSNFANGIAEWIS | |
| | SNSRSQAYKVTCSVRQSSAQNRKYTIKVEVPKGAWRSYLNMELTIPIFATNSDCELIVKAMQGLLKDGNPIPSAIAANSGIYGSSGSSGSSGSSGSSGSSTAPL | |
| | EEEYRLFLEAPIQNVTLLEQWKREIPKVWAEINPPGLASTQAPIHVQLLSTALPVRVRQYPITLEAKRSLRETIRKFRAAGILRPVHSPWNTPLLPVRKSGTSEYR | |
| | MVQDLREVNKRVETIHPTVPNPYTLLSLLPPDRIWYSVLDLKDAFFCIPLAPESQLIFAFEWADAEEGESGQLTWTRLPQGFKNSPTLFNEALNRDLQGFRLD | |
| | HPSVSLLQYVDDLLIAADTQAACLSATRDLLMTLAELGYRVSGKKAQLCQEEVTYLGFKIHKGSRSLSNSRTQAILQIPVPKTKRQVREFLGKIGYCRLFIPGFAE | |
| | LAQPLYAATRPGNDPLVWGEKEEEAFQSLKLALTQPPALALPSLDKPFQLFVEETSGAAKGVLTQALGPWKRPVAYLSKRLDPVAAGWPRCLRAIAAAALLT | |
| | REASKLTFGQDIEITSSHNLESLLRSPPDKWLTNARITQYQVLLLDPPRVRFKQTAALNPATLLPETDDTLPIHHCLDTLDSLTSTRPDLTDQPLAQAEATLFTD | |
| | GSSYIRDGKRYAGAAVVTLDSVIWAEPLPIGTSAQKAELIALTKALEWSKDKSVNIYTDSRYAFATLHVHGMIYRERGWLTAGGKAIKNAPEILALLTAVWLPK | |
| | RVAVMHCKGHQKDDAPTSTGNRRADEVAREVAIRPLSTQATISKRTADGSEFESPKKKAKVE | |
| PL11944 | MPAAKRVKLDGGDKKYSIGLDIGTNSVGWAVITDEYKVPSKKFKVLGNTDRHSIKKNLIGALLFDSGETAEATRLKRTARRRYTRRKNRICYLQEIFSNEMAKV | 16,004 |
| | DDSFFHRLEESFLVEEDKKHERHPIFGNIVDEVAYHEKYPTIYHLRKKLVDSTDKADLRLIYLALAHMIKFRGHFLIEGDLNPDNSDVDKLFIQLVQTYNQLFEE | |
| | NPINASGVDAKAILSARLSKSRRLENLIAQLPGEKKNGLFGNLIALSLGLTPNFKSNFDLAEDAKLQLSKDTYDDDLDNLLAQIGDQYADLFLAAKNLSDAILLS | |
| | DILRVNTEITKAPLSASMIKRYDEHHQDLTLLKALVRQQLPEKYKEIFFDQSKNGYAGYIDGGASQEEFYKFIKPILEKMDGTEELLVKLNREDLLRKQRTFDNG | |
| | SIPHQIHLGELHAILRRQEDFYPFLKDNREKIEKILTFRIPYYVGPLARGNSRFAWMTRKSEETITPWNFEEVVDKGASAQSFIERMTNFDKNLPNEKVLPKHSL | |
| | LYEYFTVYNELTKVKYVTEGMRKPAFLSGEQKKAIVDLLFKTNRKVTVKQLKEDYFKKIECFDSVEISGVEDRFNASLGTYHDLLKIIKDKDFLDNEENEDILEDIV | |
| | LTLTLFEDREMIEERLKTYAHLFDDKVMKQLKRRRYTGWGRLSRKLINGIRDKQSGKTILDFLKSDGFANRNFMQLIHDDSLTFKEDIQKAQVSGQGDSLHE | |
| | HIANLAGSPAIKKGILQTVKVVDELVKVMGRHKPENIVIEMARENQTTQKGQKNSRERMKRIEEGIKELGSQILKEHPVENTQLQNEKLYLYYLQNGRDMYV | |
| | DQELDINRLSDYDVDHIVPQSFLKDDSIDNKVLTRSDKARGKSDNVPSEEVVKKMKNYWRQLLNAKLITQRKFDNLTKAERGGLSELDKAGFIKRQLVETRQI | |
| | TKHVAQILDSRMNTKYDENDKLIREVKVITLKSKLVSDFRKDFQFYKVREINNYHHAHDAYLNAVVGTALIKKYPKLESEFVYGDYKVYDVRKMIAKSEQEIGK | |
| | ATAKYFFYSNIMNFFKTEITLANGEIRKRPLIETNGETGEIVWDKGRDFATVRKVLSMPQVNIVKKTEVQTGGFSKESILPKRNSDKLIARKKDWDPKKYGGFD | |
| | SPTVAYSVLVVAKVEKGKSKKLKSVKELLGITIMERSSFEKNPIDFLEAKGYKEVKKDLIIKLPKYSLFELENGRKRMLASAGELQKGNELALPSKYVNFLYLASHY | |
| | EKLKGSPEDNEQKQLFVEQHKHYLDEIIEQISEFSKRVILADANLDKVLSAYNKHRDKPIREQAENIIHLFTLTNLGAPAAFKYFDTTIDRKRYTSTKEVLDATLIH | |
| | QSITGLYETRIDLSQLGGDAEAAAKEAAAKEAAAKEAAAKALEAEAAAKEAAAKEAAAKEAAAKAMASNFTQFVLVDNGGTGDVTVAPSNFANGIAEWIS | |
| | SNSRSQAYKVTCSVRQSSAQNRKYTIKVEVPKGAWRSYLNMELTIPIFATNSDCELIVKAMQGLLKDGNPIPSAIAANSGIYGSSGGGEAAAKTAPLEEEYRLF | |
| | LEAPIQNVTLLEQWKREIPKVWAEINPPGLASTQAPIHVQLLSTALPVRVRQYPITLEAKRSLRETIRKFRAAGILRPVHSPWNTPLLPVRKSGTSEYRMVQDL | |
| | REVNKRVETIHPTVPNPYTLLSLLPPDRIWYSVLDLKDAFFCIPLAPESQLIFAFEWADAEEGESGQLTWTRLPQGFKNSPTLFNEALNRDLQGFRLDHPSVSL | |
| | LQYVDDLLIAADTQAACLSATRDLLMTLAELGYRVSGKKAQLCQEEVTYLGFKIHKGSRSLSNSRTQAILQIPVPKTKRQVREFLGKIGYCRLFIPGFAELAQPLY | |
| | AATRPGNDPLVWGEKEEEAFQSLKLALTQPPALALPSLDKPFQLFVEETSGAAKGVLTQALGPWKRPVAYLSKRLDPVAAGWPRCLRAIAAAALLTREASKL | |
| | TFGQDIEITSSHNLESLLRSPPDKWLTNARITQYQVLLLDPPRVRFKQTAALNPATLLPETDDTLPIHHCLDTLDSLTSTRPDLTDQPLAQAEATLFTDGSSYIRD | |
| | GKRYAGAAVVTLDSVIWAEPLPIGTSAQKAELIALTKALEWSKDKSVNIYTDSRYAFATLHVHGMIYRERGWLTAGGKAIKNAPEILALLTAVWLPKRVAVM | |
| | HCKGHQKDDAPTSTGNRRADEVAREVAIRPLSTQATISKRTADGSEFESPKKKAKVE | |
| PL11945 | MPAAKRVKLDGGDKKYSIGLDIGTNSVGWAVITDEYKVPSKKFKVLGNTDRHSIKKNLIGALLFDSGETAEATRLKRTARRRYTRRKNRICYLQEIFSNEMAKV | 16,005 |
| | DDSFFHRLEESFLVEEDKKHERHPIFGNIVDEVAYHEKYPTIYHLRKKLVDSTDKADLRLIYLALAHMIKFRGHFLIEGDLNPDNSDVDKLFIQLVQTYNQLFEE | |
| | NPINASGVDAKAILSARLSKSRRLENLIAQLPGEKKNGLFGNLIALSLGLTPNFKSNFDLAEDAKLQLSKDTYDDDLDNLLAQIGDQYADLFLAAKNLSDAILLS | |
| | DILRVNTEITKAPLSASMIKRYDEHHQDLTLLKALVRQQLPEKYKEIFFDQSKNGYAGYIDGGASQEEFYKFIKPILEKMDGTEELLVKLNREDLLRKQRTFDNG | |
| | SIPHQIHLGELHAILRRQEDFYPFLKDNREKIEKILTFRIPYYVGPLARGNSRFAWMTRKSEETITPWNFEEVVDKGASAQSFIERMTNFDKNLPNEKVLPKHSL | |
| | LYEYFTVYNELTKVKYVTEGMRKPAFLSGEQKKAIVDLLFKTNRKVTVKQLKEDYFKKIECFDSVEISGVEDRFNASLGTYHDLLKIIKDKDFLDNEENEDILEDIV | |
| | LTLTLFEDREMIEERLKTYAHLFDDKVMKQLKRRRYTGWGRLSRKLINGIRDKQSGKTILDFLKSDGFANRNFMQLIHDDSLTFKEDIQKAQVSGQGDSLHE | |
| | HIANLAGSPAIKKGILQTVKVVDELVKVMGRHKPENIVIEMARENQTTQKGQKNSRERMKRIEEGIKELGSQILKEHPVENTQLQNEKLYLYYLQNGRDMYV | |
| | DQELDINRLSDYDVDHIVPQSFLKDDSIDNKVLTRSDKARGKSDNVPSEEVVKKMKNYWRQLLNAKLITQRKFDNLTKAERGGLSELDKAGFIKRQLVETRQI | |
| | TKHVAQILDSRMNTKYDENDKLIREVKVITLKSKLVSDFRKDFQFYKVREINNYHHAHDAYLNAVVGTALIKKYPKLESEFVYGDYKVYDVRKMIAKSEQEIGK | |
| | ATAKYFFYSNIMNFFKTEITLANGEIRKRPLIETNGETGEIVWDKGRDFATVRKVLSMPQVNIVKKTEVQTGGFSKESILPKRNSDKLIARKKDWDPKKYGGFD | |
| | SPTVAYSVLVVAKVEKGKSKKLKSVKELLGITIMERSSFEKNPIDFLEAKGYKEVKKDLIIKLPKYSLFELENGRKRMLASAGELQKGNELALPSKYVNFLYLASHY | |
| | EKLKGSPEDNEQKQLFVEQHKHYLDEIIEQISEFSKRVILADANLDKVLSAYNKHRDKPIREQAENIIHLFTLTNLGAPAAFKYFDTTIDRKRYTSTKEVLDATLIH | |
| | QSITGLYETRIDLSQLGGDAEAAAKEAAAKEAAAKEAAAKALEAEAAAKEAAAKEAAAKEAAAKAMASNFTQFVLVDNGGTGDVTVAPSNFANGIAEWIS | |
| | SNSRSQAYKVTCSVRQSSAQNRKYTIKVEVPKGAWRSYLNMELTIPIFATNSDCELIVKAMQGLLKDGNPIPSAIAANSGIYGGSGGSMASNFTQFVLVDNG | |
| | GTGDVTVAPSNFANGIAEWISSNSRSQAYKVTCSVRQSSAQNRKYTIKVEVPKGAWRSYLNMELTIPIFATNSDCELIVKAMQGLLKDGNPIPSAIAANSGIY | |
| | AEAAAKEAAAKEAAAKEAAAKALEAEAAAKEAAAKEAAAKEAAAKATAPLEEEYRLFLEAPIQNVTLLEQWKREIPKVWAEINPPGLASTQAPIHVQLLSTAL | |
| | PVRVRQYPITLEAKRSLRETIRKFRAAGILRPVHSPWNTPLLPVRKSGTSEYRMVQDLREVNKRVETIHPTVPNPYTLLSLLPPDRIWYSVLDLKDAFFCIPLAPE | |
| | SQLIFAFEWADAEEGESGQLTWTRLPQGFKNSPTLFNEALNRDLQGFRLDHPSVSLLQYVDDLLIAADTQAACLSATRDLLMTLAELGYRVSGKKAQLCQEE | |
| | VTYLGFKIHKGSRSLSNSRTQAILQIPVPKTKRQVREFLGKIGYCRLFIPGFAELAQPLYAATRPGNDPLVWGEKEEEAFQSLKLALTQPPALALPSLDKPFQLFV | |
| | EETSGAAKGVLTQALGPWKRPVAYLSKRLDPVAAGWPRCLRAIAAAALLTREASKLTFGQDIEITSSHNLESLLRSPPDKWLTNARITQYQVLLLDPPRVRFK | |
| | QTAALNPATLLPETDDTLPIHHCLDTLDSLTSTRPDLTDQPLAQAEATLFTDGSSYIRDGKRYAGAAVVTLDSVIWAEPLPIGTSAQKAELIALTKALEWSKDKS | |
| | VNIYTDSRYAFATLHVHGMIYRERGWLTAGGKAIKNAPEILALLTAVWLPKRVAVMHCKGHQKDDAPTSTGNRRADEVAREVAIRPLSTQATISKRTADGS | |
| | EFESPKKKAKVE | |
| PL11946 | MPAAKRVKLDGGDKKYSIGLDIGTNSVGWAVITDEYKVPSKKFKVLGNTDRHSIKKNLIGALLFDSGETAEATRLKRTARRRYTRRKNRICYLQEIFSNEMAKV | 16,006 |
| | DDSFFHRLEESFLVEEDKKHERHPIFGNIVDEVAYHEKYPTIYHLRKKLVDSTDKADLRLIYLALAHMIKFRGHFLIEGDLNPDNSDVDKLFIQLVQTYNQLFEE | |
| | NPINASGVDAKAILSARLSKSRRLENLIAQLPGEKKNGLFGNLIALSLGLTPNFKSNFDLAEDAKLQLSKDTYDDDLDNLLAQIGDQYADLFLAAKNLSDAILLS | |
| | DILRVNTEITKAPLSASMIKRYDEHHQDLTLLKALVRQQLPEKYKEIFFDQSKNGYAGYIDGGASQEEFYKFIKPILEKMDGTEELLVKLNREDLLRKQRTFDNG | |
| | SIPHQIHLGELHAILRRQEDFYPFLKDNREKIEKILTFRIPYYVGPLARGNSRFAWMTRKSEETITPWNFEEVVDKGASAQSFIERMTNFDKNLPNEKVLPKHSL | |
| | LYEYFTVYNELTKVKYVTEGMRKPAFLSGEQKKAIVDLLFKTNRKVTVKQLKEDYFKKIECFDSVEISGVEDRFNASLGTYHDLLKIIKDKDFLDNEENEDILEDIV | |
| | LTLTLFEDREMIEERLKTYAHLFDDKVMKQLKRRRYTGWGRLSRKLINGIRDKQSGKTILDFLKSDGFANRNFMQLIHDDSLTFKEDIQKAQVSGQGDSLHE | |
| | HIANLAGSPAIKKGILQTVKVVDELVKVMGRHKPENIVIEMARENQTTQKGQKNSRERMKRIEEGIKELGSQILKEHPVENTQLQNEKLYLYYLQNGRDMYV | |
| | DQELDINRLSDYDVDHIVPQSFLKDDSIDNKVLTRSDKARGKSDNVPSEEVVKKMKNYWRQLLNAKLITQRKFDNLTKAERGGLSELDKAGFIKRQLVETRQI | |
| | TKHVAQILDSRMNTKYDENDKLIREVKVITLKSKLVSDFRKDFQFYKVREINNYHHAHDAYLNAVVGTALIKKYPKLESEFVYGDYKVYDVRKMIAKSEQEIGK | |
| | ATAKYFFYSNIMNFFKTEITLANGEIRKRPLIETNGETGEIVWDKGRDFATVRKVLSMPQVNIVKKTEVQTGGFSKESILPKRNSDKLIARKKDWDPKKYGGFD | |
| | SPTVAYSVLVVAKVEKGKSKKLKSVKELLGITIMERSSFEKNPIDFLEAKGYKEVKKDLIIKLPKYSLFELENGRKRMLASAGELQKGNELALPSKYVNFLYLASHY | |
| | EKLKGSPEDNEQKQLFVEQHKHYLDEIIEQISEFSKRVILADANLDKVLSAYNKHRDKPIREQAENIIHLFTLTNLGAPAAFKYFDTTIDRKRYTSTKEVLDATLIH | |
| | QSITGLYETRIDLSQLGGDAEAAAKEAAAKEAAAKEAAAKALEAEAAAKEAAAKEAAAKEAAAKAMASNFTQFVLVDNGGTGDVTVAPSNFANGIAEWIS | |
| | SNSRSQAYKVTCSVRQSSAQNRKYTIKVEVPKGAWRSYLNMELTIPIFATNSDCELIVKAMQGLLKDGNPIPSAIAANSGIYGGSGGSMASNFTQFVLVDNG | |
| | GTGDVTVAPSNFANGIAEWISSNSRSQAYKVTCSVRQSSAQNRKYTIKVEVPKGAWRSYLNMELTIPIFATNSDCELIVKAMQGLLKDGNPIPSAIAANSGIY | |
| | SGGSSGGSSGSETPGTSESATPESSGGSSGGSSTAPLEEEYRLFLEAPIQNVTLLEQWKREIPKVWAEINPPGLASTQAPIHVQLLSTALPVRVRQYPITLEAKR | |
| | SLRETIRKFRAAGILRPVHSPWNTPLLPVRKSGTSEYRMVQDLREVNKRVETIHPTVPNPYTLLSLLPPDRIWYSVLDLKDAFFCIPLAPESQLIFAFEWADAEE | |
| | GESGQLTWTRLPQGFKNSPTLFNEALNRDLQGFRLDHPSVSLLQYVDDLLIAADTQAACLSATRDLLMTLAELGYRVSGKKAQLCQEEVTYLGFKIHKGSRSL | |
| | SNSRTQAILQIPVPKTKRQVREFLGKIGYCRLFIPGFAELAQPLYAATRPGNDPLVWGEKEEEAFQSLKLALTQPPALALPSLDKPFQLFVEETSGAAKGVLTQ | |
| | ALGPWKRPVAYLSKRLDPVAAGWPRCLRAIAAAALLTREASKLTFGQDIEITSSHNLESLLRSPPDKWLTNARITQYQVLLLDPPRVRFKQTAALNPATLLPET | |
| | DDTLPIHHCLDTLDSLTSTRPDLTDQPLAQAEATLFTDGSSYIRDGKRYAGAAVVTLDSVIWAEPLPIGTSAQKAELIALTKALEWSKDKSVNIYTDSRYAFATL | |
| | HVHGMIYRERGWLTAGGKAIKNAPEILALLTAVWLPKRVAVMHCKGHQKDDAPTSTGNRRADEVAREVAIRPLSTQATISKRTADGSEFESPKKKAKVE | |
| PL11947 | MPAAKRVKLDGGDKKYSIGLDIGTNSVGWAVITDEYKVPSKKFKVLGNTDRHSIKKNLIGALLFDSGETAEATRLKRTARRRYTRRKNRICYLQEIFSNEMAKV | 16,007 |
| | DDSFFHRLEESFLVEEDKKHERHPIFGNIVDEVAYHEKYPTIYHLRKKLVDSTDKADLRLIYLALAHMIKFRGHFLIEGDLNPDNSDVDKLFIQLVQTYNQLFEE | |
| | NPINASGVDAKAILSARLSKSRRLENLIAQLPGEKKNGLFGNLIALSLGLTPNFKSNFDLAEDAKLQLSKDTYDDDLDNLLAQIGDQYADLFLAAKNLSDAILLS | |
| | DILRVNTEITKAPLSASMIKRYDEHHQDLTLLKALVRQQLPEKYKEIFFDQSKNGYAGYIDGGASQEEFYKFIKPILEKMDGTEELLVKLNREDLLRKQRTFDNG | |
| | SIPHQIHLGELHAILRRQEDFYPFLKDNREKIEKILTFRIPYYVGPLARGNSRFAWMTRKSEETITPWNFEEVVDKGASAQSFIERMTNFDKNLPNEKVLPKHSL | |
| | LYEYFTVYNELTKVKYVTEGMRKPAFLSGEQKKAIVDLLFKTNRKVTVKQLKEDYFKKIECFDSVEISGVEDRFNASLGTYHDLLKIIKDKDFLDNEENEDILEDIV | |
| | LTLTLFEDREMIEERLKTYAHLFDDKVMKQLKRRRYTGWGRLSRKLINGIRDKQSGKTILDFLKSDGFANRNFMQLIHDDSLTFKEDIQKAQVSGQGDSLHE | |
| | HIANLAGSPAIKKGILQTVKVVDELVKVMGRHKPENIVIEMARENQTTQKGQKNSRERMKRIEEGIKELGSQILKEHPVENTQLQNEKLYLYYLQNGRDMYV | |
| | DQELDINRLSDYDVDHIVPQSFLKDDSIDNKVLTRSDKARGKSDNVPSEEVVKKMKNYWRQLLNAKLITQRKFDNLTKAERGGLSELDKAGFIKRQLVETRQI | |
| | TKHVAQILDSRMNTKYDENDKLIREVKVITLKSKLVSDFRKDFQFYKVREINNYHHAHDAYLNAVVGTALIKKYPKLESEFVYGDYKVYDVRKMIAKSEQEIGK | |
| | ATAKYFFYSNIMNFFKTEITLANGEIRKRPLIETNGETGEIVWDKGRDFATVRKVLSMPQVNIVKKTEVQTGGFSKESILPKRNSDKLIARKKDWDPKKYGGFD | |
| | SPTVAYSVLVVAKVEKGKSKKLKSVKELLGITIMERSSFEKNPIDFLEAKGYKEVKKDLIIKLPKYSLFELENGRKRMLASAGELQKGNELALPSKYVNFLYLASHY | |
| | EKLKGSPEDNEQKQLFVEQHKHYLDEIIEQISEFSKRVILADANLDKVLSAYNKHRDKPIREQAENIIHLFTLTNLGAPAAFKYFDTTIDRKRYTSTKEVLDATLIH | |
| | QSITGLYETRIDLSQLGGDAEAAAKEAAAKEAAAKEAAAKALEAEAAAKEAAAKEAAAKEAAAKAMASNFTQFVLVDNGGTGDVTVAPSNFANGIAEWIS | |
| | SNSRSQAYKVTCSVRQSSAQNRKYTIKVEVPKGAWRSYLNMELTIPIFATNSDCELIVKAMQGLLKDGNPIPSAIAANSGIYGGSGGSMASNFTQFVLVDNG | |
| | GTGDVTVAPSNFANGIAEWISSNSRSQAYKVTCSVRQSSAQNRKYTIKVEVPKGAWRSYLNMELTIPIFATNSDCELIVKAMQGLLKDGNPIPSAIAANSGIY | |
| | GSSGSSGSSGSSGSSGSSTAPLEEEYRLFLEAPIQNVTLLEQWKREIPKVWAEINPPGLASTQAPIHVQLLSTALPVRVRQYPITLEAKRSLRETIRKFRAAGILRP | |
| | VHSPWNTPLLPVRKSGTSEYRMVQDLREVNKRVETIHPTVPNPYTLLSLLPPDRIWYSVLDLKDAFFCIPLAPESQLIFAFEWADAEEGESGQLTWTRLPQGF | |
| | KNSPTLFNEALNRDLQGFRLDHPSVSLLQYVDDLLIAADTQAACLSATRDLLMTLAELGYRVSGKKAQLCQEEVTYLGFKIHKGSRSLSNSRTQAILQIPVPKT | |
| | KRQVREFLGKIGYCRLFIPGFAELAQPLYAATRPGNDPLVWGEKEEEAFQSLKLALTQPPALALPSLDKPFQLFVEETSGAAKGVLTQALGPWKRPVAYLSKR | |
| | LDPVAAGWPRCLRAIAAAALLTREASKLTFGQDIEITSSHNLESLLRSPPDKWLTNARITQYQVLLLDPPRVRFKQTAALNPATLLPETDDTLPIHHCLDTLDSL | |
| | TSTRPDLTDQPLAQAEATLFTDGSSYIRDGKRYAGAAVVTLDSVIWAEPLPIGTSAQKAELIALTKALEWSKDKSVNIYTDSRYAFATLHVHGMIYRERGWLT | |
| | AGGKAIKNAPEILALLTAVWLPKRVAVMHCKGHQKDDAPTSTGNRRADEVAREVAIRPLSTQATISKRTADGSEFESPKKKAKVE | |
| PL11948 | MPAAKRVKLDGGDKKYSIGLDIGTNSVGWAVITDEYKVPSKKFKVLGNTDRHSIKKNLIGALLFDSGETAEATRLKRTARRRYTRRKNRICYLQEIFSNEMAKV | 16,008 |
| | DDSFFHRLEESFLVEEDKKHERHPIFGNIVDEVAYHEKYPTIYHLRKKLVDSTDKADLRLIYLALAHMIKFRGHFLIEGDLNPDNSDVDKLFIQLVQTYNQLFEE | |
| | NPINASGVDAKAILSARLSKSRRLENLIAQLPGEKKNGLFGNLIALSLGLTPNFKSNFDLAEDAKLQLSKDTYDDDLDNLLAQIGDQYADLFLAAKNLSDAILLS | |
| | DILRVNTEITKAPLSASMIKRYDEHHQDLTLLKALVRQQLPEKYKEIFFDQSKNGYAGYIDGGASQEEFYKFIKPILEKMDGTEELLVKLNREDLLRKQRTFDNG | |
| | SIPHQIHLGELHAILRRQEDFYPFLKDNREKIEKILTFRIPYYVGPLARGNSRFAWMTRKSEETITPWNFEEVVDKGASAQSFIERMTNFDKNLPNEKVLPKHSL | |
| | LYEYFTVYNELTKVKYVTEGMRKPAFLSGEQKKAIVDLLFKTNRKVTVKQLKEDYFKKIECFDSVEISGVEDRFNASLGTYHDLLKIIKDKDFLDNEENEDILEDIV | |
| | LTLTLFEDREMIEERLKTYAHLFDDKVMKQLKRRRYTGWGRLSRKLINGIRDKQSGKTILDFLKSDGFANRNFMQLIHDDSLTFKEDIQKAQVSGQGDSLHE | |
| | HIANLAGSPAIKKGILQTVKVVDELVKVMGRHKPENIVIEMARENQTTQKGQKNSRERMKRIEEGIKELGSQILKEHPVENTQLQNEKLYLYYLQNGRDMYV | |
| | DQELDINRLSDYDVDHIVPQSFLKDDSIDNKVLTRSDKARGKSDNVPSEEVVKKMKNYWRQLLNAKLITQRKFDNLTKAERGGLSELDKAGFIKRQLVETRQI | |
| | TKHVAQILDSRMNTKYDENDKLIREVKVITLKSKLVSDFRKDFQFYKVREINNYHHAHDAYLNAVVGTALIKKYPKLESEFVYGDYKVYDVRKMIAKSEQEIGK | |
| | ATAKYFFYSNIMNFFKTEITLANGEIRKRPLIETNGETGEIVWDKGRDFATVRKVLSMPQVNIVKKTEVQTGGFSKESILPKRNSDKLIARKKDWDPKKYGGFD | |
| | SPTVAYSVLVVAKVEKGKSKKLKSVKELLGITIMERSSFEKNPIDFLEAKGYKEVKKDLIIKLPKYSLFELENGRKRMLASAGELQKGNELALPSKYVNFLYLASHY | |
| | EKLKGSPEDNEQKQLFVEQHKHYLDEIIEQISEFSKRVILADANLDKVLSAYNKHRDKPIREQAENIIHLFTLTNLGAPAAFKYFDTTIDRKRYTSTKEVLDATLIH | |
| | QSITGLYETRIDLSQLGGDAEAAAKEAAAKEAAAKEAAAKALEAEAAAKEAAAKEAAAKEAAAKAMASNFTQFVLVDNGGTGDVTVAPSNFANGIAEWIS | |
| | SNSRSQAYKVTCSVRQSSAQNRKYTIKVEVPKGAWRSYLNMELTIPIFATNSDCELIVKAMQGLLKDGNPIPSAIAANSGIYGGSGGSMASNFTQFVLVDNG | |
| | GTGDVTVAPSNFANGIAEWISSNSRSQAYKVTCSVRQSSAQNRKYTIKVEVPKGAWRSYLNMELTIPIFATNSDCELIVKAMQGLLKDGNPIPSAIAANSGIY | |
| | GSSGGGEAAAKTAPLEEEYRLFLEAPIQNVTLLEQWKREIPKVWAEINPPGLASTQAPIHVQLLSTALPVRVRQYPITLEAKRSLRETIRKFRAAGILRPVHSPW | |
| | NTPLLPVRKSGTSEYRMVQDLREVNKRVETIHPTVPNPYTLLSLLPPDRIWYSVLDLKDAFFCIPLAPESQLIFAFEWADAEEGESGQLTWTRLPQGFKNSPTL | |
| | FNEALNRDLQGFRLDHPSVSLLQYVDDLLIAADTQAACLSATRDLLMTLAELGYRVSGKKAQLCQEEVTYLGFKIHKGSRSLSNSRTQAILQIPVPKTKRQVRE | |
| | FLGKIGYCRLFIPGFAELAQPLYAATRPGNDPLVWGEKEEEAFQSLKLALTQPPALALPSLDKPFQLFVEETSGAAKGVLTQALGPWKRPVAYLSKRLDPVAA | |
| | GWPRCLRAIAAAALLTREASKLTFGQDIEITSSHNLESLLRSPPDKWLTNARITQYQVLLLDPPRVRFKQTAALNPATLLPETDDTLPIHHCLDTLDSLTSTRPDL | |
| | TDQPLAQAEATLFTDGSSYIRDGKRYAGAAVVTLDSVIWAEPLPIGTSAQKAELIALTKALEWSKDKSVNIYTDSRYAFATLHVHGMIYRERGWLTAGGKAIK | |
| | NAPEILALLTAVWLPKRVAVMHCKGHQKDDAPTSTGNRRADEVAREVAIRPLSTQATISKRTADGSEFESPKKKAKVE | |
| PL11949 | MPAAKRVKLDGGDKKYSIGLDIGTNSVGWAVITDEYKVPSKKFKVLGNTDRHSIKKNLIGALLFDSGETAEATRLKRTARRRYTRRKNRICYLQEIFSNEMAKV | 16,009 |
| | DDSFFHRLEESFLVEEDKKHERHPIFGNIVDEVAYHEKYPTIYHLRKKLVDSTDKADLRLIYLALAHMIKFRGHFLIEGDLNPDNSDVDKLFIQLVQTYNQLFEE | |
| | NPINASGVDAKAILSARLSKSRRLENLIAQLPGEKKNGLFGNLIALSLGLTPNFKSNFDLAEDAKLQLSKDTYDDDLDNLLAQIGDQYADLFLAAKNLSDAILLS | |
| | DILRVNTEITKAPLSASMIKRYDEHHQDLTLLKALVRQQLPEKYKEIFFDQSKNGYAGYIDGGASQEEFYKFIKPILEKMDGTEELLVKLNREDLLRKQRTFDNG | |
| | SIPHQIHLGELHAILRRQEDFYPFLKDNREKIEKILTFRIPYYVGPLARGNSRFAWMTRKSEETITPWNFEEVVDKGASAQSFIERMTNFDKNLPNEKVLPKHSL | |
| | LYEYFTVYNELTKVKYVTEGMRKPAFLSGEQKKAIVDLLFKTNRKVTVKQLKEDYFKKIECFDSVEISGVEDRFNASLGTYHDLLKIIKDKDFLDNEENEDILEDIV | |
| | LTLTLFEDREMIEERLKTYAHLFDDKVMKQLKRRRYTGWGRLSRKLINGIRDKQSGKTILDFLKSDGFANRNFMQLIHDDSLTFKEDIQKAQVSGQGDSLHE | |
| | HIANLAGSPAIKKGILQTVKVVDELVKVMGRHKPENIVIEMARENQTTQKGQKNSRERMKRIEEGIKELGSQILKEHPVENTQLQNEKLYLYYLQNGRDMYV | |
| | DQELDINRLSDYDVDHIVPQSFLKDDSIDNKVLTRSDKARGKSDNVPSEEVVKKMKNYWRQLLNAKLITQRKFDNLTKAERGGLSELDKAGFIKRQLVETRQI | |
| | TKHVAQILDSRMNTKYDENDKLIREVKVITLKSKLVSDFRKDFQFYKVREINNYHHAHDAYLNAVVGTALIKKYPKLESEFVYGDYKVYDVRKMIAKSEQEIGK | |
| | ATAKYFFYSNIMNFFKTEITLANGEIRKRPLIETNGETGEIVWDKGRDFATVRKVLSMPQVNIVKKTEVQTGGFSKESILPKRNSDKLIARKKDWDPKKYGGFD | |
| | SPTVAYSVLVVAKVEKGKSKKLKSVKELLGITIMERSSFEKNPIDFLEAKGYKEVKKDLIIKLPKYSLFELENGRKRMLASAGELQKGNELALPSKYVNFLYLASHY | |
| | EKLKGSPEDNEQKQLFVEQHKHYLDEIIEQISEFSKRVILADANLDKVLSAYNKHRDKPIREQAENIIHLFTLTNLGAPAAFKYFDTTIDRKRYTSTKEVLDATLIH | |
| | QSITGLYETRIDLSQLGGDAEAAAKEAAAKEAAAKEAAAKALEAEAAAKEAAAKEAAAKEAAAKAMASNFTQFVLVDNGGTGDVTVAPSNFANGIAEWIS | |
| | SNSRSQAYKVTCSVRQSSAQNRKYTIKVEVPKGAWRSYLNMELTIPIFATNSDCELIVKAMQGLLKDGNPIPSAIAANSGIYGGSGGSMASNFTQFVLVDNG | |
| | GTGDVTVAPSNFANGIAEWISSNSRSQAYKVTCSVRQSSAQNRKYTIKVEVPKGAWRSYLNMELTIPIFATNSDCELIVKAMQGLLKDGNPIPSAIAANSGIY | |
| | GGGSGGGSGGGSGGGSMASNFTQFVLVDNGGTGDVTVAPSNFANGIAEWISSNSRSQAYKVTCSVRQSSAQNRKYTIKVEVPKGAWRSYLNMELTIPIF | |
| | ATNSDCELIVKAMQGLLKDGNPIPSAIAANSGIYGGSGGSMASNFTQFVLVDNGGTGDVTVAPSNFANGIAEWISSNSRSQAYKVTCSVRQSSAQNRKYTI | |
| | KVEVPKGAWRSYLNMELTIPIFATNSDCELIVKAMQGLLKDGNPIPSAIAANSGIYAEAAAKEAAAKEAAAKEAAAKALEAEAAAKEAAAKEAAAKEAAAKA | |
| | TAPLEEEYRLFLEAPIQNVTLLEQWKREIPKVWAEINPPGLASTQAPIHVQLLSTALPVRVRQYPITLEAKRSLRETIRKFRAAGILRPVHSPWNTPLLPVRKSGT | |
| | SEYRMVQDLREVNKRVETIHPTVPNPYTLLSLLPPDRIWYSVLDLKDAFFCIPLAPESQLIFAFEWADAEEGESGQLTWTRLPQGFKNSPTLFNEALNRDLQG | |
| | FRLDHPSVSLLQYVDDLLIAADTQAACLSATRDLLMTLAELGYRVSGKKAQLCQEEVTYLGFKIHKGSRSLSNSRTQAILQIPVPKTKRQVREFLGKIGYCRLFIP | |
| | GFAELAQPLYAATRPGNDPLVWGEKEEEAFQSLKLALTQPPALALPSLDKPFQLFVEETSGAAKGVLTQALGPWKRPVAYLSKRLDPVAAGWPRCLRAIAA | |
| | AALLTREASKLTFGQDIEITSSHNLESLLRSPPDKWLTNARITQYQVLLLDPPRVRFKQTAALNPATLLPETDDTLPIHHCLDTLDSLTSTRPDLTDQPLAQAEAT | |
| | LFTDGSSYIRDGKRYAGAAVVTLDSVIWAEPLPIGTSAQKAELIALTKALEWSKDKSVNIYTDSRYAFATLHVHGMIYRERGWLTAGGKAIKNAPEILALLTAV | |
| | WLPKRVAVMHCKGHQKDDAPTSTGNRRADEVAREVAIRPLSTQATISKRTADGSEFESPKKKAKVE | |
| PL11950 | MPAAKRVKLDGGDKKYSIGLDIGTNSVGWAVITDEYKVPSKKFKVLGNTDRHSIKKNLIGALLFDSGETAEATRLKRTARRRYTRRKNRICYLQEIFSNEMAKV | 16,010 |
| | DDSFFHRLEESFLVEEDKKHERHPIFGNIVDEVAYHEKYPTIYHLRKKLVDSTDKADLRLIYLALAHMIKFRGHFLIEGDLNPDNSDVDKLFIQLVQTYNQLFEE | |
| | NPINASGVDAKAILSARLSKSRRLENLIAQLPGEKKNGLFGNLIALSLGLTPNFKSNFDLAEDAKLQLSKDTYDDDLDNLLAQIGDQYADLFLAAKNLSDAILLS | |
| | DILRVNTEITKAPLSASMIKRYDEHHQDLTLLKALVRQQLPEKYKEIFFDQSKNGYAGYIDGGASQEEFYKFIKPILEKMDGTEELLVKLNREDLLRKQRTFDNG | |
| | SIPHQIHLGELHAILRRQEDFYPFLKDNREKIEKILTFRIPYYVGPLARGNSRFAWMTRKSEETITPWNFEEVVDKGASAQSFIERMTNFDKNLPNEKVLPKHSL | |
| | LYEYFTVYNELTKVKYVTEGMRKPAFLSGEQKKAIVDLLFKTNRKVTVKQLKEDYFKKIECFDSVEISGVEDRFNASLGTYHDLLKIIKDKDFLDNEENEDILEDIV | |
| | LTLTLFEDREMIEERLKTYAHLFDDKVMKQLKRRRYTGWGRLSRKLINGIRDKQSGKTILDFLKSDGFANRNFMQLIHDDSLTFKEDIQKAQVSGQGDSLHE | |
| | HIANLAGSPAIKKGILQTVKVVDELVKVMGRHKPENIVIEMARENQTTQKGQKNSRERMKRIEEGIKELGSQILKEHPVENTQLQNEKLYLYYLQNGRDMYV | |
| | DQELDINRLSDYDVDHIVPQSFLKDDSIDNKVLTRSDKARGKSDNVPSEEVVKKMKNYWRQLLNAKLITQRKFDNLTKAERGGLSELDKAGFIKRQLVETRQI | |
| | TKHVAQILDSRMNTKYDENDKLIREVKVITLKSKLVSDFRKDFQFYKVREINNYHHAHDAYLNAVVGTALIKKYPKLESEFVYGDYKVYDVRKMIAKSEQEIGK | |
| | ATAKYFFYSNIMNFFKTEITLANGEIRKRPLIETNGETGEIVWDKGRDFATVRKVLSMPQVNIVKKTEVQTGGFSKESILPKRNSDKLIARKKDWDPKKYGGFD | |
| | SPTVAYSVLVVAKVEKGKSKKLKSVKELLGITIMERSSFEKNPIDFLEAKGYKEVKKDLIIKLPKYSLFELENGRKRMLASAGELQKGNELALPSKYVNFLYLASHY | |
| | EKLKGSPEDNEQKQLFVEQHKHYLDEIIEQISEFSKRVILADANLDKVLSAYNKHRDKPIREQAENIIHLFTLTNLGAPAAFKYFDTTIDRKRYTSTKEVLDATLIH | |
| | QSITGLYETRIDLSQLGGDAEAAAKEAAAKEAAAKEAAAKALEAEAAAKEAAAKEAAAKEAAAKAMASNFTQFVLVDNGGTGDVTVAPSNFANGIAEWIS | |
| | SNSRSQAYKVTCSVRQSSAQNRKYTIKVEVPKGAWRSYLNMELTIPIFATNSDCELIVKAMQGLLKDGNPIPSAIAANSGIYGGSGGSMASNFTQFVLVDNG | |
| | GTGDVTVAPSNFANGIAEWISSNSRSQAYKVTCSVRQSSAQNRKYTIKVEVPKGAWRSYLNMELTIPIFATNSDCELIVKAMQGLLKDGNPIPSAIAANSGIY | |
| | GGGSGGGSGGGSGGGSMASNFTQFVLVDNGGTGDVTVAPSNFANGIAEWISSNSRSQAYKVTCSVRQSSAQNRKYTIKVEVPKGAWRSYLNMELTIPIF | |
| | ATNSDCELIVKAMQGLLKDGNPIPSAIAANSGIYGGSGGSMASNFTQFVLVDNGGTGDVTVAPSNFANGIAEWISSNSRSQAYKVTCSVRQSSAQNRKYTI | |
| | KVEVPKGAWRSYLNMELTIPIFATNSDCELIVKAMQGLLKDGNPIPSAIAANSGIYSGGSSGGSSGSETPGTSESATPESSGGSSGGSSTAPLEEEYRLFLEAPI | |
| | QNVTLLEQWKREIPKVWAEINPPGLASTQAPIHVQLLSTALPVRVRQYPITLEAKRSLRETIRKFRAAGILRPVHSPWNTPLLPVRKSGTSEYRMVQDLREVN | |
| | KRVETIHPTVPNPYTLLSLLPPDRIWYSVLDLKDAFFCIPLAPESQLIFAFEWADAEEGESGQLTWTRLPQGFKNSPTLFNEALNRDLQGFRLDHPSVSLLQYV | |
| | DDLLIAADTQAACLSATRDLLMTLAELGYRVSGKKAQLCQEEVTYLGFKIHKGSRSLSNSRTQAILQIPVPKTKRQVREFLGKIGYCRLFIPGFAELAQPLYAAT | |
| | RPGNDPLVWGEKEEEAFQSLKLALTQPPALALPSLDKPFQLFVEETSGAAKGVLTQALGPWKRPVAYLSKRLDPVAAGWPRCLRAIAAAALLTREASKLTFG | |
| | QDIEITSSHNLESLLRSPPDKWLTNARITQYQVLLLDPPRVRFKQTAALNPATLLPETDDTLPIHHCLDTLDSLTSTRPDLTDQPLAQAEATLFTDGSSYIRDGKR | |
| | YAGAAVVTLDSVIWAEPLPIGTSAQKAELIALTKALEWSKDKSVNIYTDSRYAFATLHVHGMIYRERGWLTAGGKAIKNAPEILALLTAVWLPKRVAVMHCK | |
| | GHQKDDAPTSTGNRRADEVAREVAIRPLSTQATISKRTADGSEFESPKKKAKVE | |
| PL11951 | MPAAKRVKLDGGDKKYSIGLDIGTNSVGWAVITDEYKVPSKKFKVLGNTDRHSIKKNLIGALLFDSGETAEATRLKRTARRRYTRRKNRICYLQEIFSNEMAKV | 16,011 |
| | DDSFFHRLEESFLVEEDKKHERHPIFGNIVDEVAYHEKYPTIYHLRKKLVDSTDKADLRLIYLALAHMIKFRGHFLIEGDLNPDNSDVDKLFIQLVQTYNQLFEE | |
| | NPINASGVDAKAILSARLSKSRRLENLIAQLPGEKKNGLFGNLIALSLGLTPNFKSNFDLAEDAKLQLSKDTYDDDLDNLLAQIGDQYADLFLAAKNLSDAILLS | |
| | DILRVNTEITKAPLSASMIKRYDEHHQDLTLLKALVRQQLPEKYKEIFFDQSKNGYAGYIDGGASQEEFYKFIKPILEKMDGTEELLVKLNREDLLRKQRTFDNG | |
| | SIPHQIHLGELHAILRRQEDFYPFLKDNREKIEKILTFRIPYYVGPLARGNSRFAWMTRKSEETITPWNFEEVVDKGASAQSFIERMTNFDKNLPNEKVLPKHSL | |
| | LYEYFTVYNELTKVKYVTEGMRKPAFLSGEQKKAIVDLLFKTNRKVTVKQLKEDYFKKIECFDSVEISGVEDRFNASLGTYHDLLKIIKDKDFLDNEENEDILEDIV | |
| | LTLTLFEDREMIEERLKTYAHLFDDKVMKQLKRRRYTGWGRLSRKLINGIRDKQSGKTILDFLKSDGFANRNFMQLIHDDSLTFKEDIQKAQVSGQGDSLHE | |
| | HIANLAGSPAIKKGILQTVKVVDELVKVMGRHKPENIVIEMARENQTTQKGQKNSRERMKRIEEGIKELGSQILKEHPVENTQLQNEKLYLYYLQNGRDMYV | |
| | DQELDINRLSDYDVDHIVPQSFLKDDSIDNKVLTRSDKARGKSDNVPSEEVVKKMKNYWRQLLNAKLITQRKFDNLTKAERGGLSELDKAGFIKRQLVETRQI | |
| | TKHVAQILDSRMNTKYDENDKLIREVKVITLKSKLVSDFRKDFQFYKVREINNYHHAHDAYLNAVVGTALIKKYPKLESEFVYGDYKVYDVRKMIAKSEQEIGK | |
| | ATAKYFFYSNIMNFFKTEITLANGEIRKRPLIETNGETGEIVWDKGRDFATVRKVLSMPQVNIVKKTEVQTGGFSKESILPKRNSDKLIARKKDWDPKKYGGFD | |
| | SPTVAYSVLVVAKVEKGKSKKLKSVKELLGITIMERSSFEKNPIDFLEAKGYKEVKKDLIIKLPKYSLFELENGRKRMLASAGELQKGNELALPSKYVNFLYLASHY | |
| | EKLKGSPEDNEQKQLFVEQHKHYLDEIIEQISEFSKRVILADANLDKVLSAYNKHRDKPIREQAENIIHLFTLTNLGAPAAFKYFDTTIDRKRYTSTKEVLDATLIH | |
| | QSITGLYETRIDLSQLGGDAEAAAKEAAAKEAAAKEAAAKALEAEAAAKEAAAKEAAAKEAAAKAMASNFTQFVLVDNGGTGDVTVAPSNFANGIAEWIS | |
| | SNSRSQAYKVTCSVRQSSAQNRKYTIKVEVPKGAWRSYLNMELTIPIFATNSDCELIVKAMQGLLKDGNPIPSAIAANSGIYGGSGGSMASNFTQFVLVDNG | |
| | GTGDVTVAPSNFANGIAEWISSNSRSQAYKVTCSVRQSSAQNRKYTIKVEVPKGAWRSYLNMELTIPIFATNSDCELIVKAMQGLLKDGNPIPSAIAANSGIY | |
| | GGGSGGGSGGGSGGGSMASNFTQFVLVDNGGTGDVTVAPSNFANGIAEWISSNSRSQAYKVTCSVRQSSAQNRKYTIKVEVPKGAWRSYLNMELTIPIF | |
| | ATNSDCELIVKAMQGLLKDGNPIPSAIAANSGIYGGSGGSMASNFTQFVLVDNGGTGDVTVAPSNFANGIAEWISSNSRSQAYKVTCSVRQSSAQNRKYTI | |
| | KVEVPKGAWRSYLNMELTIPIFATNSDCELIVKAMQGLLKDGNPIPSAIAANSGIYGSSGSSGSSGSSGSSGSSTAPLEEEYRLFLEAPIQNVTLLEQWKREIPK | |
| | VWAEINPPGLASTQAPIHVQLLSTALPVRVRQYPITLEAKRSLRETIRKFRAAGILRPVHSPWNTPLLPVRKSGTSEYRMVQDLREVNKRVETIHPTVPNPYTL | |
| | LSLLPPDRIWYSVLDLKDAFFCIPLAPESQLIFAFEWADAEEGESGQLTWTRLPQGFKNSPTLFNEALNRDLQGFRLDHPSVSLLQYVDDLLIAADTQAACLSA | |
| | TRDLLMTLAELGYRVSGKKAQLCQEEVTYLGFKIHKGSRSLSNSRTQAILQIPVPKTKRQVREFLGKIGYCRLFIPGFAELAQPLYAATRPGNDPLVWGEKEEE | |
| | AFQSLKLALTQPPALALPSLDKPFQLFVEETSGAAKGVLTQALGPWKRPVAYLSKRLDPVAAGWPRCLRAIAAAALLTREASKLTFGQDIEITSSHNLESLLRSP | |
| | PDKWLTNARITQYQVLLLDPPRVRFKQTAALNPATLLPETDDTLPIHHCLDTLDSLTSTRPDLTDQPLAQAEATLFTDGSSYIRDGKRYAGAAVVTLDSVIWA | |
| | EPLPIGTSAQKAELIALTKALEWSKDKSVNIYTDSRYAFATLHVHGMIYRERGWLTAGGKAIKNAPEILALLTAVWLPKRVAVMHCKGHQKDDAPTSTGNRR | |
| | ADEVAREVAIRPLSTQATISKRTADGSEFESPKKKAKVE | |
| PL11952 | MPAAKRVKLDGGDKKYSIGLDIGTNSVGWAVITDEYKVPSKKFKVLGNTDRHSIKKNLIGALLFDSGETAEATRLKRTARRRYTRRKNRICYLQEIFSNEMAKV | 16,012 |
| | DDSFFHRLEESFLVEEDKKHERHPIFGNIVDEVAYHEKYPTIYHLRKKLVDSTDKADLRLIYLALAHMIKFRGHFLIEGDLNPDNSDVDKLFIQLVQTYNQLFEE | |
| | NPINASGVDAKAILSARLSKSRRLENLIAQLPGEKKNGLFGNLIALSLGLTPNFKSNFDLAEDAKLQLSKDTYDDDLDNLLAQIGDQYADLFLAAKNLSDAILLS | |
| | DILRVNTEITKAPLSASMIKRYDEHHQDLTLLKALVRQQLPEKYKEIFFDQSKNGYAGYIDGGASQEEFYKFIKPILEKMDGTEELLVKLNREDLLRKQRTFDNG | |
| | SIPHQIHLGELHAILRRQEDFYPFLKDNREKIEKILTFRIPYYVGPLARGNSRFAWMTRKSEETITPWNFEEVVDKGASAQSFIERMTNFDKNLPNEKVLPKHSL | |
| | LYEYFTVYNELTKVKYVTEGMRKPAFLSGEQKKAIVDLLFKTNRKVTVKQLKEDYFKKIECFDSVEISGVEDRFNASLGTYHDLLKIIKDKDFLDNEENEDILEDIV | |
| | LTLTLFEDREMIEERLKTYAHLFDDKVMKQLKRRRYTGWGRLSRKLINGIRDKQSGKTILDFLKSDGFANRNFMQLIHDDSLTFKEDIQKAQVSGQGDSLHE | |
| | HIANLAGSPAIKKGILQTVKVVDELVKVMGRHKPENIVIEMARENQTTQKGQKNSRERMKRIEEGIKELGSQILKEHPVENTQLQNEKLYLYYLQNGRDMYV | |
| | DQELDINRLSDYDVDHIVPQSFLKDDSIDNKVLTRSDKARGKSDNVPSEEVVKKMKNYWRQLLNAKLITQRKFDNLTKAERGGLSELDKAGFIKRQLVETRQI | |
| | TKHVAQILDSRMNTKYDENDKLIREVKVITLKSKLVSDFRKDFQFYKVREINNYHHAHDAYLNAVVGTALIKKYPKLESEFVYGDYKVYDVRKMIAKSEQEIGK | |
| | ATAKYFFYSNIMNFFKTEITLANGEIRKRPLIETNGETGEIVWDKGRDFATVRKVLSMPQVNIVKKTEVQTGGFSKESILPKRNSDKLIARKKDWDPKKYGGFD | |
| | SPTVAYSVLVVAKVEKGKSKKLKSVKELLGITIMERSSFEKNPIDFLEAKGYKEVKKDLIIKLPKYSLFELENGRKRMLASAGELQKGNELALPSKYVNFLYLASHY | |
| | EKLKGSPEDNEQKQLFVEQHKHYLDEIIEQISEFSKRVILADANLDKVLSAYNKHRDKPIREQAENIIHLFTLTNLGAPAAFKYFDTTIDRKRYTSTKEVLDATLIH | |
| | QSITGLYETRIDLSQLGGDAEAAAKEAAAKEAAAKEAAAKALEAEAAAKEAAAKEAAAKEAAAKAMASNFTQFVLVDNGGTGDVTVAPSNFANGIAEWIS | |
| | SNSRSQAYKVTCSVRQSSAQNRKYTIKVEVPKGAWRSYLNMELTIPIFATNSDCELIVKAMQGLLKDGNPIPSAIAANSGIYGGSGGSMASNFTQFVLVDNG | |
| | GTGDVTVAPSNFANGIAEWISSNSRSQAYKVTCSVRQSSAQNRKYTIKVEVPKGAWRSYLNMELTIPIFATNSDCELIVKAMQGLLKDGNPIPSAIAANSGIY | |
| | GGGSGGGSGGGSGGGSMASNFTQFVLVDNGGTGDVTVAPSNFANGIAEWISSNSRSQAYKVTCSVRQSSAQNRKYTIKVEVPKGAWRSYLNMELTIPIF | |
| | ATNSDCELIVKAMQGLLKDGNPIPSAIAANSGIYGGSGGSMASNFTQFVLVDNGGTGDVTVAPSNFANGIAEWISSNSRSQAYKVTCSVRQSSAQNRKYTI | |
| | KVEVPKGAWRSYLNMELTIPIFATNSDCELIVKAMQGLLKDGNPIPSAIAANSGIYGSSGGGEAAAKTAPLEEEYRLFLEAPIQNVTLLEQWKREIPKVWAEIN | |
| | PPGLASTQAPIHVQLLSTALPVRVRQYPITLEAKRSLRETIRKFRAAGILRPVHSPWNTPLLPVRKSGTSEYRMVQDLREVNKRVETIHPTVPNPYTLLSLLPPD | |
| | RIWYSVLDLKDAFFCIPLAPESQLIFAFEWADAEEGESGQLTWTRLPQGFKNSPTLFNEALNRDLQGFRLDHPSVSLLQYVDDLLIAADTQAACLSATRDLLM | |
| | TLAELGYRVSGKKAQLCQEEVTYLGFKIHKGSRSLSNSRTQAILQIPVPKTKRQVREFLGKIGYCRLFIPGFAELAQPLYAATRPGNDPLVWGEKEEEAFQSLKL | |
| | ALTQPPALALPSLDKPFQLFVEETSGAAKGVLTQALGPWKRPVAYLSKRLDPVAAGWPRCLRAIAAAALLTREASKLTFGQDIEITSSHNLESLLRSPPDKWLT | |
| | NARITQYQVLLLDPPRVRFKQTAALNPATLLPETDDTLPIHHCLDTLDSLTSTRPDLTDQPLAQAEATLFTDGSSYIRDGKRYAGAAVVTLDSVIWAEPLPIGTS | |
| | AQKAELIALTKALEWSKDKSVNIYTDSRYAFATLHVHGMIYRERGWLTAGGKAIKNAPEILALLTAVWLPKRVAVMHCKGHQKDDAPTSTGNRRADEVAR | |
| | EVAIRPLSTQATISKRTADGSEFESPKKKAKVE | |
| PL11953 | MPAAKRVKLDGGDKKYSIGLDIGTNSVGWAVITDEYKVPSKKFKVLGNTDRHSIKKNLIGALLFDSGETAEATRLKRTARRRYTRRKNRICYLQEIFSNEMAKV | 16,013 |
| | DDSFFHRLEESFLVEEDKKHERHPIFGNIVDEVAYHEKYPTIYHLRKKLVDSTDKADLRLIYLALAHMIKFRGHFLIEGDLNPDNSDVDKLFIQLVQTYNQLFEE | |
| | NPINASGVDAKAILSARLSKSRRLENLIAQLPGEKKNGLFGNLIALSLGLTPNFKSNFDLAEDAKLQLSKDTYDDDLDNLLAQIGDQYADLFLAAKNLSDAILLS | |
| | DILRVNTEITKAPLSASMIKRYDEHHQDLTLLKALVRQQLPEKYKEIFFDQSKNGYAGYIDGGASQEEFYKFIKPILEKMDGTEELLVKLNREDLLRKQRTFDNG | |
| | SIPHQIHLGELHAILRRQEDFYPFLKDNREKIEKILTFRIPYYVGPLARGNSRFAWMTRKSEETITPWNFEEVVDKGASAQSFIERMTNFDKNLPNEKVLPKHSL | |
| | LYEYFTVYNELTKVKYVTEGMRKPAFLSGEQKKAIVDLLFKTNRKVTVKQLKEDYFKKIECFDSVEISGVEDRFNASLGTYHDLLKIIKDKDFLDNEENEDILEDIV | |
| | LTLTLFEDREMIEERLKTYAHLFDDKVMKQLKRRRYTGWGRLSRKLINGIRDKQSGKTILDFLKSDGFANRNFMQLIHDDSLTFKEDIQKAQVSGQGDSLHE | |
| | HIANLAGSPAIKKGILQTVKVVDELVKVMGRHKPENIVIEMARENQTTQKGQKNSRERMKRIEEGIKELGSQILKEHPVENTQLQNEKLYLYYLQNGRDMYV | |
| | DQELDINRLSDYDVDHIVPQSFLKDDSIDNKVLTRSDKARGKSDNVPSEEVVKKMKNYWRQLLNAKLITQRKFDNLTKAERGGLSELDKAGFIKRQLVETRQI | |
| | TKHVAQILDSRMNTKYDENDKLIREVKVITLKSKLVSDFRKDFQFYKVREINNYHHAHDAYLNAVVGTALIKKYPKLESEFVYGDYKVYDVRKMIAKSEQEIGK | |
| | ATAKYFFYSNIMNFFKTEITLANGEIRKRPLIETNGETGEIVWDKGRDFATVRKVLSMPQVNIVKKTEVQTGGFSKESILPKRNSDKLIARKKDWDPKKYGGFD | |
| | SPTVAYSVLVVAKVEKGKSKKLKSVKELLGITIMERSSFEKNPIDFLEAKGYKEVKKDLIIKLPKYSLFELENGRKRMLASAGELQKGNELALPSKYVNFLYLASHY | |
| | EKLKGSPEDNEQKQLFVEQHKHYLDEIIEQISEFSKRVILADANLDKVLSAYNKHRDKPIREQAENIIHLFTLTNLGAPAAFKYFDTTIDRKRYTSTKEVLDATLIH | |
| | QSITGLYETRIDLSQLGGDSGGSSGGSSGSETPGTSESATPESSGGSSGGSSMASNFTQFVLVDNGGTGDVTVAPSNFANGIAEWISSNSRSQAYKVTCSVR | |
| | QSSAQNRKYTIKVEVPKGAWRSYLNMELTIPIFATNSDCELIVKAMQGLLKDGNPIPSAIAANSGIYAEAAAKEAAAKEAAAKEAAAKALEAEAAAKEAAAKE | |
| | AAAKEAAAKATAPLEEEYRLFLEAPIQNVTLLEQWKREIPKVWAEINPPGLASTQAPIHVQLLSTALPVRVRQYPITLEAKRSLRETIRKFRAAGILRPVHSPWN | |
| | TPLLPVRKSGTSEYRMVQDLREVNKRVETIHPTVPNPYTLLSLLPPDRIWYSVLDLKDAFFCIPLAPESQLIFAFEWADAEEGESGQLTWTRLPQGFKNSPTLF | |
| | NEALNRDLQGFRLDHPSVSLLQYVDDLLIAADTQAACLSATRDLLMTLAELGYRVSGKKAQLCQEEVTYLGFKIHKGSRSLSNSRTQAILQIPVPKTKRQVREF | |
| | LGKIGYCRLFIPGFAELAQPLYAATRPGNDPLVWGEKEEEAFQSLKLALTQPPALALPSLDKPFQLFVEETSGAAKGVLTQALGPWKRPVAYLSKRLDPVAAG | |
| | WPRCLRAIAAAALLTREASKLTFGQDIEITSSHNLESLLRSPPDKWLTNARITQYQVLLLDPPRVRFKQTAALNPATLLPETDDTLPIHHCLDTLDSLTSTRPDLT | |
| | DQPLAQAEATLFTDGSSYIRDGKRYAGAAVVTLDSVIWAEPLPIGTSAQKAELIALTKALEWSKDKSVNIYTDSRYAFATLHVHGMIYRERGWLTAGGKAIKN | |
| | APEILALLTAVWLPKRVAVMHCKGHQKDDAPTSTGNRRADEVAREVAIRPLSTQATISKRTADGSEFESPKKKAKVE | |
| PL11954 | MPAAKRVKLDGGDKKYSIGLDIGTNSVGWAVITDEYKVPSKKFKVLGNTDRHSIKKNLIGALLFDSGETAEATRLKRTARRRYTRRKNRICYLQEIFSNEMAKV | 16,014 |
| | DDSFFHRLEESFLVEEDKKHERHPIFGNIVDEVAYHEKYPTIYHLRKKLVDSTDKADLRLIYLALAHMIKFRGHFLIEGDLNPDNSDVDKLFIQLVQTYNQLFEE | |
| | NPINASGVDAKAILSARLSKSRRLENLIAQLPGEKKNGLFGNLIALSLGLTPNFKSNFDLAEDAKLQLSKDTYDDDLDNLLAQIGDQYADLFLAAKNLSDAILLS | |
| | DILRVNTEITKAPLSASMIKRYDEHHQDLTLLKALVRQQLPEKYKEIFFDQSKNGYAGYIDGGASQEEFYKFIKPILEKMDGTEELLVKLNREDLLRKQRTFDNG | |
| | SIPHQIHLGELHAILRRQEDFYPFLKDNREKIEKILTFRIPYYVGPLARGNSRFAWMTRKSEETITPWNFEEVVDKGASAQSFIERMTNFDKNLPNEKVLPKHSL | |
| | LYEYFTVYNELTKVKYVTEGMRKPAFLSGEQKKAIVDLLFKTNRKVTVKQLKEDYFKKIECFDSVEISGVEDRFNASLGTYHDLLKIIKDKDFLDNEENEDILEDIV | |
| | LTLTLFEDREMIEERLKTYAHLFDDKVMKQLKRRRYTGWGRLSRKLINGIRDKQSGKTILDFLKSDGFANRNFMQLIHDDSLTFKEDIQKAQVSGQGDSLHE | |
| | HIANLAGSPAIKKGILQTVKVVDELVKVMGRHKPENIVIEMARENQTTQKGQKNSRERMKRIEEGIKELGSQILKEHPVENTQLQNEKLYLYYLQNGRDMYV | |
| | DQELDINRLSDYDVDHIVPQSFLKDDSIDNKVLTRSDKARGKSDNVPSEEVVKKMKNYWRQLLNAKLITQRKFDNLTKAERGGLSELDKAGFIKRQLVETRQI | |
| | TKHVAQILDSRMNTKYDENDKLIREVKVITLKSKLVSDFRKDFQFYKVREINNYHHAHDAYLNAVVGTALIKKYPKLESEFVYGDYKVYDVRKMIAKSEQEIGK | |
| | ATAKYFFYSNIMNFFKTEITLANGEIRKRPLIETNGETGEIVWDKGRDFATVRKVLSMPQVNIVKKTEVQTGGFSKESILPKRNSDKLIARKKDWDPKKYGGFD | |
| | SPTVAYSVLVVAKVEKGKSKKLKSVKELLGITIMERSSFEKNPIDFLEAKGYKEVKKDLIIKLPKYSLFELENGRKRMLASAGELQKGNELALPSKYVNFLYLASHY | |
| | EKLKGSPEDNEQKQLFVEQHKHYLDEIIEQISEFSKRVILADANLDKVLSAYNKHRDKPIREQAENIIHLFTLTNLGAPAAFKYFDTTIDRKRYTSTKEVLDATLIH | |
| | QSITGLYETRIDLSQLGGDSGGSSGGSSGSETPGTSESATPESSGGSSGGSSMASNFTQFVLVDNGGTGDVTVAPSNFANGIAEWISSNSRSQAYKVTCSVR | |
| | QSSAQNRKYTIKVEVPKGAWRSYLNMELTIPIFATNSDCELIVKAMQGLLKDGNPIPSAIAANSGIYSGGSSGGSSGSETPGTSESATPESSGGSSGGSSTAPL | |
| | EEEYRLFLEAPIQNVTLLEQWKREIPKVWAEINPPGLASTQAPIHVQLLSTALPVRVRQYPITLEAKRSLRETIRKFRAAGILRPVHSPWNTPLLPVRKSGTSEYR | |
| | MVQDLREVNKRVETIHPTVPNPYTLLSLLPPDRIWYSVLDLKDAFFCIPLAPESQLIFAFEWADAEEGESGQLTWTRLPQGFKNSPTLFNEALNRDLQGFRLD | |
| | HPSVSLLQYVDDLLIAADTQAACLSATRDLLMTLAELGYRVSGKKAQLCQEEVTYLGFKIHKGSRSLSNSRTQAILQIPVPKTKRQVREFLGKIGYCRLFIPGFAE | |
| | LAQPLYAATRPGNDPLVWGEKEEEAFQSLKLALTQPPALALPSLDKPFQLFVEETSGAAKGVLTQALGPWKRPVAYLSKRLDPVAAGWPRCLRAIAAAALLT | |
| | REASKLTFGQDIEITSSHNLESLLRSPPDKWLTNARITQYQVLLLDPPRVRFKQTAALNPATLLPETDDTLPIHHCLDTLDSLTSTRPDLTDQPLAQAEATLFTD | |
| | GSSYIRDGKRYAGAAVVTLDSVIWAEPLPIGTSAQKAELIALTKALEWSKDKSVNIYTDSRYAFATLHVHGMIYRERGWLTAGGKAIKNAPEILALLTAVWLPK | |
| | RVAVMHCKGHQKDDAPTSTGNRRADEVAREVAIRPLSTQATISKRTADGSEFESPKKKAKVE | |
| PL11955 | MPAAKRVKLDGGDKKYSIGLDIGTNSVGWAVITDEYKVPSKKFKVLGNTDRHSIKKNLIGALLFDSGETAEATRLKRTARRRYTRRKNRICYLQEIFSNEMAKV | 16,015 |
| | DDSFFHRLEESFLVEEDKKHERHPIFGNIVDEVAYHEKYPTIYHLRKKLVDSTDKADLRLIYLALAHMIKFRGHFLIEGDLNPDNSDVDKLFIQLVQTYNQLFEE | |
| | NPINASGVDAKAILSARLSKSRRLENLIAQLPGEKKNGLFGNLIALSLGLTPNFKSNFDLAEDAKLQLSKDTYDDDLDNLLAQIGDQYADLFLAAKNLSDAILLS | |
| | DILRVNTEITKAPLSASMIKRYDEHHQDLTLLKALVRQQLPEKYKEIFFDQSKNGYAGYIDGGASQEEFYKFIKPILEKMDGTEELLVKLNREDLLRKQRTFDNG | |
| | SIPHQIHLGELHAILRRQEDFYPFLKDNREKIEKILTFRIPYYVGPLARGNSRFAWMTRKSEETITPWNFEEVVDKGASAQSFIERMTNFDKNLPNEKVLPKHSL | |
| | LYEYFTVYNELTKVKYVTEGMRKPAFLSGEQKKAIVDLLFKTNRKVTVKQLKEDYFKKIECFDSVEISGVEDRFNASLGTYHDLLKIIKDKDFLDNEENEDILEDIV | |
| | LTLTLFEDREMIEERLKTYAHLFDDKVMKQLKRRRYTGWGRLSRKLINGIRDKQSGKTILDFLKSDGFANRNFMQLIHDDSLTFKEDIQKAQVSGQGDSLHE | |
| | HIANLAGSPAIKKGILQTVKVVDELVKVMGRHKPENIVIEMARENQTTQKGQKNSRERMKRIEEGIKELGSQILKEHPVENTQLQNEKLYLYYLQNGRDMYV | |
| | DQELDINRLSDYDVDHIVPQSFLKDDSIDNKVLTRSDKARGKSDNVPSEEVVKKMKNYWRQLLNAKLITQRKFDNLTKAERGGLSELDKAGFIKRQLVETRQI | |
| | TKHVAQILDSRMNTKYDENDKLIREVKVITLKSKLVSDFRKDFQFYKVREINNYHHAHDAYLNAVVGTALIKKYPKLESEFVYGDYKVYDVRKMIAKSEQEIGK | |
| | ATAKYFFYSNIMNFFKTEITLANGEIRKRPLIETNGETGEIVWDKGRDFATVRKVLSMPQVNIVKKTEVQTGGFSKESILPKRNSDKLIARKKDWDPKKYGGFD | |
| | SPTVAYSVLVVAKVEKGKSKKLKSVKELLGITIMERSSFEKNPIDFLEAKGYKEVKKDLIIKLPKYSLFELENGRKRMLASAGELQKGNELALPSKYVNFLYLASHY | |
| | EKLKGSPEDNEQKQLFVEQHKHYLDEIIEQISEFSKRVILADANLDKVLSAYNKHRDKPIREQAENIIHLFTLTNLGAPAAFKYFDTTIDRKRYTSTKEVLDATLIH | |
| | QSITGLYETRIDLSQLGGDSGGSSGGSSGSETPGTSESATPESSGGSSGGSSMASNFTQFVLVDNGGTGDVTVAPSNFANGIAEWISSNSRSQAYKVTCSVR | |
| | QSSAQNRKYTIKVEVPKGAWRSYLNMELTIPIFATNSDCELIVKAMQGLLKDGNPIPSAIAANSGIYGSSGSSGSSGSSGSSGSSTAPLEEEYRLFLEAPIQNVT | |
| | LLEQWKREIPKVWAEINPPGLASTQAPIHVQLLSTALPVRVRQYPITLEAKRSLRETIRKFRAAGILRPVHSPWNTPLLPVRKSGTSEYRMVQDLREVNKRVET | |
| | IHPTVPNPYTLLSLLPPDRIWYSVLDLKDAFFCIPLAPESQLIFAFEWADAEEGESGQLTWTRLPQGFKNSPTLFNEALNRDLQGFRLDHPSVSLLQYVDDLLIA | |
| | ADTQAACLSATRDLLMTLAELGYRVSGKKAQLCQEEVTYLGFKIHKGSRSLSNSRTQAILQIPVPKTKRQVREFLGKIGYCRLFIPGFAELAQPLYAATRPGND | |
| | PLVWGEKEEEAFQSLKLALTQPPALALPSLDKPFQLFVEETSGAAKGVLTQALGPWKRPVAYLSKRLDPVAAGWPRCLRAIAAAALLTREASKLTFGQDIEITS | |
| | SHNLESLLRSPPDKWLTNARITQYQVLLLDPPRVRFKQTAALNPATLLPETDDTLPIHHCLDTLDSLTSTRPDLTDQPLAQAEATLFTDGSSYIRDGKRYAGAA | |
| | VVTLDSVIWAEPLPIGTSAQKAELIALTKALEWSKDKSVNIYTDSRYAFATLHVHGMIYRERGWLTAGGKAIKNAPEILALLTAVWLPKRVAVMHCKGHQKD | |
| | DAPTSTGNRRADEVAREVAIRPLSTQATISKRTADGSEFESPKKKAKVE | |
| PL11956 | MPAAKRVKLDGGDKKYSIGLDIGTNSVGWAVITDEYKVPSKKFKVLGNTDRHSIKKNLIGALLFDSGETAEATRLKRTARRRYTRRKNRICYLQEIFSNEMAKV | 16,016 |
| | DDSFFHRLEESFLVEEDKKHERHPIFGNIVDEVAYHEKYPTIYHLRKKLVDSTDKADLRLIYLALAHMIKFRGHFLIEGDLNPDNSDVDKLFIQLVQTYNQLFEE | |
| | NPINASGVDAKAILSARLSKSRRLENLIAQLPGEKKNGLFGNLIALSLGLTPNFKSNFDLAEDAKLQLSKDTYDDDLDNLLAQIGDQYADLFLAAKNLSDAILLS | |
| | DILRVNTEITKAPLSASMIKRYDEHHQDLTLLKALVRQQLPEKYKEIFFDQSKNGYAGYIDGGASQEEFYKFIKPILEKMDGTEELLVKLNREDLLRKQRTFDNG | |
| | SIPHQIHLGELHAILRRQEDFYPFLKDNREKIEKILTFRIPYYVGPLARGNSRFAWMTRKSEETITPWNFEEVVDKGASAQSFIERMTNFDKNLPNEKVLPKHSL | |
| | LYEYFTVYNELTKVKYVTEGMRKPAFLSGEQKKAIVDLLFKTNRKVTVKQLKEDYFKKIECFDSVEISGVEDRFNASLGTYHDLLKIIKDKDFLDNEENEDILEDIV | |
| | LTLTLFEDREMIEERLKTYAHLFDDKVMKQLKRRRYTGWGRLSRKLINGIRDKQSGKTILDFLKSDGFANRNFMQLIHDDSLTFKEDIQKAQVSGQGDSLHE | |
| | HIANLAGSPAIKKGILQTVKVVDELVKVMGRHKPENIVIEMARENQTTQKGQKNSRERMKRIEEGIKELGSQILKEHPVENTQLQNEKLYLYYLQNGRDMYV | |
| | DQELDINRLSDYDVDHIVPQSFLKDDSIDNKVLTRSDKARGKSDNVPSEEVVKKMKNYWRQLLNAKLITQRKFDNLTKAERGGLSELDKAGFIKRQLVETRQI | |
| | TKHVAQILDSRMNTKYDENDKLIREVKVITLKSKLVSDFRKDFQFYKVREINNYHHAHDAYLNAVVGTALIKKYPKLESEFVYGDYKVYDVRKMIAKSEQEIGK | |
| | ATAKYFFYSNIMNFFKTEITLANGEIRKRPLIETNGETGEIVWDKGRDFATVRKVLSMPQVNIVKKTEVQTGGFSKESILPKRNSDKLIARKKDWDPKKYGGFD | |
| | SPTVAYSVLVVAKVEKGKSKKLKSVKELLGITIMERSSFEKNPIDFLEAKGYKEVKKDLIIKLPKYSLFELENGRKRMLASAGELQKGNELALPSKYVNFLYLASHY | |
| | EKLKGSPEDNEQKQLFVEQHKHYLDEIIEQISEFSKRVILADANLDKVLSAYNKHRDKPIREQAENIIHLFTLTNLGAPAAFKYFDTTIDRKRYTSTKEVLDATLIH | |
| | QSITGLYETRIDLSQLGGDSGGSSGGSSGSETPGTSESATPESSGGSSGGSSMASNFTQFVLVDNGGTGDVTVAPSNFANGIAEWISSNSRSQAYKVTCSVR | |
| | QSSAQNRKYTIKVEVPKGAWRSYLNMELTIPIFATNSDCELIVKAMQGLLKDGNPIPSAIAANSGIYGSSGGGEAAAKTAPLEEEYRLFLEAPIQNVTLLEQWK | |
| | REIPKVWAEINPPGLASTQAPIHVQLLSTALPVRVRQYPITLEAKRSLRETIRKFRAAGILRPVHSPWNTPLLPVRKSGTSEYRMVQDLREVNKRVETIHPTVP | |
| | NPYTLLSLLPPDRIWYSVLDLKDAFFCIPLAPESQLIFAFEWADAEEGESGQLTWTRLPQGFKNSPTLFNEALNRDLQGFRLDHPSVSLLQYVDDLLIAADTQA | |
| | ACLSATRDLLMTLAELGYRVSGKKAQLCQEEVTYLGFKIHKGSRSLSNSRTQAILQIPVPKTKRQVREFLGKIGYCRLFIPGFAELAQPLYAATRPGNDPLVWG | |
| | EKEEEAFQSLKLALTQPPALALPSLDKPFQLFVEETSGAAKGVLTQALGPWKRPVAYLSKRLDPVAAGWPRCLRAIAAAALLTREASKLTFGQDIEITSSHNLES | |
| | LLRSPPDKWLTNARITQYQVLLLDPPRVRFKQTAALNPATLLPETDDTLPIHHCLDTLDSLTSTRPDLTDQPLAQAEATLFTDGSSYIRDGKRYAGAAVVTLDS | |
| | VIWAEPLPIGTSAQKAELIALTKALEWSKDKSVNIYTDSRYAFATLHVHGMIYRERGWLTAGGKAIKNAPEILALLTAVWLPKRVAVMHCKGHQKDDAPTST | |
| | GNRRADEVAREVAIRPLSTQATISKRTADGSEFESPKKKAKVE | |
| PL11957 | MPAAKRVKLDGGDKKYSIGLDIGTNSVGWAVITDEYKVPSKKFKVLGNTDRHSIKKNLIGALLFDSGETAEATRLKRTARRRYTRRKNRICYLQEIFSNEMAKV | 16,017 |
| | DDSFFHRLEESFLVEEDKKHERHPIFGNIVDEVAYHEKYPTIYHLRKKLVDSTDKADLRLIYLALAHMIKFRGHFLIEGDLNPDNSDVDKLFIQLVQTYNQLFEE | |
| | NPINASGVDAKAILSARLSKSRRLENLIAQLPGEKKNGLFGNLIALSLGLTPNFKSNFDLAEDAKLQLSKDTYDDDLDNLLAQIGDQYADLFLAAKNLSDAILLS | |
| | DILRVNTEITKAPLSASMIKRYDEHHQDLTLLKALVRQQLPEKYKEIFFDQSKNGYAGYIDGGASQEEFYKFIKPILEKMDGTEELLVKLNREDLLRKQRTFDNG | |
| | SIPHQIHLGELHAILRRQEDFYPFLKDNREKIEKILTFRIPYYVGPLARGNSRFAWMTRKSEETITPWNFEEVVDKGASAQSFIERMTNFDKNLPNEKVLPKHSL | |
| | LYEYFTVYNELTKVKYVTEGMRKPAFLSGEQKKAIVDLLFKTNRKVTVKQLKEDYFKKIECFDSVEISGVEDRFNASLGTYHDLLKIIKDKDFLDNEENEDILEDIV | |
| | LTLTLFEDREMIEERLKTYAHLFDDKVMKQLKRRRYTGWGRLSRKLINGIRDKQSGKTILDFLKSDGFANRNFMQLIHDDSLTFKEDIQKAQVSGQGDSLHE | |
| | HIANLAGSPAIKKGILQTVKVVDELVKVMGRHKPENIVIEMARENQTTQKGQKNSRERMKRIEEGIKELGSQILKEHPVENTQLQNEKLYLYYLQNGRDMYV | |
| | DQELDINRLSDYDVDHIVPQSFLKDDSIDNKVLTRSDKARGKSDNVPSEEVVKKMKNYWRQLLNAKLITQRKFDNLTKAERGGLSELDKAGFIKRQLVETRQI | |
| | TKHVAQILDSRMNTKYDENDKLIREVKVITLKSKLVSDFRKDFQFYKVREINNYHHAHDAYLNAVVGTALIKKYPKLESEFVYGDYKVYDVRKMIAKSEQEIGK | |
| | ATAKYFFYSNIMNFFKTEITLANGEIRKRPLIETNGETGEIVWDKGRDFATVRKVLSMPQVNIVKKTEVQTGGFSKESILPKRNSDKLIARKKDWDPKKYGGFD | |
| | SPTVAYSVLVVAKVEKGKSKKLKSVKELLGITIMERSSFEKNPIDFLEAKGYKEVKKDLIIKLPKYSLFELENGRKRMLASAGELQKGNELALPSKYVNFLYLASHY | |
| | EKLKGSPEDNEQKQLFVEQHKHYLDEIIEQISEFSKRVILADANLDKVLSAYNKHRDKPIREQAENIIHLFTLTNLGAPAAFKYFDTTIDRKRYTSTKEVLDATLIH | |
| | QSITGLYETRIDLSQLGGDSGGSSGGSSGSETPGTSESATPESSGGSSGGSSMASNFTQFVLVDNGGTGDVTVAPSNFANGIAEWISSNSRSQAYKVTCSVR | |
| | QSSAQNRKYTIKVEVPKGAWRSYLNMELTIPIFATNSDCELIVKAMQGLLKDGNPIPSAIAANSGIYGGSGGSMASNFTQFVLVDNGGTGDVTVAPSNFAN | |
| | GIAEWISSNSRSQAYKVTCSVRQSSAQNRKYTIKVEVPKGAWRSYLNMELTIPIFATNSDCELIVKAMQGLLKDGNPIPSAIAANSGIYAEAAAKEAAAKEAA | |
| | AKEAAAKALEAEAAAKEAAAKEAAAKEAAAKATAPLEEEYRLFLEAPIQNVTLLEQWKREIPKVWAEINPPGLASTQAPIHVQLLSTALPVRVRQYPITLEAKR | |
| | SLRETIRKFRAAGILRPVHSPWNTPLLPVRKSGTSEYRMVQDLREVNKRVETIHPTVPNPYTLLSLLPPDRIWYSVLDLKDAFFCIPLAPESQLIFAFEWADAEE | |
| | GESGQLTWTRLPQGFKNSPTLFNEALNRDLQGFRLDHPSVSLLQYVDDLLIAADTQAACLSATRDLLMTLAELGYRVSGKKAQLCQEEVTYLGFKIHKGSRSL | |
| | SNSRTQAILQIPVPKTKRQVREFLGKIGYCRLFIPGFAELAQPLYAATRPGNDPLVWGEKEEEAFQSLKLALTQPPALALPSLDKPFQLFVEETSGAAKGVLTQ | |
| | ALGPWKRPVAYLSKRLDPVAAGWPRCLRAIAAAALLTREASKLTFGQDIEITSSHNLESLLRSPPDKWLTNARITQYQVLLLDPPRVRFKQTAALNPATLLPET | |
| | DDTLPIHHCLDTLDSLTSTRPDLTDQPLAQAEATLFTDGSSYIRDGKRYAGAAVVTLDSVIWAEPLPIGTSAQKAELIALTKALEWSKDKSVNIYTDSRYAFATL | |
| | HVHGMIYRERGWLTAGGKAIKNAPEILALLTAVWLPKRVAVMHCKGHQKDDAPTSTGNRRADEVAREVAIRPLSTQATISKRTADGSEFESPKKKAKVE | |
| PL11958 | MPAAKRVKLDGGDKKYSIGLDIGTNSVGWAVITDEYKVPSKKFKVLGNTDRHSIKKNLIGALLFDSGETAEATRLKRTARRRYTRRKNRICYLQEIFSNEMAKV | 16,018 |
| | DDSFFHRLEESFLVEEDKKHERHPIFGNIVDEVAYHEKYPTIYHLRKKLVDSTDKADLRLIYLALAHMIKFRGHFLIEGDLNPDNSDVDKLFIQLVQTYNQLFEE | |
| | NPINASGVDAKAILSARLSKSRRLENLIAQLPGEKKNGLFGNLIALSLGLTPNFKSNFDLAEDAKLQLSKDTYDDDLDNLLAQIGDQYADLFLAAKNLSDAILLS | |
| | DILRVNTEITKAPLSASMIKRYDEHHQDLTLLKALVRQQLPEKYKEIFFDQSKNGYAGYIDGGASQEEFYKFIKPILEKMDGTEELLVKLNREDLLRKQRTFDNG | |
| | SIPHQIHLGELHAILRRQEDFYPFLKDNREKIEKILTFRIPYYVGPLARGNSRFAWMTRKSEETITPWNFEEVVDKGASAQSFIERMTNFDKNLPNEKVLPKHSL | |
| | LYEYFTVYNELTKVKYVTEGMRKPAFLSGEQKKAIVDLLFKTNRKVTVKQLKEDYFKKIECFDSVEISGVEDRFNASLGTYHDLLKIIKDKDFLDNEENEDILEDIV | |
| | LTLTLFEDREMIEERLKTYAHLFDDKVMKQLKRRRYTGWGRLSRKLINGIRDKQSGKTILDFLKSDGFANRNFMQLIHDDSLTFKEDIQKAQVSGQGDSLHE | |
| | HIANLAGSPAIKKGILQTVKVVDELVKVMGRHKPENIVIEMARENQTTQKGQKNSRERMKRIEEGIKELGSQILKEHPVENTQLQNEKLYLYYLQNGRDMYV | |
| | DQELDINRLSDYDVDHIVPQSFLKDDSIDNKVLTRSDKARGKSDNVPSEEVVKKMKNYWRQLLNAKLITQRKFDNLTKAERGGLSELDKAGFIKRQLVETRQI | |
| | TKHVAQILDSRMNTKYDENDKLIREVKVITLKSKLVSDFRKDFQFYKVREINNYHHAHDAYLNAVVGTALIKKYPKLESEFVYGDYKVYDVRKMIAKSEQEIGK | |
| | ATAKYFFYSNIMNFFKTEITLANGEIRKRPLIETNGETGEIVWDKGRDFATVRKVLSMPQVNIVKKTEVQTGGFSKESILPKRNSDKLIARKKDWDPKKYGGFD | |
| | SPTVAYSVLVVAKVEKGKSKKLKSVKELLGITIMERSSFEKNPIDFLEAKGYKEVKKDLIIKLPKYSLFELENGRKRMLASAGELQKGNELALPSKYVNFLYLASHY | |
| | EKLKGSPEDNEQKQLFVEQHKHYLDEIIEQISEFSKRVILADANLDKVLSAYNKHRDKPIREQAENIIHLFTLTNLGAPAAFKYFDTTIDRKRYTSTKEVLDATLIH | |
| | QSITGLYETRIDLSQLGGDSGGSSGGSSGSETPGTSESATPESSGGSSGGSSMASNFTQFVLVDNGGTGDVTVAPSNFANGIAEWISSNSRSQAYKVTCSVR | |
| | QSSAQNRKYTIKVEVPKGAWRSYLNMELTIPIFATNSDCELIVKAMQGLLKDGNPIPSAIAANSGIYGGSGGSMASNFTQFVLVDNGGTGDVTVAPSNFAN | |
| | GIAEWISSNSRSQAYKVTCSVRQSSAQNRKYTIKVEVPKGAWRSYLNMELTIPIFATNSDCELIVKAMQGLLKDGNPIPSAIAANSGIYSGGSSGGSSGSETPG | |
| | TSESATPESSGGSSGGSSTAPLEEEYRLFLEAPIQNVTLLEQWKREIPKVWAEINPPGLASTQAPIHVQLLSTALPVRVRQYPITLEAKRSLRETIRKFRAAGILRP | |
| | VHSPWNTPLLPVRKSGTSEYRMVQDLREVNKRVETIHPTVPNPYTLLSLLPPDRIWYSVLDLKDAFFCIPLAPESQLIFAFEWADAEEGESGQLTWTRLPQGF | |
| | KNSPTLFNEALNRDLQGFRLDHPSVSLLQYVDDLLIAADTQAACLSATRDLLMTLAELGYRVSGKKAQLCQEEVTYLGFKIHKGSRSLSNSRTQAILQIPVPKT | |
| | KRQVREFLGKIGYCRLFIPGFAELAQPLYAATRPGNDPLVWGEKEEEAFQSLKLALTQPPALALPSLDKPFQLFVEETSGAAKGVLTQALGPWKRPVAYLSKR | |
| | LDPVAAGWPRCLRAIAAAALLTREASKLTFGQDIEITSSHNLESLLRSPPDKWLTNARITQYQVLLLDPPRVRFKQTAALNPATLLPETDDTLPIHHCLDTLDSL | |
| | TSTRPDLTDQPLAQAEATLFTDGSSYIRDGKRYAGAAVVTLDSVIWAEPLPIGTSAQKAELIALTKALEWSKDKSVNIYTDSRYAFATLHVHGMIYRERGWLT | |
| | AGGKAIKNAPEILALLTAVWLPKRVAVMHCKGHQKDDAPTSTGNRRADEVAREVAIRPLSTQATISKRTADGSEFESPKKKAKVE | |
| PL11959 | MPAAKRVKLDGGDKKYSIGLDIGTNSVGWAVITDEYKVPSKKFKVLGNTDRHSIKKNLIGALLFDSGETAEATRLKRTARRRYTRRKNRICYLQEIFSNEMAKV | 16,019 |
| | DDSFFHRLEESFLVEEDKKHERHPIFGNIVDEVAYHEKYPTIYHLRKKLVDSTDKADLRLIYLALAHMIKFRGHFLIEGDLNPDNSDVDKLFIQLVQTYNQLFEE | |
| | NPINASGVDAKAILSARLSKSRRLENLIAQLPGEKKNGLFGNLIALSLGLTPNFKSNFDLAEDAKLQLSKDTYDDDLDNLLAQIGDQYADLFLAAKNLSDAILLS | |
| | DILRVNTEITKAPLSASMIKRYDEHHQDLTLLKALVRQQLPEKYKEIFFDQSKNGYAGYIDGGASQEEFYKFIKPILEKMDGTEELLVKLNREDLLRKQRTFDNG | |
| | SIPHQIHLGELHAILRRQEDFYPFLKDNREKIEKILTFRIPYYVGPLARGNSRFAWMTRKSEETITPWNFEEVVDKGASAQSFIERMTNFDKNLPNEKVLPKHSL | |
| | LYEYFTVYNELTKVKYVTEGMRKPAFLSGEQKKAIVDLLFKTNRKVTVKQLKEDYFKKIECFDSVEISGVEDRFNASLGTYHDLLKIIKDKDFLDNEENEDILEDIV | |
| | LTLTLFEDREMIEERLKTYAHLFDDKVMKQLKRRRYTGWGRLSRKLINGIRDKQSGKTILDFLKSDGFANRNFMQLIHDDSLTFKEDIQKAQVSGQGDSLHE | |
| | HIANLAGSPAIKKGILQTVKVVDELVKVMGRHKPENIVIEMARENQTTQKGQKNSRERMKRIEEGIKELGSQILKEHPVENTQLQNEKLYLYYLQNGRDMYV | |
| | DQELDINRLSDYDVDHIVPQSFLKDDSIDNKVLTRSDKARGKSDNVPSEEVVKKMKNYWRQLLNAKLITQRKFDNLTKAERGGLSELDKAGFIKRQLVETRQI | |
| | TKHVAQILDSRMNTKYDENDKLIREVKVITLKSKLVSDFRKDFQFYKVREINNYHHAHDAYLNAVVGTALIKKYPKLESEFVYGDYKVYDVRKMIAKSEQEIGK | |
| | ATAKYFFYSNIMNFFKTEITLANGEIRKRPLIETNGETGEIVWDKGRDFATVRKVLSMPQVNIVKKTEVQTGGFSKESILPKRNSDKLIARKKDWDPKKYGGFD | |
| | SPTVAYSVLVVAKVEKGKSKKLKSVKELLGITIMERSSFEKNPIDFLEAKGYKEVKKDLIIKLPKYSLFELENGRKRMLASAGELQKGNELALPSKYVNFLYLASHY | |
| | EKLKGSPEDNEQKQLFVEQHKHYLDEIIEQISEFSKRVILADANLDKVLSAYNKHRDKPIREQAENIIHLFTLTNLGAPAAFKYFDTTIDRKRYTSTKEVLDATLIH | |
| | QSITGLYETRIDLSQLGGDSGGSSGGSSGSETPGTSESATPESSGGSSGGSSMASNFTQFVLVDNGGTGDVTVAPSNFANGIAEWISSNSRSQAYKVTCSVR | |
| | QSSAQNRKYTIKVEVPKGAWRSYLNMELTIPIFATNSDCELIVKAMQGLLKDGNPIPSAIAANSGIYGGSGGSMASNFTQFVLVDNGGTGDVTVAPSNFAN | |
| | GIAEWISSNSRSQAYKVTCSVRQSSAQNRKYTIKVEVPKGAWRSYLNMELTIPIFATNSDCELIVKAMQGLLKDGNPIPSAIAANSGIYGSSGSSGSSGSSGSS | |
| | GSSTAPLEEEYRLFLEAPIQNVTLLEQWKREIPKVWAEINPPGLASTQAPIHVQLLSTALPVRVRQYPITLEAKRSLRETIRKFRAAGILRPVHSPWNTPLLPVRK | |
| | SGTSEYRMVQDLREVNKRVETIHPTVPNPYTLLSLLPPDRIWYSVLDLKDAFFCIPLAPESQLIFAFEWADAEEGESGQLTWTRLPQGFKNSPTLFNEALNRDL | |
| | QGFRLDHPSVSLLQYVDDLLIAADTQAACLSATRDLLMTLAELGYRVSGKKAQLCQEEVTYLGFKIHKGSRSLSNSRTQAILQIPVPKTKRQVREFLGKIGYCRL | |
| | FIPGFAELAQPLYAATRPGNDPLVWGEKEEEAFQSLKLALTQPPALALPSLDKPFQLFVEETSGAAKGVLTQALGPWKRPVAYLSKRLDPVAAGWPRCLRAI | |
| | AAAALLTREASKLTFGQDIEITSSHNLESLLRSPPDKWLTNARITQYQVLLLDPPRVRFKQTAALNPATLLPETDDTLPIHHCLDTLDSLTSTRPDLTDQPLAQA | |
| | EATLFTDGSSYIRDGKRYAGAAVVTLDSVIWAEPLPIGTSAQKAELIALTKALEWSKDKSVNIYTDSRYAFATLHVHGMIYRERGWLTAGGKAIKNAPEILALL | |
| | TAVWLPKRVAVMHCKGHQKDDAPTSTGNRRADEVAREVAIRPLSTQATISKRTADGSEFESPKKKAKVE | |
| PL11960 | MPAAKRVKLDGGDKKYSIGLDIGTNSVGWAVITDEYKVPSKKFKVLGNTDRHSIKKNLIGALLFDSGETAEATRLKRTARRRYTRRKNRICYLQEIFSNEMAKV | 16,020 |
| | DDSFFHRLEESFLVEEDKKHERHPIFGNIVDEVAYHEKYPTIYHLRKKLVDSTDKADLRLIYLALAHMIKFRGHFLIEGDLNPDNSDVDKLFIQLVQTYNQLFEE | |
| | NPINASGVDAKAILSARLSKSRRLENLIAQLPGEKKNGLFGNLIALSLGLTPNFKSNFDLAEDAKLQLSKDTYDDDLDNLLAQIGDQYADLFLAAKNLSDAILLS | |
| | DILRVNTEITKAPLSASMIKRYDEHHQDLTLLKALVRQQLPEKYKEIFFDQSKNGYAGYIDGGASQEEFYKFIKPILEKMDGTEELLVKLNREDLLRKQRTFDNG | |
| | SIPHQIHLGELHAILRRQEDFYPFLKDNREKIEKILTFRIPYYVGPLARGNSRFAWMTRKSEETITPWNFEEVVDKGASAQSFIERMTNFDKNLPNEKVLPKHSL | |
| | LYEYFTVYNELTKVKYVTEGMRKPAFLSGEQKKAIVDLLFKTNRKVTVKQLKEDYFKKIECFDSVEISGVEDRFNASLGTYHDLLKIIKDKDFLDNEENEDILEDIV | |
| | LTLTLFEDREMIEERLKTYAHLFDDKVMKQLKRRRYTGWGRLSRKLINGIRDKQSGKTILDFLKSDGFANRNFMQLIHDDSLTFKEDIQKAQVSGQGDSLHE | |
| | HIANLAGSPAIKKGILQTVKVVDELVKVMGRHKPENIVIEMARENQTTQKGQKNSRERMKRIEEGIKELGSQILKEHPVENTQLQNEKLYLYYLQNGRDMYV | |
| | DQELDINRLSDYDVDHIVPQSFLKDDSIDNKVLTRSDKARGKSDNVPSEEVVKKMKNYWRQLLNAKLITQRKFDNLTKAERGGLSELDKAGFIKRQLVETRQI | |
| | TKHVAQILDSRMNTKYDENDKLIREVKVITLKSKLVSDFRKDFQFYKVREINNYHHAHDAYLNAVVGTALIKKYPKLESEFVYGDYKVYDVRKMIAKSEQEIGK | |
| | ATAKYFFYSNIMNFFKTEITLANGEIRKRPLIETNGETGEIVWDKGRDFATVRKVLSMPQVNIVKKTEVQTGGFSKESILPKRNSDKLIARKKDWDPKKYGGFD | |
| | SPTVAYSVLVVAKVEKGKSKKLKSVKELLGITIMERSSFEKNPIDFLEAKGYKEVKKDLIIKLPKYSLFELENGRKRMLASAGELQKGNELALPSKYVNFLYLASHY | |
| | EKLKGSPEDNEQKQLFVEQHKHYLDEIIEQISEFSKRVILADANLDKVLSAYNKHRDKPIREQAENIIHLFTLTNLGAPAAFKYFDTTIDRKRYTSTKEVLDATLIH | |
| | QSITGLYETRIDLSQLGGDSGGSSGGSSGSETPGTSESATPESSGGSSGGSSMASNFTQFVLVDNGGTGDVTVAPSNFANGIAEWISSNSRSQAYKVTCSVR | |
| | QSSAQNRKYTIKVEVPKGAWRSYLNMELTIPIFATNSDCELIVKAMQGLLKDGNPIPSAIAANSGIYGGSGGSMASNFTQFVLVDNGGTGDVTVAPSNFAN | |
| | GIAEWISSNSRSQAYKVTCSVRQSSAQNRKYTIKVEVPKGAWRSYLNMELTIPIFATNSDCELIVKAMQGLLKDGNPIPSAIAANSGIYGSSGGGEAAAKTAP | |
| | LEEEYRLFLEAPIQNVTLLEQWKREIPKVWAEINPPGLASTQAPIHVQLLSTALPVRVRQYPITLEAKRSLRETIRKFRAAGILRPVHSPWNTPLLPVRKSGTSEY | |
| | RMVQDLREVNKRVETIHPTVPNPYTLLSLLPPDRIWYSVLDLKDAFFCIPLAPESQLIFAFEWADAEEGESGQLTWTRLPQGFKNSPTLFNEALNRDLQGFRL | |
| | DHPSVSLLQYVDDLLIAADTQAACLSATRDLLMTLAELGYRVSGKKAQLCQEEVTYLGFKIHKGSRSLSNSRTQAILQIPVPKTKRQVREFLGKIGYCRLFIPGF | |
| | AELAQPLYAATRPGNDPLVWGEKEEEAFQSLKLALTQPPALALPSLDKPFQLFVEETSGAAKGVLTQALGPWKRPVAYLSKRLDPVAAGWPRCLRAIAAAAL | |
| | LTREASKLTFGQDIEITSSHNLESLLRSPPDKWLTNARITQYQVLLLDPPRVRFKQTAALNPATLLPETDDTLPIHHCLDTLDSLTSTRPDLTDQPLAQAEATLFT | |
| | DGSSYIRDGKRYAGAAVVTLDSVIWAEPLPIGTSAQKAELIALTKALEWSKDKSVNIYTDSRYAFATLHVHGMIYRERGWLTAGGKAIKNAPEILALLTAVWL | |
| | PKRVAVMHCKGHQKDDAPTSTGNRRADEVAREVAIRPLSTQATISKRTADGSEFESPKKKAKVE | |
| PL11961 | MPAAKRVKLDGGDKKYSIGLDIGTNSVGWAVITDEYKVPSKKFKVLGNTDRHSIKKNLIGALLFDSGETAEATRLKRTARRRYTRRKNRICYLQEIFSNEMAKV | 16,021 |
| | DDSFFHRLEESFLVEEDKKHERHPIFGNIVDEVAYHEKYPTIYHLRKKLVDSTDKADLRLIYLALAHMIKFRGHFLIEGDLNPDNSDVDKLFIQLVQTYNQLFEE | |
| | NPINASGVDAKAILSARLSKSRRLENLIAQLPGEKKNGLFGNLIALSLGLTPNFKSNFDLAEDAKLQLSKDTYDDDLDNLLAQIGDQYADLFLAAKNLSDAILLS | |
| | DILRVNTEITKAPLSASMIKRYDEHHQDLTLLKALVRQQLPEKYKEIFFDQSKNGYAGYIDGGASQEEFYKFIKPILEKMDGTEELLVKLNREDLLRKQRTFDNG | |
| | SIPHQIHLGELHAILRRQEDFYPFLKDNREKIEKILTFRIPYYVGPLARGNSRFAWMTRKSEETITPWNFEEVVDKGASAQSFIERMTNFDKNLPNEKVLPKHSL | |
| | LYEYFTVYNELTKVKYVTEGMRKPAFLSGEQKKAIVDLLFKTNRKVTVKQLKEDYFKKIECFDSVEISGVEDRFNASLGTYHDLLKIIKDKDFLDNEENEDILEDIV | |
| | LTLTLFEDREMIEERLKTYAHLFDDKVMKQLKRRRYTGWGRLSRKLINGIRDKQSGKTILDFLKSDGFANRNFMQLIHDDSLTFKEDIQKAQVSGQGDSLHE | |
| | HIANLAGSPAIKKGILQTVKVVDELVKVMGRHKPENIVIEMARENQTTQKGQKNSRERMKRIEEGIKELGSQILKEHPVENTQLQNEKLYLYYLQNGRDMYV | |
| | DQELDINRLSDYDVDHIVPQSFLKDDSIDNKVLTRSDKARGKSDNVPSEEVVKKMKNYWRQLLNAKLITQRKFDNLTKAERGGLSELDKAGFIKRQLVETRQI | |
| | TKHVAQILDSRMNTKYDENDKLIREVKVITLKSKLVSDFRKDFQFYKVREINNYHHAHDAYLNAVVGTALIKKYPKLESEFVYGDYKVYDVRKMIAKSEQEIGK | |
| | ATAKYFFYSNIMNFFKTEITLANGEIRKRPLIETNGETGEIVWDKGRDFATVRKVLSMPQVNIVKKTEVQTGGFSKESILPKRNSDKLIARKKDWDPKKYGGFD | |
| | SPTVAYSVLVVAKVEKGKSKKLKSVKELLGITIMERSSFEKNPIDFLEAKGYKEVKKDLIIKLPKYSLFELENGRKRMLASAGELQKGNELALPSKYVNFLYLASHY | |
| | EKLKGSPEDNEQKQLFVEQHKHYLDEIIEQISEFSKRVILADANLDKVLSAYNKHRDKPIREQAENIIHLFTLTNLGAPAAFKYFDTTIDRKRYTSTKEVLDATLIH | |
| | QSITGLYETRIDLSQLGGDSGGSSGGSSGSETPGTSESATPESSGGSSGGSSMASNFTQFVLVDNGGTGDVTVAPSNFANGIAEWISSNSRSQAYKVTCSVR | |
| | QSSAQNRKYTIKVEVPKGAWRSYLNMELTIPIFATNSDCELIVKAMQGLLKDGNPIPSAIAANSGIYGGSGGSMASNFTQFVLVDNGGTGDVTVAPSNFAN | |
| | GIAEWISSNSRSQAYKVTCSVRQSSAQNRKYTIKVEVPKGAWRSYLNMELTIPIFATNSDCELIVKAMQGLLKDGNPIPSAIAANSGIYGGGSGGGSGGGSG | |
| | GGSMASNFTQFVLVDNGGTGDVTVAPSNFANGIAEWISSNSRSQAYKVTCSVRQSSAQNRKYTIKVEVPKGAWRSYLNMELTIPIFATNSDCELIVKAMQ | |
| | GLLKDGNPIPSAIAANSGIYGGSGGSMASNFTQFVLVDNGGTGDVTVAPSNFANGIAEWISSNSRSQAYKVTCSVRQSSAQNRKYTIKVEVPKGAWRSYLN | |
| | MELTIPIFATNSDCELIVKAMQGLLKDGNPIPSAIAANSGIYAEAAAKEAAAKEAAAKEAAAKALEAEAAAKEAAAKEAAAKEAAAKATAPLEEEYRLFLEAPI | |
| | QNVTLLEQWKREIPKVWAEINPPGLASTQAPIHVQLLSTALPVRVRQYPITLEAKRSLRETIRKFRAAGILRPVHSPWNTPLLPVRKSGTSEYRMVQDLREVN | |
| | KRVETIHPTVPNPYTLLSLLPPDRIWYSVLDLKDAFFCIPLAPESQLIFAFEWADAEEGESGQLTWTRLPQGFKNSPTLFNEALNRDLQGFRLDHPSVSLLQYV | |
| | DDLLIAADTQAACLSATRDLLMTLAELGYRVSGKKAQLCQEEVTYLGFKIHKGSRSLSNSRTQAILQIPVPKTKRQVREFLGKIGYCRLFIPGFAELAQPLYAAT | |
| | RPGNDPLVWGEKEEEAFQSLKLALTQPPALALPSLDKPFQLFVEETSGAAKGVLTQALGPWKRPVAYLSKRLDPVAAGWPRCLRAIAAAALLTREASKLTFG | |
| | QDIEITSSHNLESLLRSPPDKWLTNARITQYQVLLLDPPRVRFKQTAALNPATLLPETDDTLPIHHCLDTLDSLTSTRPDLTDQPLAQAEATLFTDGSSYIRDGKR | |
| | YAGAAVVTLDSVIWAEPLPIGTSAQKAELIALTKALEWSKDKSVNIYTDSRYAFATLHVHGMIYRERGWLTAGGKAIKNAPEILALLTAVWLPKRVAVMHCK | |
| | GHQKDDAPTSTGNRRADEVAREVAIRPLSTQATISKRTADGSEFESPKKKAKVE | |
| PL11962 | MPAAKRVKLDGGDKKYSIGLDIGTNSVGWAVITDEYKVPSKKFKVLGNTDRHSIKKNLIGALLFDSGETAEATRLKRTARRRYTRRKNRICYLQEIFSNEMAKV | 16,022 |
| | DDSFFHRLEESFLVEEDKKHERHPIFGNIVDEVAYHEKYPTIYHLRKKLVDSTDKADLRLIYLALAHMIKFRGHFLIEGDLNPDNSDVDKLFIQLVQTYNQLFEE | |
| | NPINASGVDAKAILSARLSKSRRLENLIAQLPGEKKNGLFGNLIALSLGLTPNFKSNFDLAEDAKLQLSKDTYDDDLDNLLAQIGDQYADLFLAAKNLSDAILLS | |
| | DILRVNTEITKAPLSASMIKRYDEHHQDLTLLKALVRQQLPEKYKEIFFDQSKNGYAGYIDGGASQEEFYKFIKPILEKMDGTEELLVKLNREDLLRKQRTFDNG | |
| | SIPHQIHLGELHAILRRQEDFYPFLKDNREKIEKILTFRIPYYVGPLARGNSRFAWMTRKSEETITPWNFEEVVDKGASAQSFIERMTNFDKNLPNEKVLPKHSL | |
| | LYEYFTVYNELTKVKYVTEGMRKPAFLSGEQKKAIVDLLFKTNRKVTVKQLKEDYFKKIECFDSVEISGVEDRFNASLGTYHDLLKIIKDKDFLDNEENEDILEDIV | |
| | LTLTLFEDREMIEERLKTYAHLFDDKVMKQLKRRRYTGWGRLSRKLINGIRDKQSGKTILDFLKSDGFANRNFMQLIHDDSLTFKEDIQKAQVSGQGDSLHE | |
| | HIANLAGSPAIKKGILQTVKVVDELVKVMGRHKPENIVIEMARENQTTQKGQKNSRERMKRIEEGIKELGSQILKEHPVENTQLQNEKLYLYYLQNGRDMYV | |
| | DQELDINRLSDYDVDHIVPQSFLKDDSIDNKVLTRSDKARGKSDNVPSEEVVKKMKNYWRQLLNAKLITQRKFDNLTKAERGGLSELDKAGFIKRQLVETRQI | |
| | TKHVAQILDSRMNTKYDENDKLIREVKVITLKSKLVSDFRKDFQFYKVREINNYHHAHDAYLNAVVGTALIKKYPKLESEFVYGDYKVYDVRKMIAKSEQEIGK | |
| | ATAKYFFYSNIMNFFKTEITLANGEIRKRPLIETNGETGEIVWDKGRDFATVRKVLSMPQVNIVKKTEVQTGGFSKESILPKRNSDKLIARKKDWDPKKYGGFD | |
| | SPTVAYSVLVVAKVEKGKSKKLKSVKELLGITIMERSSFEKNPIDFLEAKGYKEVKKDLIIKLPKYSLFELENGRKRMLASAGELQKGNELALPSKYVNFLYLASHY | |
| | EKLKGSPEDNEQKQLFVEQHKHYLDEIIEQISEFSKRVILADANLDKVLSAYNKHRDKPIREQAENIIHLFTLTNLGAPAAFKYFDTTIDRKRYTSTKEVLDATLIH | |
| | QSITGLYETRIDLSQLGGDSGGSSGGSSGSETPGTSESATPESSGGSSGGSSMASNFTQFVLVDNGGTGDVTVAPSNFANGIAEWISSNSRSQAYKVTCSVR | |
| | QSSAQNRKYTIKVEVPKGAWRSYLNMELTIPIFATNSDCELIVKAMQGLLKDGNPIPSAIAANSGIYGGSGGSMASNFTQFVLVDNGGTGDVTVAPSNFAN | |
| | GIAEWISSNSRSQAYKVTCSVRQSSAQNRKYTIKVEVPKGAWRSYLNMELTIPIFATNSDCELIVKAMQGLLKDGNPIPSAIAANSGIYGGGSGGGSGGGSG | |
| | GGSMASNFTQFVLVDNGGTGDVTVAPSNFANGIAEWISSNSRSQAYKVTCSVRQSSAQNRKYTIKVEVPKGAWRSYLNMELTIPIFATNSDCELIVKAMQ | |
| | GLLKDGNPIPSAIAANSGIYGGSGGSMASNFTQFVLVDNGGTGDVTVAPSNFANGIAEWISSNSRSQAYKVTCSVRQSSAQNRKYTIKVEVPKGAWRSYLN | |
| | MELTIPIFATNSDCELIVKAMQGLLKDGNPIPSAIAANSGIYSGGSSGGSSGSETPGTSESATPESSGGSSGGSSTAPLEEEYRLFLEAPIQNVTLLEQWKREIPK | |
| | VWAEINPPGLASTQAPIHVQLLSTALPVRVRQYPITLEAKRSLRETIRKFRAAGILRPVHSPWNTPLLPVRKSGTSEYRMVQDLREVNKRVETIHPTVPNPYTL | |
| | LSLLPPDRIWYSVLDLKDAFFCIPLAPESQLIFAFEWADAEEGESGQLTWTRLPQGFKNSPTLFNEALNRDLQGFRLDHPSVSLLQYVDDLLIAADTQAACLSA | |
| | TRDLLMTLAELGYRVSGKKAQLCQEEVTYLGFKIHKGSRSLSNSRTQAILQIPVPKTKRQVREFLGKIGYCRLFIPGFAELAQPLYAATRPGNDPLVWGEKEEE | |
| | AFQSLKLALTQPPALALPSLDKPFQLFVEETSGAAKGVLTQALGPWKRPVAYLSKRLDPVAAGWPRCLRAIAAAALLTREASKLTFGQDIEITSSHNLESLLRSP | |
| | PDKWLTNARITQYQVLLLDPPRVRFKQTAALNPATLLPETDDTLPIHHCLDTLDSLTSTRPDLTDQPLAQAEATLFTDGSSYIRDGKRYAGAAVVTLDSVIWA | |
| | EPLPIGTSAQKAELIALTKALEWSKDKSVNIYTDSRYAFATLHVHGMIYRERGWLTAGGKAIKNAPEILALLTAVWLPKRVAVMHCKGHQKDDAPTSTGNRR | |
| | ADEVAREVAIRPLSTQATISKRTADGSEFESPKKKAKVE | |
| PL11963 | MPAAKRVKLDGGDKKYSIGLDIGTNSVGWAVITDEYKVPSKKFKVLGNTDRHSIKKNLIGALLFDSGETAEATRLKRTARRRYTRRKNRICYLQEIFSNEMAKV | 16,023 |
| | DDSFFHRLEESFLVEEDKKHERHPIFGNIVDEVAYHEKYPTIYHLRKKLVDSTDKADLRLIYLALAHMIKFRGHFLIEGDLNPDNSDVDKLFIQLVQTYNQLFEE | |
| | NPINASGVDAKAILSARLSKSRRLENLIAQLPGEKKNGLFGNLIALSLGLTPNFKSNFDLAEDAKLQLSKDTYDDDLDNLLAQIGDQYADLFLAAKNLSDAILLS | |
| | DILRVNTEITKAPLSASMIKRYDEHHQDLTLLKALVRQQLPEKYKEIFFDQSKNGYAGYIDGGASQEEFYKFIKPILEKMDGTEELLVKLNREDLLRKQRTFDNG | |
| | SIPHQIHLGELHAILRRQEDFYPFLKDNREKIEKILTFRIPYYVGPLARGNSRFAWMTRKSEETITPWNFEEVVDKGASAQSFIERMTNFDKNLPNEKVLPKHSL | |
| | LYEYFTVYNELTKVKYVTEGMRKPAFLSGEQKKAIVDLLFKTNRKVTVKQLKEDYFKKIECFDSVEISGVEDRFNASLGTYHDLLKIIKDKDFLDNEENEDILEDIV | |
| | LTLTLFEDREMIEERLKTYAHLFDDKVMKQLKRRRYTGWGRLSRKLINGIRDKQSGKTILDFLKSDGFANRNFMQLIHDDSLTFKEDIQKAQVSGQGDSLHE | |
| | HIANLAGSPAIKKGILQTVKVVDELVKVMGRHKPENIVIEMARENQTTQKGQKNSRERMKRIEEGIKELGSQILKEHPVENTQLQNEKLYLYYLQNGRDMYV | |
| | DQELDINRLSDYDVDHIVPQSFLKDDSIDNKVLTRSDKARGKSDNVPSEEVVKKMKNYWRQLLNAKLITQRKFDNLTKAERGGLSELDKAGFIKRQLVETRQI | |
| | TKHVAQILDSRMNTKYDENDKLIREVKVITLKSKLVSDFRKDFQFYKVREINNYHHAHDAYLNAVVGTALIKKYPKLESEFVYGDYKVYDVRKMIAKSEQEIGK | |
| | ATAKYFFYSNIMNFFKTEITLANGEIRKRPLIETNGETGEIVWDKGRDFATVRKVLSMPQVNIVKKTEVQTGGFSKESILPKRNSDKLIARKKDWDPKKYGGFD | |
| | SPTVAYSVLVVAKVEKGKSKKLKSVKELLGITIMERSSFEKNPIDFLEAKGYKEVKKDLIIKLPKYSLFELENGRKRMLASAGELQKGNELALPSKYVNFLYLASHY | |
| | EKLKGSPEDNEQKQLFVEQHKHYLDEIIEQISEFSKRVILADANLDKVLSAYNKHRDKPIREQAENIIHLFTLTNLGAPAAFKYFDTTIDRKRYTSTKEVLDATLIH | |
| | QSITGLYETRIDLSQLGGDSGGSSGGSSGSETPGTSESATPESSGGSSGGSSMASNFTQFVLVDNGGTGDVTVAPSNFANGIAEWISSNSRSQAYKVTCSVR | |
| | QSSAQNRKYTIKVEVPKGAWRSYLNMELTIPIFATNSDCELIVKAMQGLLKDGNPIPSAIAANSGIYGGSGGSMASNFTQFVLVDNGGTGDVTVAPSNFAN | |
| | GIAEWISSNSRSQAYKVTCSVRQSSAQNRKYTIKVEVPKGAWRSYLNMELTIPIFATNSDCELIVKAMQGLLKDGNPIPSAIAANSGIYGGGSGGGSGGGSG | |
| | GGSMASNFTQFVLVDNGGTGDVTVAPSNFANGIAEWISSNSRSQAYKVTCSVRQSSAQNRKYTIKVEVPKGAWRSYLNMELTIPIFATNSDCELIVKAMQ | |
| | GLLKDGNPIPSAIAANSGIYGGSGGSMASNFTQFVLVDNGGTGDVTVAPSNFANGIAEWISSNSRSQAYKVTCSVRQSSAQNRKYTIKVEVPKGAWRSYLN | |
| | MELTIPIFATNSDCELIVKAMQGLLKDGNPIPSAIAANSGIYGSSGSSGSSGSSGSSGSSTAPLEEEYRLFLEAPIQNVTLLEQWKREIPKVWAEINPPGLASTQ | |
| | APIHVQLLSTALPVRVRQYPITLEAKRSLRETIRKFRAAGILRPVHSPWNTPLLPVRKSGTSEYRMVQDLREVNKRVETIHPTVPNPYTLLSLLPPDRIWYSVLDL | |
| | KDAFFCIPLAPESQLIFAFEWADAEEGESGQLTWTRLPQGFKNSPTLFNEALNRDLQGFRLDHPSVSLLQYVDDLLIAADTQAACLSATRDLLMTLAELGYRV | |
| | SGKKAQLCQEEVTYLGFKIHKGSRSLSNSRTQAILQIPVPKTKRQVREFLGKIGYCRLFIPGFAELAQPLYAATRPGNDPLVWGEKEEEAFQSLKLALTQPPALA | |
| | LPSLDKPFQLFVEETSGAAKGVLTQALGPWKRPVAYLSKRLDPVAAGWPRCLRAIAAAALLTREASKLTFGQDIEITSSHNLESLLRSPPDKWLTNARITQYQV | |
| | LLLDPPRVRFKQTAALNPATLLPETDDTLPIHHCLDTLDSLTSTRPDLTDQPLAQAEATLFTDGSSYIRDGKRYAGAAVVTLDSVIWAEPLPIGTSAQKAELIALT | |
| | KALEWSKDKSVNIYTDSRYAFATLHVHGMIYRERGWLTAGGKAIKNAPEILALLTAVWLPKRVAVMHCKGHQKDDAPTSTGNRRADEVAREVAIRPLSTQ | |
| | ATISKRTADGSEFESPKKKAKVE | |
| PL11964 | MPAAKRVKLDGGDKKYSIGLDIGTNSVGWAVITDEYKVPSKKFKVLGNTDRHSIKKNLIGALLFDSGETAEATRLKRTARRRYTRRKNRICYLQEIFSNEMAKV | 16,024 |
| | DDSFFHRLEESFLVEEDKKHERHPIFGNIVDEVAYHEKYPTIYHLRKKLVDSTDKADLRLIYLALAHMIKFRGHFLIEGDLNPDNSDVDKLFIQLVQTYNQLFEE | |
| | NPINASGVDAKAILSARLSKSRRLENLIAQLPGEKKNGLFGNLIALSLGLTPNFKSNFDLAEDAKLQLSKDTYDDDLDNLLAQIGDQYADLFLAAKNLSDAILLS | |
| | DILRVNTEITKAPLSASMIKRYDEHHQDLTLLKALVRQQLPEKYKEIFFDQSKNGYAGYIDGGASQEEFYKFIKPILEKMDGTEELLVKLNREDLLRKQRTFDNG | |
| | SIPHQIHLGELHAILRRQEDFYPFLKDNREKIEKILTFRIPYYVGPLARGNSRFAWMTRKSEETITPWNFEEVVDKGASAQSFIERMTNFDKNLPNEKVLPKHSL | |
| | LYEYFTVYNELTKVKYVTEGMRKPAFLSGEQKKAIVDLLFKTNRKVTVKQLKEDYFKKIECFDSVEISGVEDRFNASLGTYHDLLKIIKDKDFLDNEENEDILEDIV | |
| | LTLTLFEDREMIEERLKTYAHLFDDKVMKQLKRRRYTGWGRLSRKLINGIRDKQSGKTILDFLKSDGFANRNFMQLIHDDSLTFKEDIQKAQVSGQGDSLHE | |
| | HIANLAGSPAIKKGILQTVKVVDELVKVMGRHKPENIVIEMARENQTTQKGQKNSRERMKRIEEGIKELGSQILKEHPVENTQLQNEKLYLYYLQNGRDMYV | |
| | DQELDINRLSDYDVDHIVPQSFLKDDSIDNKVLTRSDKARGKSDNVPSEEVVKKMKNYWRQLLNAKLITQRKFDNLTKAERGGLSELDKAGFIKRQLVETRQI | |
| | TKHVAQILDSRMNTKYDENDKLIREVKVITLKSKLVSDFRKDFQFYKVREINNYHHAHDAYLNAVVGTALIKKYPKLESEFVYGDYKVYDVRKMIAKSEQEIGK | |
| | ATAKYFFYSNIMNFFKTEITLANGEIRKRPLIETNGETGEIVWDKGRDFATVRKVLSMPQVNIVKKTEVQTGGFSKESILPKRNSDKLIARKKDWDPKKYGGFD | |
| | SPTVAYSVLVVAKVEKGKSKKLKSVKELLGITIMERSSFEKNPIDFLEAKGYKEVKKDLIIKLPKYSLFELENGRKRMLASAGELQKGNELALPSKYVNFLYLASHY | |
| | EKLKGSPEDNEQKQLFVEQHKHYLDEIIEQISEFSKRVILADANLDKVLSAYNKHRDKPIREQAENIIHLFTLTNLGAPAAFKYFDTTIDRKRYTSTKEVLDATLIH | |
| | QSITGLYETRIDLSQLGGDSGGSSGGSSGSETPGTSESATPESSGGSSGGSSMASNFTQFVLVDNGGTGDVTVAPSNFANGIAEWISSNSRSQAYKVTCSVR | |
| | QSSAQNRKYTIKVEVPKGAWRSYLNMELTIPIFATNSDCELIVKAMQGLLKDGNPIPSAIAANSGIYGGSGGSMASNFTQFVLVDNGGTGDVTVAPSNFAN | |
| | GIAEWISSNSRSQAYKVTCSVRQSSAQNRKYTIKVEVPKGAWRSYLNMELTIPIFATNSDCELIVKAMQGLLKDGNPIPSAIAANSGIYGGGSGGGSGGGSG | |
| | GGSMASNFTQFVLVDNGGTGDVTVAPSNFANGIAEWISSNSRSQAYKVTCSVRQSSAQNRKYTIKVEVPKGAWRSYLNMELTIPIFATNSDCELIVKAMQ | |
| | GLLKDGNPIPSAIAANSGIYGGSGGSMASNFTQFVLVDNGGTGDVTVAPSNFANGIAEWISSNSRSQAYKVTCSVRQSSAQNRKYTIKVEVPKGAWRSYLN | |
| | MELTIPIFATNSDCELIVKAMQGLLKDGNPIPSAIAANSGIYGSSGGGEAAAKTAPLEEEYRLFLEAPIQNVTLLEQWKREIPKVWAEINPPGLASTQAPIHVQL | |
| | LSTALPVRVRQYPITLEAKRSLRETIRKFRAAGILRPVHSPWNTPLLPVRKSGTSEYRMVQDLREVNKRVETIHPTVPNPYTLLSLLPPDRIWYSVLDLKDAFFCI | |
| | PLAPESQLIFAFEWADAEEGESGQLTWTRLPQGFKNSPTLFNEALNRDLQGFRLDHPSVSLLQYVDDLLIAADTQAACLSATRDLLMTLAELGYRVSGKKAQ | |
| | LCQEEVTYLGFKIHKGSRSLSNSRTQAILQIPVPKTKRQVREFLGKIGYCRLFIPGFAELAQPLYAATRPGNDPLVWGEKEEEAFQSLKLALTQPPALALPSLDKP | |
| | FQLFVEETSGAAKGVLTQALGPWKRPVAYLSKRLDPVAAGWPRCLRAIAAAALLTREASKLTFGQDIEITSSHNLESLLRSPPDKWLTNARITQYQVLLLDPPR | |
| | VRFKQTAALNPATLLPETDDTLPIHHCLDTLDSLTSTRPDLTDQPLAQAEATLFTDGSSYIRDGKRYAGAAVVTLDSVIWAEPLPIGTSAQKAELIALTKALEWS | |
| | KDKSVNIYTDSRYAFATLHVHGMIYRERGWLTAGGKAIKNAPEILALLTAVWLPKRVAVMHCKGHQKDDAPTSTGNRRADEVAREVAIRPLSTQATISKRT | |
| | ADGSEFESPKKKAKVE | |
| PL11965 | MPAAKRVKLDGGDKKYSIGLDIGTNSVGWAVITDEYKVPSKKFKVLGNTDRHSIKKNLIGALLFDSGETAEATRLKRTARRRYTRRKNRICYLQEIFSNEMAKV | 16,025 |
| | DDSFFHRLEESFLVEEDKKHERHPIFGNIVDEVAYHEKYPTIYHLRKKLVDSTDKADLRLIYLALAHMIKFRGHFLIEGDLNPDNSDVDKLFIQLVQTYNQLFEE | |
| | NPINASGVDAKAILSARLSKSRRLENLIAQLPGEKKNGLFGNLIALSLGLTPNFKSNFDLAEDAKLQLSKDTYDDDLDNLLAQIGDQYADLFLAAKNLSDAILLS | |
| | DILRVNTEITKAPLSASMIKRYDEHHQDLTLLKALVRQQLPEKYKEIFFDQSKNGYAGYIDGGASQEEFYKFIKPILEKMDGTEELLVKLNREDLLRKQRTFDNG | |
| | SIPHQIHLGELHAILRRQEDFYPFLKDNREKIEKILTFRIPYYVGPLARGNSRFAWMTRKSEETITPWNFEEVVDKGASAQSFIERMTNFDKNLPNEKVLPKHSL | |
| | LYEYFTVYNELTKVKYVTEGMRKPAFLSGEQKKAIVDLLFKTNRKVTVKQLKEDYFKKIECFDSVEISGVEDRFNASLGTYHDLLKIIKDKDFLDNEENEDILEDIV | |
| | LTLTLFEDREMIEERLKTYAHLFDDKVMKQLKRRRYTGWGRLSRKLINGIRDKQSGKTILDFLKSDGFANRNFMQLIHDDSLTFKEDIQKAQVSGQGDSLHE | |
| | HIANLAGSPAIKKGILQTVKVVDELVKVMGRHKPENIVIEMARENQTTQKGQKNSRERMKRIEEGIKELGSQILKEHPVENTQLQNEKLYLYYLQNGRDMYV | |
| | DQELDINRLSDYDVDHIVPQSFLKDDSIDNKVLTRSDKARGKSDNVPSEEVVKKMKNYWRQLLNAKLITQRKFDNLTKAERGGLSELDKAGFIKRQLVETRQI | |
| | TKHVAQILDSRMNTKYDENDKLIREVKVITLKSKLVSDFRKDFQFYKVREINNYHHAHDAYLNAVVGTALIKKYPKLESEFVYGDYKVYDVRKMIAKSEQEIGK | |
| | ATAKYFFYSNIMNFFKTEITLANGEIRKRPLIETNGETGEIVWDKGRDFATVRKVLSMPQVNIVKKTEVQTGGFSKESILPKRNSDKLIARKKDWDPKKYGGFD | |
| | SPTVAYSVLVVAKVEKGKSKKLKSVKELLGITIMERSSFEKNPIDFLEAKGYKEVKKDLIIKLPKYSLFELENGRKRMLASAGELQKGNELALPSKYVNFLYLASHY | |
| | EKLKGSPEDNEQKQLFVEQHKHYLDEIIEQISEFSKRVILADANLDKVLSAYNKHRDKPIREQAENIIHLFTLTNLGAPAAFKYFDTTIDRKRYTSTKEVLDATLIH | |
| | QSITGLYETRIDLSQLGGDGSSGSSGSSGSSGSSGSSMASNFTQFVLVDNGGTGDVTVAPSNFANGIAEWISSNSRSQAYKVTCSVRQSSAQNRKYTIKVEV | |
| | PKGAWRSYLNMELTIPIFATNSDCELIVKAMQGLLKDGNPIPSAIAANSGIYAEAAAKEAAAKEAAAKEAAAKALEAEAAAKEAAAKEAAAKEAAAKATAPL | |
| | EEEYRLFLEAPIQNVTLLEQWKREIPKVWAEINPPGLASTQAPIHVQLLSTALPVRVRQYPITLEAKRSLRETIRKFRAAGILRPVHSPWNTPLLPVRKSGTSEYR | |
| | MVQDLREVNKRVETIHPTVPNPYTLLSLLPPDRIWYSVLDLKDAFFCIPLAPESQLIFAFEWADAEEGESGQLTWTRLPQGFKNSPTLFNEALNRDLQGFRLD | |
| | HPSVSLLQYVDDLLIAADTQAACLSATRDLLMTLAELGYRVSGKKAQLCQEEVTYLGFKIHKGSRSLSNSRTQAILQIPVPKTKRQVREFLGKIGYCRLFIPGFAE | |
| | LAQPLYAATRPGNDPLVWGEKEEEAFQSLKLALTQPPALALPSLDKPFQLFVEETSGAAKGVLTQALGPWKRPVAYLSKRLDPVAAGWPRCLRAIAAAALLT | |
| | REASKLTFGQDIEITSSHNLESLLRSPPDKWLTNARITQYQVLLLDPPRVRFKQTAALNPATLLPETDDTLPIHHCLDTLDSLTSTRPDLTDQPLAQAEATLFTD | |
| | GSSYIRDGKRYAGAAVVTLDSVIWAEPLPIGTSAQKAELIALTKALEWSKDKSVNIYTDSRYAFATLHVHGMIYRERGWLTAGGKAIKNAPEILALLTAVWLPK | |
| | RVAVMHCKGHQKDDAPTSTGNRRADEVAREVAIRPLSTQATISKRTADGSEFESPKKKAKVE | |
| PL11966 | MPAAKRVKLDGGDKKYSIGLDIGTNSVGWAVITDEYKVPSKKFKVLGNTDRHSIKKNLIGALLFDSGETAEATRLKRTARRRYTRRKNRICYLQEIFSNEMAKV | 16,026 |
| | DDSFFHRLEESFLVEEDKKHERHPIFGNIVDEVAYHEKYPTIYHLRKKLVDSTDKADLRLIYLALAHMIKFRGHFLIEGDLNPDNSDVDKLFIQLVQTYNQLFEE | |
| | NPINASGVDAKAILSARLSKSRRLENLIAQLPGEKKNGLFGNLIALSLGLTPNFKSNFDLAEDAKLQLSKDTYDDDLDNLLAQIGDQYADLFLAAKNLSDAILLS | |
| | DILRVNTEITKAPLSASMIKRYDEHHQDLTLLKALVRQQLPEKYKEIFFDQSKNGYAGYIDGGASQEEFYKFIKPILEKMDGTEELLVKLNREDLLRKQRTFDNG | |
| | SIPHQIHLGELHAILRRQEDFYPFLKDNREKIEKILTFRIPYYVGPLARGNSRFAWMTRKSEETITPWNFEEVVDKGASAQSFIERMTNFDKNLPNEKVLPKHSL | |
| | LYEYFTVYNELTKVKYVTEGMRKPAFLSGEQKKAIVDLLFKTNRKVTVKQLKEDYFKKIECFDSVEISGVEDRFNASLGTYHDLLKIIKDKDFLDNEENEDILEDIV | |
| | LTLTLFEDREMIEERLKTYAHLFDDKVMKQLKRRRYTGWGRLSRKLINGIRDKQSGKTILDFLKSDGFANRNFMQLIHDDSLTFKEDIQKAQVSGQGDSLHE | |
| | HIANLAGSPAIKKGILQTVKVVDELVKVMGRHKPENIVIEMARENQTTQKGQKNSRERMKRIEEGIKELGSQILKEHPVENTQLQNEKLYLYYLQNGRDMYV | |
| | DQELDINRLSDYDVDHIVPQSFLKDDSIDNKVLTRSDKARGKSDNVPSEEVVKKMKNYWRQLLNAKLITQRKFDNLTKAERGGLSELDKAGFIKRQLVETRQI | |
| | TKHVAQILDSRMNTKYDENDKLIREVKVITLKSKLVSDFRKDFQFYKVREINNYHHAHDAYLNAVVGTALIKKYPKLESEFVYGDYKVYDVRKMIAKSEQEIGK | |
| | ATAKYFFYSNIMNFFKTEITLANGEIRKRPLIETNGETGEIVWDKGRDFATVRKVLSMPQVNIVKKTEVQTGGFSKESILPKRNSDKLIARKKDWDPKKYGGFD | |
| | SPTVAYSVLVVAKVEKGKSKKLKSVKELLGITIMERSSFEKNPIDFLEAKGYKEVKKDLIIKLPKYSLFELENGRKRMLASAGELQKGNELALPSKYVNFLYLASHY | |
| | EKLKGSPEDNEQKQLFVEQHKHYLDEIIEQISEFSKRVILADANLDKVLSAYNKHRDKPIREQAENIIHLFTLTNLGAPAAFKYFDTTIDRKRYTSTKEVLDATLIH | |
| | QSITGLYETRIDLSQLGGDGSSGSSGSSGSSGSSGSSMASNFTQFVLVDNGGTGDVTVAPSNFANGIAEWISSNSRSQAYKVTCSVRQSSAQNRKYTIKVEV | |
| | PKGAWRSYLNMELTIPIFATNSDCELIVKAMQGLLKDGNPIPSAIAANSGIYSGGSSGGSSGSETPGTSESATPESSGGSSGGSSTAPLEEEYRLFLEAPIQNVT | |
| | LLEQWKREIPKVWAEINPPGLASTQAPIHVQLLSTALPVRVRQYPITLEAKRSLRETIRKFRAAGILRPVHSPWNTPLLPVRKSGTSEYRMVQDLREVNKRVET | |
| | IHPTVPNPYTLLSLLPPDRIWYSVLDLKDAFFCIPLAPESQLIFAFEWADAEEGESGQLTWTRLPQGFKNSPTLFNEALNRDLQGFRLDHPSVSLLQYVDDLLIA | |
| | ADTQAACLSATRDLLMTLAELGYRVSGKKAQLCQEEVTYLGFKIHKGSRSLSNSRTQAILQIPVPKTKRQVREFLGKIGYCRLFIPGFAELAQPLYAATRPGND | |
| | PLVWGEKEEEAFQSLKLALTQPPALALPSLDKPFQLFVEETSGAAKGVLTQALGPWKRPVAYLSKRLDPVAAGWPRCLRAIAAAALLTREASKLTFGQDIEITS | |
| | SHNLESLLRSPPDKWLTNARITQYQVLLLDPPRVRFKQTAALNPATLLPETDDTLPIHHCLDTLDSLTSTRPDLTDQPLAQAEATLFTDGSSYIRDGKRYAGAA | |
| | VVTLDSVIWAEPLPIGTSAQKAELIALTKALEWSKDKSVNIYTDSRYAFATLHVHGMIYRERGWLTAGGKAIKNAPEILALLTAVWLPKRVAVMHCKGHQKD | |
| | DAPTSTGNRRADEVAREVAIRPLSTQATISKRTADGSEFESPKKKAKVE | |
| PL11967 | MPAAKRVKLDGGDKKYSIGLDIGTNSVGWAVITDEYKVPSKKFKVLGNTDRHSIKKNLIGALLFDSGETAEATRLKRTARRRYTRRKNRICYLQEIFSNEMAKV | 16,027 |
| | DDSFFHRLEESFLVEEDKKHERHPIFGNIVDEVAYHEKYPTIYHLRKKLVDSTDKADLRLIYLALAHMIKFRGHFLIEGDLNPDNSDVDKLFIQLVQTYNQLFEE | |
| | NPINASGVDAKAILSARLSKSRRLENLIAQLPGEKKNGLFGNLIALSLGLTPNFKSNFDLAEDAKLQLSKDTYDDDLDNLLAQIGDQYADLFLAAKNLSDAILLS | |
| | DILRVNTEITKAPLSASMIKRYDEHHQDLTLLKALVRQQLPEKYKEIFFDQSKNGYAGYIDGGASQEEFYKFIKPILEKMDGTEELLVKLNREDLLRKQRTFDNG | |
| | SIPHQIHLGELHAILRRQEDFYPFLKDNREKIEKILTFRIPYYVGPLARGNSRFAWMTRKSEETITPWNFEEVVDKGASAQSFIERMTNFDKNLPNEKVLPKHSL | |
| | LYEYFTVYNELTKVKYVTEGMRKPAFLSGEQKKAIVDLLFKTNRKVTVKQLKEDYFKKIECFDSVEISGVEDRFNASLGTYHDLLKIIKDKDFLDNEENEDILEDIV | |
| | LTLTLFEDREMIEERLKTYAHLFDDKVMKQLKRRRYTGWGRLSRKLINGIRDKQSGKTILDFLKSDGFANRNFMQLIHDDSLTFKEDIQKAQVSGQGDSLHE | |
| | HIANLAGSPAIKKGILQTVKVVDELVKVMGRHKPENIVIEMARENQTTQKGQKNSRERMKRIEEGIKELGSQILKEHPVENTQLQNEKLYLYYLQNGRDMYV | |
| | DQELDINRLSDYDVDHIVPQSFLKDDSIDNKVLTRSDKARGKSDNVPSEEVVKKMKNYWRQLLNAKLITQRKFDNLTKAERGGLSELDKAGFIKRQLVETRQI | |
| | TKHVAQILDSRMNTKYDENDKLIREVKVITLKSKLVSDFRKDFQFYKVREINNYHHAHDAYLNAVVGTALIKKYPKLESEFVYGDYKVYDVRKMIAKSEQEIGK | |
| | ATAKYFFYSNIMNFFKTEITLANGEIRKRPLIETNGETGEIVWDKGRDFATVRKVLSMPQVNIVKKTEVQTGGFSKESILPKRNSDKLIARKKDWDPKKYGGFD | |
| | SPTVAYSVLVVAKVEKGKSKKLKSVKELLGITIMERSSFEKNPIDFLEAKGYKEVKKDLIIKLPKYSLFELENGRKRMLASAGELQKGNELALPSKYVNFLYLASHY | |
| | EKLKGSPEDNEQKQLFVEQHKHYLDEIIEQISEFSKRVILADANLDKVLSAYNKHRDKPIREQAENIIHLFTLTNLGAPAAFKYFDTTIDRKRYTSTKEVLDATLIH | |
| | QSITGLYETRIDLSQLGGDGSSGSSGSSGSSGSSGSSMASNFTQFVLVDNGGTGDVTVAPSNFANGIAEWISSNSRSQAYKVTCSVRQSSAQNRKYTIKVEV | |
| | PKGAWRSYLNMELTIPIFATNSDCELIVKAMQGLLKDGNPIPSAIAANSGIYGSSGSSGSSGSSGSSGSSTAPLEEEYRLFLEAPIQNVTLLEQWKREIPKVWAE | |
| | INPPGLASTQAPIHVQLLSTALPVRVRQYPITLEAKRSLRETIRKFRAAGILRPVHSPWNTPLLPVRKSGTSEYRMVQDLREVNKRVETIHPTVPNPYTLLSLLPP | |
| | DRIWYSVLDLKDAFFCIPLAPESQLIFAFEWADAEEGESGQLTWTRLPQGFKNSPTLFNEALNRDLQGFRLDHPSVSLLQYVDDLLIAADTQAACLSATRDLL | |
| | MTLAELGYRVSGKKAQLCQEEVTYLGFKIHKGSRSLSNSRTQAILQIPVPKTKRQVREFLGKIGYCRLFIPGFAELAQPLYAATRPGNDPLVWGEKEEEAFQSL | |
| | KLALTQPPALALPSLDKPFQLFVEETSGAAKGVLTQALGPWKRPVAYLSKRLDPVAAGWPRCLRAIAAAALLTREASKLTFGQDIEITSSHNLESLLRSPPDKW | |
| | LTNARITQYQVLLLDPPRVRFKQTAALNPATLLPETDDTLPIHHCLDTLDSLTSTRPDLTDQPLAQAEATLFTDGSSYIRDGKRYAGAAVVTLDSVIWAEPLPIG | |
| | TSAQKAELIALTKALEWSKDKSVNIYTDSRYAFATLHVHGMIYRERGWLTAGGKAIKNAPEILALLTAVWLPKRVAVMHCKGHQKDDAPTSTGNRRADEVA | |
| | REVAIRPLSTQATISKRTADGSEFESPKKKAKVE | |
| PL11968 | MPAAKRVKLDGGDKKYSIGLDIGTNSVGWAVITDEYKVPSKKFKVLGNTDRHSIKKNLIGALLFDSGETAEATRLKRTARRRYTRRKNRICYLQEIFSNEMAKV | 16,028 |
| | DDSFFHRLEESFLVEEDKKHERHPIFGNIVDEVAYHEKYPTIYHLRKKLVDSTDKADLRLIYLALAHMIKFRGHFLIEGDLNPDNSDVDKLFIQLVQTYNQLFEE | |
| | NPINASGVDAKAILSARLSKSRRLENLIAQLPGEKKNGLFGNLIALSLGLTPNFKSNFDLAEDAKLQLSKDTYDDDLDNLLAQIGDQYADLFLAAKNLSDAILLS | |
| | DILRVNTEITKAPLSASMIKRYDEHHQDLTLLKALVRQQLPEKYKEIFFDQSKNGYAGYIDGGASQEEFYKFIKPILEKMDGTEELLVKLNREDLLRKQRTFDNG | |
| | SIPHQIHLGELHAILRRQEDFYPFLKDNREKIEKILTFRIPYYVGPLARGNSRFAWMTRKSEETITPWNFEEVVDKGASAQSFIERMTNFDKNLPNEKVLPKHSL | |
| | LYEYFTVYNELTKVKYVTEGMRKPAFLSGEQKKAIVDLLFKTNRKVTVKQLKEDYFKKIECFDSVEISGVEDRFNASLGTYHDLLKIIKDKDFLDNEENEDILEDIV | |
| | LTLTLFEDREMIEERLKTYAHLFDDKVMKQLKRRRYTGWGRLSRKLINGIRDKQSGKTILDFLKSDGFANRNFMQLIHDDSLTFKEDIQKAQVSGQGDSLHE | |
| | HIANLAGSPAIKKGILQTVKVVDELVKVMGRHKPENIVIEMARENQTTQKGQKNSRERMKRIEEGIKELGSQILKEHPVENTQLQNEKLYLYYLQNGRDMYV | |
| | DQELDINRLSDYDVDHIVPQSFLKDDSIDNKVLTRSDKARGKSDNVPSEEVVKKMKNYWRQLLNAKLITQRKFDNLTKAERGGLSELDKAGFIKRQLVETRQI | |
| | TKHVAQILDSRMNTKYDENDKLIREVKVITLKSKLVSDFRKDFQFYKVREINNYHHAHDAYLNAVVGTALIKKYPKLESEFVYGDYKVYDVRKMIAKSEQEIGK | |
| | ATAKYFFYSNIMNFFKTEITLANGEIRKRPLIETNGETGEIVWDKGRDFATVRKVLSMPQVNIVKKTEVQTGGFSKESILPKRNSDKLIARKKDWDPKKYGGFD | |
| | SPTVAYSVLVVAKVEKGKSKKLKSVKELLGITIMERSSFEKNPIDFLEAKGYKEVKKDLIIKLPKYSLFELENGRKRMLASAGELQKGNELALPSKYVNFLYLASHY | |
| | EKLKGSPEDNEQKQLFVEQHKHYLDEIIEQISEFSKRVILADANLDKVLSAYNKHRDKPIREQAENIIHLFTLTNLGAPAAFKYFDTTIDRKRYTSTKEVLDATLIH | |
| | QSITGLYETRIDLSQLGGDGSSGSSGSSGSSGSSGSSMASNFTQFVLVDNGGTGDVTVAPSNFANGIAEWISSNSRSQAYKVTCSVRQSSAQNRKYTIKVEV | |
| | PKGAWRSYLNMELTIPIFATNSDCELIVKAMQGLLKDGNPIPSAIAANSGIYGSSGGGEAAAKTAPLEEEYRLFLEAPIQNVTLLEQWKREIPKVWAEINPPGL | |
| | ASTQAPIHVQLLSTALPVRVRQYPITLEAKRSLRETIRKFRAAGILRPVHSPWNTPLLPVRKSGTSEYRMVQDLREVNKRVETIHPTVPNPYTLLSLLPPDRIWY | |
| | SVLDLKDAFFCIPLAPESQLIFAFEWADAEEGESGQLTWTRLPQGFKNSPTLFNEALNRDLQGFRLDHPSVSLLQYVDDLLIAADTQAACLSATRDLLMTLAE | |
| | LGYRVSGKKAQLCQEEVTYLGFKIHKGSRSLSNSRTQAILQIPVPKTKRQVREFLGKIGYCRLFIPGFAELAQPLYAATRPGNDPLVWGEKEEEAFQSLKLALTQ | |
| | PPALALPSLDKPFQLFVEETSGAAKGVLTQALGPWKRPVAYLSKRLDPVAAGWPRCLRAIAAAALLTREASKLTFGQDIEITSSHNLESLLRSPPDKWLTNARI | |
| | TQYQVLLLDPPRVRFKQTAALNPATLLPETDDTLPIHHCLDTLDSLTSTRPDLTDQPLAQAEATLFTDGSSYIRDGKRYAGAAVVTLDSVIWAEPLPIGTSAQK | |
| | AELIALTKALEWSKDKSVNIYTDSRYAFATLHVHGMIYRERGWLTAGGKAIKNAPEILALLTAVWLPKRVAVMHCKGHQKDDAPTSTGNRRADEVAREVAI | |
| | RPLSTQATISKRTADGSEFESPKKKAKVE | |
| PL11969 | MPAAKRVKLDGGDKKYSIGLDIGTNSVGWAVITDEYKVPSKKFKVLGNTDRHSIKKNLIGALLFDSGETAEATRLKRTARRRYTRRKNRICYLQEIFSNEMAKV | 16,029 |
| | DDSFFHRLEESFLVEEDKKHERHPIFGNIVDEVAYHEKYPTIYHLRKKLVDSTDKADLRLIYLALAHMIKFRGHFLIEGDLNPDNSDVDKLFIQLVQTYNQLFEE | |
| | NPINASGVDAKAILSARLSKSRRLENLIAQLPGEKKNGLFGNLIALSLGLTPNFKSNFDLAEDAKLQLSKDTYDDDLDNLLAQIGDQYADLFLAAKNLSDAILLS | |
| | DILRVNTEITKAPLSASMIKRYDEHHQDLTLLKALVRQQLPEKYKEIFFDQSKNGYAGYIDGGASQEEFYKFIKPILEKMDGTEELLVKLNREDLLRKQRTFDNG | |
| | SIPHQIHLGELHAILRRQEDFYPFLKDNREKIEKILTFRIPYYVGPLARGNSRFAWMTRKSEETITPWNFEEVVDKGASAQSFIERMTNFDKNLPNEKVLPKHSL | |
| | LYEYFTVYNELTKVKYVTEGMRKPAFLSGEQKKAIVDLLFKTNRKVTVKQLKEDYFKKIECFDSVEISGVEDRFNASLGTYHDLLKIIKDKDFLDNEENEDILEDIV | |
| | LTLTLFEDREMIEERLKTYAHLFDDKVMKQLKRRRYTGWGRLSRKLINGIRDKQSGKTILDFLKSDGFANRNFMQLIHDDSLTFKEDIQKAQVSGQGDSLHE | |
| | HIANLAGSPAIKKGILQTVKVVDELVKVMGRHKPENIVIEMARENQTTQKGQKNSRERMKRIEEGIKELGSQILKEHPVENTQLQNEKLYLYYLQNGRDMYV | |
| | DQELDINRLSDYDVDHIVPQSFLKDDSIDNKVLTRSDKARGKSDNVPSEEVVKKMKNYWRQLLNAKLITQRKFDNLTKAERGGLSELDKAGFIKRQLVETRQI | |
| | TKHVAQILDSRMNTKYDENDKLIREVKVITLKSKLVSDFRKDFQFYKVREINNYHHAHDAYLNAVVGTALIKKYPKLESEFVYGDYKVYDVRKMIAKSEQEIGK | |
| | ATAKYFFYSNIMNFFKTEITLANGEIRKRPLIETNGETGEIVWDKGRDFATVRKVLSMPQVNIVKKTEVQTGGFSKESILPKRNSDKLIARKKDWDPKKYGGFD | |
| | SPTVAYSVLVVAKVEKGKSKKLKSVKELLGITIMERSSFEKNPIDFLEAKGYKEVKKDLIIKLPKYSLFELENGRKRMLASAGELQKGNELALPSKYVNFLYLASHY | |
| | EKLKGSPEDNEQKQLFVEQHKHYLDEIIEQISEFSKRVILADANLDKVLSAYNKHRDKPIREQAENIIHLFTLTNLGAPAAFKYFDTTIDRKRYTSTKEVLDATLIH | |
| | QSITGLYETRIDLSQLGGDGSSGSSGSSGSSGSSGSSMASNFTQFVLVDNGGTGDVTVAPSNFANGIAEWISSNSRSQAYKVTCSVRQSSAQNRKYTIKVEV | |
| | PKGAWRSYLNMELTIPIFATNSDCELIVKAMQGLLKDGNPIPSAIAANSGIYGGSGGSMASNFTQFVLVDNGGTGDVTVAPSNFANGIAEWISSNSRSQAY | |
| | KVTCSVRQSSAQNRKYTIKVEVPKGAWRSYLNMELTIPIFATNSDCELIVKAMQGLLKDGNPIPSAIAANSGIYAEAAAKEAAAKEAAAKEAAAKALEAEAAA | |
| | KEAAAKEAAAKEAAAKATAPLEEEYRLFLEAPIQNVTLLEQWKREIPKVWAEINPPGLASTQAPIHVQLLSTALPVRVRQYPITLEAKRSLRETIRKFRAAGILRP | |
| | VHSPWNTPLLPVRKSGTSEYRMVQDLREVNKRVETIHPTVPNPYTLLSLLPPDRIWYSVLDLKDAFFCIPLAPESQLIFAFEWADAEEGESGQLTWTRLPQGF | |
| | KNSPTLFNEALNRDLQGFRLDHPSVSLLQYVDDLLIAADTQAACLSATRDLLMTLAELGYRVSGKKAQLCQEEVTYLGFKIHKGSRSLSNSRTQAILQIPVPKT | |
| | KRQVREFLGKIGYCRLFIPGFAELAQPLYAATRPGNDPLVWGEKEEEAFQSLKLALTQPPALALPSLDKPFQLFVEETSGAAKGVLTQALGPWKRPVAYLSKR | |
| | LDPVAAGWPRCLRAIAAAALLTREASKLTFGQDIEITSSHNLESLLRSPPDKWLTNARITQYQVLLLDPPRVRFKQTAALNPATLLPETDDTLPIHHCLDTLDSL | |
| | TSTRPDLTDQPLAQAEATLFTDGSSYIRDGKRYAGAAVVTLDSVIWAEPLPIGTSAQKAELIALTKALEWSKDKSVNIYTDSRYAFATLHVHGMIYRERGWLT | |
| | AGGKAIKNAPEILALLTAVWLPKRVAVMHCKGHQKDDAPTSTGNRRADEVAREVAIRPLSTQATISKRTADGSEFESPKKKAKVE | |
| PL11970 | MPAAKRVKLDGGDKKYSIGLDIGTNSVGWAVITDEYKVPSKKFKVLGNTDRHSIKKNLIGALLFDSGETAEATRLKRTARRRYTRRKNRICYLQEIFSNEMAKV | 16,030 |
| | DDSFFHRLEESFLVEEDKKHERHPIFGNIVDEVAYHEKYPTIYHLRKKLVDSTDKADLRLIYLALAHMIKFRGHFLIEGDLNPDNSDVDKLFIQLVQTYNQLFEE | |
| | NPINASGVDAKAILSARLSKSRRLENLIAQLPGEKKNGLFGNLIALSLGLTPNFKSNFDLAEDAKLQLSKDTYDDDLDNLLAQIGDQYADLFLAAKNLSDAILLS | |
| | DILRVNTEITKAPLSASMIKRYDEHHQDLTLLKALVRQQLPEKYKEIFFDQSKNGYAGYIDGGASQEEFYKFIKPILEKMDGTEELLVKLNREDLLRKQRTFDNG | |
| | SIPHQIHLGELHAILRRQEDFYPFLKDNREKIEKILTFRIPYYVGPLARGNSRFAWMTRKSEETITPWNFEEVVDKGASAQSFIERMTNFDKNLPNEKVLPKHSL | |
| | LYEYFTVYNELTKVKYVTEGMRKPAFLSGEQKKAIVDLLFKTNRKVTVKQLKEDYFKKIECFDSVEISGVEDRFNASLGTYHDLLKIIKDKDFLDNEENEDILEDIV | |
| | LTLTLFEDREMIEERLKTYAHLFDDKVMKQLKRRRYTGWGRLSRKLINGIRDKQSGKTILDFLKSDGFANRNFMQLIHDDSLTFKEDIQKAQVSGQGDSLHE | |
| | HIANLAGSPAIKKGILQTVKVVDELVKVMGRHKPENIVIEMARENQTTQKGQKNSRERMKRIEEGIKELGSQILKEHPVENTQLQNEKLYLYYLQNGRDMYV | |
| | DQELDINRLSDYDVDHIVPQSFLKDDSIDNKVLTRSDKARGKSDNVPSEEVVKKMKNYWRQLLNAKLITQRKFDNLTKAERGGLSELDKAGFIKRQLVETRQI | |
| | TKHVAQILDSRMNTKYDENDKLIREVKVITLKSKLVSDFRKDFQFYKVREINNYHHAHDAYLNAVVGTALIKKYPKLESEFVYGDYKVYDVRKMIAKSEQEIGK | |
| | ATAKYFFYSNIMNFFKTEITLANGEIRKRPLIETNGETGEIVWDKGRDFATVRKVLSMPQVNIVKKTEVQTGGFSKESILPKRNSDKLIARKKDWDPKKYGGFD | |
| | SPTVAYSVLVVAKVEKGKSKKLKSVKELLGITIMERSSFEKNPIDFLEAKGYKEVKKDLIIKLPKYSLFELENGRKRMLASAGELQKGNELALPSKYVNFLYLASHY | |
| | EKLKGSPEDNEQKQLFVEQHKHYLDEIIEQISEFSKRVILADANLDKVLSAYNKHRDKPIREQAENIIHLFTLTNLGAPAAFKYFDTTIDRKRYTSTKEVLDATLIH | |
| | QSITGLYETRIDLSQLGGDGSSGSSGSSGSSGSSGSSMASNFTQFVLVDNGGTGDVTVAPSNFANGIAEWISSNSRSQAYKVTCSVRQSSAQNRKYTIKVEV | |
| | PKGAWRSYLNMELTIPIFATNSDCELIVKAMQGLLKDGNPIPSAIAANSGIYGGSGGSMASNFTQFVLVDNGGTGDVTVAPSNFANGIAEWISSNSRSQAY | |
| | KVTCSVRQSSAQNRKYTIKVEVPKGAWRSYLNMELTIPIFATNSDCELIVKAMQGLLKDGNPIPSAIAANSGIYSGGSSGGSSGSETPGTSESATPESSGGSSG | |
| | GSSTAPLEEEYRLFLEAPIQNVTLLEQWKREIPKVWAEINPPGLASTQAPIHVQLLSTALPVRVRQYPITLEAKRSLRETIRKFRAAGILRPVHSPWNTPLLPVRK | |
| | SGTSEYRMVQDLREVNKRVETIHPTVPNPYTLLSLLPPDRIWYSVLDLKDAFFCIPLAPESQLIFAFEWADAEEGESGQLTWTRLPQGFKNSPTLFNEALNRDL | |
| | QGFRLDHPSVSLLQYVDDLLIAADTQAACLSATRDLLMTLAELGYRVSGKKAQLCQEEVTYLGFKIHKGSRSLSNSRTQAILQIPVPKTKRQVREFLGKIGYCRL | |
| | FIPGFAELAQPLYAATRPGNDPLVWGEKEEEAFQSLKLALTQPPALALPSLDKPFQLFVEETSGAAKGVLTQALGPWKRPVAYLSKRLDPVAAGWPRCLRAI | |
| | AAAALLTREASKLTFGQDIEITSSHNLESLLRSPPDKWLTNARITQYQVLLLDPPRVRFKQTAALNPATLLPETDDTLPIHHCLDTLDSLTSTRPDLTDQPLAQA | |
| | EATLFTDGSSYIRDGKRYAGAAVVTLDSVIWAEPLPIGTSAQKAELIALTKALEWSKDKSVNIYTDSRYAFATLHVHGMIYRERGWLTAGGKAIKNAPEILALL | |
| | TAVWLPKRVAVMHCKGHQKDDAPTSTGNRRADEVAREVAIRPLSTQATISKRTADGSEFESPKKKAKVE | |
| PL11971 | MPAAKRVKLDGGDKKYSIGLDIGTNSVGWAVITDEYKVPSKKFKVLGNTDRHSIKKNLIGALLFDSGETAEATRLKRTARRRYTRRKNRICYLQEIFSNEMAKV | 16,031 |
| | DDSFFHRLEESFLVEEDKKHERHPIFGNIVDEVAYHEKYPTIYHLRKKLVDSTDKADLRLIYLALAHMIKFRGHFLIEGDLNPDNSDVDKLFIQLVQTYNQLFEE | |
| | NPINASGVDAKAILSARLSKSRRLENLIAQLPGEKKNGLFGNLIALSLGLTPNFKSNFDLAEDAKLQLSKDTYDDDLDNLLAQIGDQYADLFLAAKNLSDAILLS | |
| | DILRVNTEITKAPLSASMIKRYDEHHQDLTLLKALVRQQLPEKYKEIFFDQSKNGYAGYIDGGASQEEFYKFIKPILEKMDGTEELLVKLNREDLLRKQRTFDNG | |
| | SIPHQIHLGELHAILRRQEDFYPFLKDNREKIEKILTFRIPYYVGPLARGNSRFAWMTRKSEETITPWNFEEVVDKGASAQSFIERMTNFDKNLPNEKVLPKHSL | |
| | LYEYFTVYNELTKVKYVTEGMRKPAFLSGEQKKAIVDLLFKTNRKVTVKQLKEDYFKKIECFDSVEISGVEDRFNASLGTYHDLLKIIKDKDFLDNEENEDILEDIV | |
| | LTLTLFEDREMIEERLKTYAHLFDDKVMKQLKRRRYTGWGRLSRKLINGIRDKQSGKTILDFLKSDGFANRNFMQLIHDDSLTFKEDIQKAQVSGQGDSLHE | |
| | HIANLAGSPAIKKGILQTVKVVDELVKVMGRHKPENIVIEMARENQTTQKGQKNSRERMKRIEEGIKELGSQILKEHPVENTQLQNEKLYLYYLQNGRDMYV | |
| | DQELDINRLSDYDVDHIVPQSFLKDDSIDNKVLTRSDKARGKSDNVPSEEVVKKMKNYWRQLLNAKLITQRKFDNLTKAERGGLSELDKAGFIKRQLVETRQI | |
| | TKHVAQILDSRMNTKYDENDKLIREVKVITLKSKLVSDFRKDFQFYKVREINNYHHAHDAYLNAVVGTALIKKYPKLESEFVYGDYKVYDVRKMIAKSEQEIGK | |
| | ATAKYFFYSNIMNFFKTEITLANGEIRKRPLIETNGETGEIVWDKGRDFATVRKVLSMPQVNIVKKTEVQTGGFSKESILPKRNSDKLIARKKDWDPKKYGGFD | |
| | SPTVAYSVLVVAKVEKGKSKKLKSVKELLGITIMERSSFEKNPIDFLEAKGYKEVKKDLIIKLPKYSLFELENGRKRMLASAGELQKGNELALPSKYVNFLYLASHY | |
| | EKLKGSPEDNEQKQLFVEQHKHYLDEIIEQISEFSKRVILADANLDKVLSAYNKHRDKPIREQAENIIHLFTLTNLGAPAAFKYFDTTIDRKRYTSTKEVLDATLIH | |
| | QSITGLYETRIDLSQLGGDGSSGSSGSSGSSGSSGSSMASNFTQFVLVDNGGTGDVTVAPSNFANGIAEWISSNSRSQAYKVTCSVRQSSAQNRKYTIKVEV | |
| | PKGAWRSYLNMELTIPIFATNSDCELIVKAMQGLLKDGNPIPSAIAANSGIYGGSGGSMASNFTQFVLVDNGGTGDVTVAPSNFANGIAEWISSNSRSQAY | |
| | KVTCSVRQSSAQNRKYTIKVEVPKGAWRSYLNMELTIPIFATNSDCELIVKAMQGLLKDGNPIPSAIAANSGIYGSSGSSGSSGSSGSSGSSTAPLEEEYRLFLE | |
| | APIQNVTLLEQWKREIPKVWAEINPPGLASTQAPIHVQLLSTALPVRVRQYPITLEAKRSLRETIRKFRAAGILRPVHSPWNTPLLPVRKSGTSEYRMVQDLRE | |
| | VNKRVETIHPTVPNPYTLLSLLPPDRIWYSVLDLKDAFFCIPLAPESQLIFAFEWADAEEGESGQLTWTRLPQGFKNSPTLFNEALNRDLQGFRLDHPSVSLLQ | |
| | YVDDLLIAADTQAACLSATRDLLMTLAELGYRVSGKKAQLCQEEVTYLGFKIHKGSRSLSNSRTQAILQIPVPKTKRQVREFLGKIGYCRLFIPGFAELAQPLYA | |
| | ATRPGNDPLVWGEKEEEAFQSLKLALTQPPALALPSLDKPFQLFVEETSGAAKGVLTQALGPWKRPVAYLSKRLDPVAAGWPRCLRAIAAAALLTREASKLT | |
| | FGQDIEITSSHNLESLLRSPPDKWLTNARITQYQVLLLDPPRVRFKQTAALNPATLLPETDDTLPIHHCLDTLDSLTSTRPDLTDQPLAQAEATLFTDGSSYIRD | |
| | GKRYAGAAVVTLDSVIWAEPLPIGTSAQKAELIALTKALEWSKDKSVNIYTDSRYAFATLHVHGMIYRERGWLTAGGKAIKNAPEILALLTAVWLPKRVAVM | |
| | HCKGHQKDDAPTSTGNRRADEVAREVAIRPLSTQATISKRTADGSEFESPKKKAKVE | |
| PL11972 | MPAAKRVKLDGGDKKYSIGLDIGTNSVGWAVITDEYKVPSKKFKVLGNTDRHSIKKNLIGALLFDSGETAEATRLKRTARRRYTRRKNRICYLQEIFSNEMAKV | 16,032 |
| | DDSFFHRLEESFLVEEDKKHERHPIFGNIVDEVAYHEKYPTIYHLRKKLVDSTDKADLRLIYLALAHMIKFRGHFLIEGDLNPDNSDVDKLFIQLVQTYNQLFEE | |
| | NPINASGVDAKAILSARLSKSRRLENLIAQLPGEKKNGLFGNLIALSLGLTPNFKSNFDLAEDAKLQLSKDTYDDDLDNLLAQIGDQYADLFLAAKNLSDAILLS | |
| | DILRVNTEITKAPLSASMIKRYDEHHQDLTLLKALVRQQLPEKYKEIFFDQSKNGYAGYIDGGASQEEFYKFIKPILEKMDGTEELLVKLNREDLLRKQRTFDNG | |
| | SIPHQIHLGELHAILRRQEDFYPFLKDNREKIEKILTFRIPYYVGPLARGNSRFAWMTRKSEETITPWNFEEVVDKGASAQSFIERMTNFDKNLPNEKVLPKHSL | |
| | LYEYFTVYNELTKVKYVTEGMRKPAFLSGEQKKAIVDLLFKTNRKVTVKQLKEDYFKKIECFDSVEISGVEDRFNASLGTYHDLLKIIKDKDFLDNEENEDILEDIV | |
| | LTLTLFEDREMIEERLKTYAHLFDDKVMKQLKRRRYTGWGRLSRKLINGIRDKQSGKTILDFLKSDGFANRNFMQLIHDDSLTFKEDIQKAQVSGQGDSLHE | |
| | HIANLAGSPAIKKGILQTVKVVDELVKVMGRHKPENIVIEMARENQTTQKGQKNSRERMKRIEEGIKELGSQILKEHPVENTQLQNEKLYLYYLQNGRDMYV | |
| | DQELDINRLSDYDVDHIVPQSFLKDDSIDNKVLTRSDKARGKSDNVPSEEVVKKMKNYWRQLLNAKLITQRKFDNLTKAERGGLSELDKAGFIKRQLVETRQI | |
| | TKHVAQILDSRMNTKYDENDKLIREVKVITLKSKLVSDFRKDFQFYKVREINNYHHAHDAYLNAVVGTALIKKYPKLESEFVYGDYKVYDVRKMIAKSEQEIGK | |
| | ATAKYFFYSNIMNFFKTEITLANGEIRKRPLIETNGETGEIVWDKGRDFATVRKVLSMPQVNIVKKTEVQTGGFSKESILPKRNSDKLIARKKDWDPKKYGGFD | |
| | SPTVAYSVLVVAKVEKGKSKKLKSVKELLGITIMERSSFEKNPIDFLEAKGYKEVKKDLIIKLPKYSLFELENGRKRMLASAGELQKGNELALPSKYVNFLYLASHY | |
| | EKLKGSPEDNEQKQLFVEQHKHYLDEIIEQISEFSKRVILADANLDKVLSAYNKHRDKPIREQAENIIHLFTLTNLGAPAAFKYFDTTIDRKRYTSTKEVLDATLIH | |
| | QSITGLYETRIDLSQLGGDGSSGSSGSSGSSGSSGSSMASNFTQFVLVDNGGTGDVTVAPSNFANGIAEWISSNSRSQAYKVTCSVRQSSAQNRKYTIKVEV | |
| | PKGAWRSYLNMELTIPIFATNSDCELIVKAMQGLLKDGNPIPSAIAANSGIYGGSGGSMASNFTQFVLVDNGGTGDVTVAPSNFANGIAEWISSNSRSQAY | |
| | KVTCSVRQSSAQNRKYTIKVEVPKGAWRSYLNMELTIPIFATNSDCELIVKAMQGLLKDGNPIPSAIAANSGIYGSSGGGEAAAKTAPLEEEYRLFLEAPIQNV | |
| | TLLEQWKREIPKVWAEINPPGLASTQAPIHVQLLSTALPVRVRQYPITLEAKRSLRETIRKFRAAGILRPVHSPWNTPLLPVRKSGTSEYRMVQDLREVNKRVE | |
| | TIHPTVPNPYTLLSLLPPDRIWYSVLDLKDAFFCIPLAPESQLIFAFEWADAEEGESGQLTWTRLPQGFKNSPTLFNEALNRDLQGFRLDHPSVSLLQYVDDLLI | |
| | AADTQAACLSATRDLLMTLAELGYRVSGKKAQLCQEEVTYLGFKIHKGSRSLSNSRTQAILQIPVPKTKRQVREFLGKIGYCRLFIPGFAELAQPLYAATRPGN | |
| | DPLVWGEKEEEAFQSLKLALTQPPALALPSLDKPFQLFVEETSGAAKGVLTQALGPWKRPVAYLSKRLDPVAAGWPRCLRAIAAAALLTREASKLTFGQDIEI | |
| | TSSHNLESLLRSPPDKWLTNARITQYQVLLLDPPRVRFKQTAALNPATLLPETDDTLPIHHCLDTLDSLTSTRPDLTDQPLAQAEATLFTDGSSYIRDGKRYAGA | |
| | AVVTLDSVIWAEPLPIGTSAQKAELIALTKALEWSKDKSVNIYTDSRYAFATLHVHGMIYRERGWLTAGGKAIKNAPEILALLTAVWLPKRVAVMHCKGHQK | |
| | DDAPTSTGNRRADEVAREVAIRPLSTQATISKRTADGSEFESPKKKAKVE | |
| PL11973 | MPAAKRVKLDGGDKKYSIGLDIGTNSVGWAVITDEYKVPSKKFKVLGNTDRHSIKKNLIGALLFDSGETAEATRLKRTARRRYTRRKNRICYLQEIFSNEMAKV | 16,033 |
| | DDSFFHRLEESFLVEEDKKHERHPIFGNIVDEVAYHEKYPTIYHLRKKLVDSTDKADLRLIYLALAHMIKFRGHFLIEGDLNPDNSDVDKLFIQLVQTYNQLFEE | |
| | NPINASGVDAKAILSARLSKSRRLENLIAQLPGEKKNGLFGNLIALSLGLTPNFKSNFDLAEDAKLQLSKDTYDDDLDNLLAQIGDQYADLFLAAKNLSDAILLS | |
| | DILRVNTEITKAPLSASMIKRYDEHHQDLTLLKALVRQQLPEKYKEIFFDQSKNGYAGYIDGGASQEEFYKFIKPILEKMDGTEELLVKLNREDLLRKQRTFDNG | |
| | SIPHQIHLGELHAILRRQEDFYPFLKDNREKIEKILTFRIPYYVGPLARGNSRFAWMTRKSEETITPWNFEEVVDKGASAQSFIERMTNFDKNLPNEKVLPKHSL | |
| | LYEYFTVYNELTKVKYVTEGMRKPAFLSGEQKKAIVDLLFKTNRKVTVKQLKEDYFKKIECFDSVEISGVEDRFNASLGTYHDLLKIIKDKDFLDNEENEDILEDIV | |
| | LTLTLFEDREMIEERLKTYAHLFDDKVMKQLKRRRYTGWGRLSRKLINGIRDKQSGKTILDFLKSDGFANRNFMQLIHDDSLTFKEDIQKAQVSGQGDSLHE | |
| | HIANLAGSPAIKKGILQTVKVVDELVKVMGRHKPENIVIEMARENQTTQKGQKNSRERMKRIEEGIKELGSQILKEHPVENTQLQNEKLYLYYLQNGRDMYV | |
| | DQELDINRLSDYDVDHIVPQSFLKDDSIDNKVLTRSDKARGKSDNVPSEEVVKKMKNYWRQLLNAKLITQRKFDNLTKAERGGLSELDKAGFIKRQLVETRQI | |
| | TKHVAQILDSRMNTKYDENDKLIREVKVITLKSKLVSDFRKDFQFYKVREINNYHHAHDAYLNAVVGTALIKKYPKLESEFVYGDYKVYDVRKMIAKSEQEIGK | |
| | ATAKYFFYSNIMNFFKTEITLANGEIRKRPLIETNGETGEIVWDKGRDFATVRKVLSMPQVNIVKKTEVQTGGFSKESILPKRNSDKLIARKKDWDPKKYGGFD | |
| | SPTVAYSVLVVAKVEKGKSKKLKSVKELLGITIMERSSFEKNPIDFLEAKGYKEVKKDLIIKLPKYSLFELENGRKRMLASAGELQKGNELALPSKYVNFLYLASHY | |
| | EKLKGSPEDNEQKQLFVEQHKHYLDEIIEQISEFSKRVILADANLDKVLSAYNKHRDKPIREQAENIIHLFTLTNLGAPAAFKYFDTTIDRKRYTSTKEVLDATLIH | |
| | QSITGLYETRIDLSQLGGDGSSGSSGSSGSSGSSGSSMASNFTQFVLVDNGGTGDVTVAPSNFANGIAEWISSNSRSQAYKVTCSVRQSSAQNRKYTIKVEV | |
| | PKGAWRSYLNMELTIPIFATNSDCELIVKAMQGLLKDGNPIPSAIAANSGIYGGSGGSMASNFTQFVLVDNGGTGDVTVAPSNFANGIAEWISSNSRSQAY | |
| | KVTCSVRQSSAQNRKYTIKVEVPKGAWRSYLNMELTIPIFATNSDCELIVKAMQGLLKDGNPIPSAIAANSGIYGGGSGGGSGGGSGGGSMASNFTQFVLV | |
| | DNGGTGDVTVAPSNFANGIAEWISSNSRSQAYKVTCSVRQSSAQNRKYTIKVEVPKGAWRSYLNMELTIPIFATNSDCELIVKAMQGLLKDGNPIPSAIAAN | |
| | SGIYGGSGGSMASNFTQFVLVDNGGTGDVTVAPSNFANGIAEWISSNSRSQAYKVTCSVRQSSAQNRKYTIKVEVPKGAWRSYLNMELTIPIFATNSDCELI | |
| | VKAMQGLLKDGNPIPSAIAANSGIYAEAAAKEAAAKEAAAKEAAAKALEAEAAAKEAAAKEAAAKEAAAKATAPLEEEYRLFLEAPIQNVTLLEQWKREIPK | |
| | VWAEINPPGLASTQAPIHVQLLSTALPVRVRQYPITLEAKRSLRETIRKFRAAGILRPVHSPWNTPLLPVRKSGTSEYRMVQDLREVNKRVETIHPTVPNPYTL | |
| | LSLLPPDRIWYSVLDLKDAFFCIPLAPESQLIFAFEWADAEEGESGQLTWTRLPQGFKNSPTLFNEALNRDLQGFRLDHPSVSLLQYVDDLLIAADTQAACLSA | |
| | TRDLLMTLAELGYRVSGKKAQLCQEEVTYLGFKIHKGSRSLSNSRTQAILQIPVPKTKRQVREFLGKIGYCRLFIPGFAELAQPLYAATRPGNDPLVWGEKEEE | |
| | AFQSLKLALTQPPALALPSLDKPFQLFVEETSGAAKGVLTQALGPWKRPVAYLSKRLDPVAAGWPRCLRAIAAAALLTREASKLTFGQDIEITSSHNLESLLRSP | |
| | PDKWLTNARITQYQVLLLDPPRVRFKQTAALNPATLLPETDDTLPIHHCLDTLDSLTSTRPDLTDQPLAQAEATLFTDGSSYIRDGKRYAGAAVVTLDSVIWA | |
| | EPLPIGTSAQKAELIALTKALEWSKDKSVNIYTDSRYAFATLHVHGMIYRERGWLTAGGKAIKNAPEILALLTAVWLPKRVAVMHCKGHQKDDAPTSTGNRR | |
| | ADEVAREVAIRPLSTQATISKRTADGSEFESPKKKAKVE | |
| PL11974 | MPAAKRVKLDGGDKKYSIGLDIGTNSVGWAVITDEYKVPSKKFKVLGNTDRHSIKKNLIGALLFDSGETAEATRLKRTARRRYTRRKNRICYLQEIFSNEMAKV | 16,034 |
| | DDSFFHRLEESFLVEEDKKHERHPIFGNIVDEVAYHEKYPTIYHLRKKLVDSTDKADLRLIYLALAHMIKFRGHFLIEGDLNPDNSDVDKLFIQLVQTYNQLFEE | |
| | NPINASGVDAKAILSARLSKSRRLENLIAQLPGEKKNGLFGNLIALSLGLTPNFKSNFDLAEDAKLQLSKDTYDDDLDNLLAQIGDQYADLFLAAKNLSDAILLS | |
| | DILRVNTEITKAPLSASMIKRYDEHHQDLTLLKALVRQQLPEKYKEIFFDQSKNGYAGYIDGGASQEEFYKFIKPILEKMDGTEELLVKLNREDLLRKQRTFDNG | |
| | SIPHQIHLGELHAILRRQEDFYPFLKDNREKIEKILTFRIPYYVGPLARGNSRFAWMTRKSEETITPWNFEEVVDKGASAQSFIERMTNFDKNLPNEKVLPKHSL | |
| | LYEYFTVYNELTKVKYVTEGMRKPAFLSGEQKKAIVDLLFKTNRKVTVKQLKEDYFKKIECFDSVEISGVEDRFNASLGTYHDLLKIIKDKDFLDNEENEDILEDIV | |
| | LTLTLFEDREMIEERLKTYAHLFDDKVMKQLKRRRYTGWGRLSRKLINGIRDKQSGKTILDFLKSDGFANRNFMQLIHDDSLTFKEDIQKAQVSGQGDSLHE | |
| | HIANLAGSPAIKKGILQTVKVVDELVKVMGRHKPENIVIEMARENQTTQKGQKNSRERMKRIEEGIKELGSQILKEHPVENTQLQNEKLYLYYLQNGRDMYV | |
| | DQELDINRLSDYDVDHIVPQSFLKDDSIDNKVLTRSDKARGKSDNVPSEEVVKKMKNYWRQLLNAKLITQRKFDNLTKAERGGLSELDKAGFIKRQLVETRQI | |
| | TKHVAQILDSRMNTKYDENDKLIREVKVITLKSKLVSDFRKDFQFYKVREINNYHHAHDAYLNAVVGTALIKKYPKLESEFVYGDYKVYDVRKMIAKSEQEIGK | |
| | ATAKYFFYSNIMNFFKTEITLANGEIRKRPLIETNGETGEIVWDKGRDFATVRKVLSMPQVNIVKKTEVQTGGFSKESILPKRNSDKLIARKKDWDPKKYGGFD | |
| | SPTVAYSVLVVAKVEKGKSKKLKSVKELLGITIMERSSFEKNPIDFLEAKGYKEVKKDLIIKLPKYSLFELENGRKRMLASAGELQKGNELALPSKYVNFLYLASHY | |
| | EKLKGSPEDNEQKQLFVEQHKHYLDEIIEQISEFSKRVILADANLDKVLSAYNKHRDKPIREQAENIIHLFTLTNLGAPAAFKYFDTTIDRKRYTSTKEVLDATLIH | |
| | QSITGLYETRIDLSQLGGDGSSGSSGSSGSSGSSGSSMASNFTQFVLVDNGGTGDVTVAPSNFANGIAEWISSNSRSQAYKVTCSVRQSSAQNRKYTIKVEV | |
| | PKGAWRSYLNMELTIPIFATNSDCELIVKAMQGLLKDGNPIPSAIAANSGIYGGSGGSMASNFTQFVLVDNGGTGDVTVAPSNFANGIAEWISSNSRSQAY | |
| | KVTCSVRQSSAQNRKYTIKVEVPKGAWRSYLNMELTIPIFATNSDCELIVKAMQGLLKDGNPIPSAIAANSGIYGGGSGGGSGGGSGGGSMASNFTQFVLV | |
| | DNGGTGDVTVAPSNFANGIAEWISSNSRSQAYKVTCSVRQSSAQNRKYTIKVEVPKGAWRSYLNMELTIPIFATNSDCELIVKAMQGLLKDGNPIPSAIAAN | |
| | SGIYGGSGGSMASNFTQFVLVDNGGTGDVTVAPSNFANGIAEWISSNSRSQAYKVTCSVRQSSAQNRKYTIKVEVPKGAWRSYLNMELTIPIFATNSDCELI | |
| | VKAMQGLLKDGNPIPSAIAANSGIYSGGSSGGSSGSETPGTSESATPESSGGSSGGSSTAPLEEEYRLFLEAPIQNVTLLEQWKREIPKVWAEINPPGLASTQA | |
| | PIHVQLLSTALPVRVRQYPITLEAKRSLRETIRKFRAAGILRPVHSPWNTPLLPVRKSGTSEYRMVQDLREVNKRVETIHPTVPNPYTLLSLLPPDRIWYSVLDLK | |
| | DAFFCIPLAPESQLIFAFEWADAEEGESGQLTWTRLPQGFKNSPTLFNEALNRDLQGFRLDHPSVSLLQYVDDLLIAADTQAACLSATRDLLMTLAELGYRVS | |
| | GKKAQLCQEEVTYLGFKIHKGSRSLSNSRTQAILQIPVPKTKRQVREFLGKIGYCRLFIPGFAELAQPLYAATRPGNDPLVWGEKEEEAFQSLKLALTQPPALAL | |
| | PSLDKPFQLFVEETSGAAKGVLTQALGPWKRPVAYLSKRLDPVAAGWPRCLRAIAAAALLTREASKLTFGQDIEITSSHNLESLLRSPPDKWLTNARITQYQVL | |
| | LLDPPRVRFKQTAALNPATLLPETDDTLPIHHCLDTLDSLTSTRPDLTDQPLAQAEATLFTDGSSYIRDGKRYAGAAVVTLDSVIWAEPLPIGTSAQKAELIALT | |
| | KALEWSKDKSVNIYTDSRYAFATLHVHGMIYRERGWLTAGGKAIKNAPEILALLTAVWLPKRVAVMHCKGHQKDDAPTSTGNRRADEVAREVAIRPLSTQ | |
| | ATISKRTADGSEFESPKKKAKVE | |
| PL11975 | MPAAKRVKLDGGDKKYSIGLDIGTNSVGWAVITDEYKVPSKKFKVLGNTDRHSIKKNLIGALLFDSGETAEATRLKRTARRRYTRRKNRICYLQEIFSNEMAKV | 16,035 |
| | DDSFFHRLEESFLVEEDKKHERHPIFGNIVDEVAYHEKYPTIYHLRKKLVDSTDKADLRLIYLALAHMIKFRGHFLIEGDLNPDNSDVDKLFIQLVQTYNQLFEE | |
| | NPINASGVDAKAILSARLSKSRRLENLIAQLPGEKKNGLFGNLIALSLGLTPNFKSNFDLAEDAKLQLSKDTYDDDLDNLLAQIGDQYADLFLAAKNLSDAILLS | |
| | DILRVNTEITKAPLSASMIKRYDEHHQDLTLLKALVRQQLPEKYKEIFFDQSKNGYAGYIDGGASQEEFYKFIKPILEKMDGTEELLVKLNREDLLRKQRTFDNG | |
| | SIPHQIHLGELHAILRRQEDFYPFLKDNREKIEKILTFRIPYYVGPLARGNSRFAWMTRKSEETITPWNFEEVVDKGASAQSFIERMTNFDKNLPNEKVLPKHSL | |
| | LYEYFTVYNELTKVKYVTEGMRKPAFLSGEQKKAIVDLLFKTNRKVTVKQLKEDYFKKIECFDSVEISGVEDRFNASLGTYHDLLKIIKDKDFLDNEENEDILEDIV | |
| | LTLTLFEDREMIEERLKTYAHLFDDKVMKQLKRRRYTGWGRLSRKLINGIRDKQSGKTILDFLKSDGFANRNFMQLIHDDSLTFKEDIQKAQVSGQGDSLHE | |
| | HIANLAGSPAIKKGILQTVKVVDELVKVMGRHKPENIVIEMARENQTTQKGQKNSRERMKRIEEGIKELGSQILKEHPVENTQLQNEKLYLYYLQNGRDMYV | |
| | DQELDINRLSDYDVDHIVPQSFLKDDSIDNKVLTRSDKARGKSDNVPSEEVVKKMKNYWRQLLNAKLITQRKFDNLTKAERGGLSELDKAGFIKRQLVETRQI | |
| | TKHVAQILDSRMNTKYDENDKLIREVKVITLKSKLVSDFRKDFQFYKVREINNYHHAHDAYLNAVVGTALIKKYPKLESEFVYGDYKVYDVRKMIAKSEQEIGK | |
| | ATAKYFFYSNIMNFFKTEITLANGEIRKRPLIETNGETGEIVWDKGRDFATVRKVLSMPQVNIVKKTEVQTGGFSKESILPKRNSDKLIARKKDWDPKKYGGFD | |
| | SPTVAYSVLVVAKVEKGKSKKLKSVKELLGITIMERSSFEKNPIDFLEAKGYKEVKKDLIIKLPKYSLFELENGRKRMLASAGELQKGNELALPSKYVNFLYLASHY | |
| | EKLKGSPEDNEQKQLFVEQHKHYLDEIIEQISEFSKRVILADANLDKVLSAYNKHRDKPIREQAENIIHLFTLTNLGAPAAFKYFDTTIDRKRYTSTKEVLDATLIH | |
| | QSITGLYETRIDLSQLGGDGSSGSSGSSGSSGSSGSSMASNFTQFVLVDNGGTGDVTVAPSNFANGIAEWISSNSRSQAYKVTCSVRQSSAQNRKYTIKVEV | |
| | PKGAWRSYLNMELTIPIFATNSDCELIVKAMQGLLKDGNPIPSAIAANSGIYGGSGGSMASNFTQFVLVDNGGTGDVTVAPSNFANGIAEWISSNSRSQAY | |
| | KVTCSVRQSSAQNRKYTIKVEVPKGAWRSYLNMELTIPIFATNSDCELIVKAMQGLLKDGNPIPSAIAANSGIYGGGSGGGSGGGSGGGSMASNFTQFVLV | |
| | DNGGTGDVTVAPSNFANGIAEWISSNSRSQAYKVTCSVRQSSAQNRKYTIKVEVPKGAWRSYLNMELTIPIFATNSDCELIVKAMQGLLKDGNPIPSAIAAN | |
| | SGIYGGSGGSMASNFTQFVLVDNGGTGDVTVAPSNFANGIAEWISSNSRSQAYKVTCSVRQSSAQNRKYTIKVEVPKGAWRSYLNMELTIPIFATNSDCELI | |
| | VKAMQGLLKDGNPIPSAIAANSGIYGSSGSSGSSGSSGSSGSSTAPLEEEYRLFLEAPIQNVTLLEQWKREIPKVWAEINPPGLASTQAPIHVQLLSTALPVRVR | |
| | QYPITLEAKRSLRETIRKFRAAGILRPVHSPWNTPLLPVRKSGTSEYRMVQDLREVNKRVETIHPTVPNPYTLLSLLPPDRIWYSVLDLKDAFFCIPLAPESQLIFA | |
| | FEWADAEEGESGQLTWTRLPQGFKNSPTLFNEALNRDLQGFRLDHPSVSLLQYVDDLLIAADTQAACLSATRDLLMTLAELGYRVSGKKAQLCQEEVTYLG | |
| | FKIHKGSRSLSNSRTQAILQIPVPKTKRQVREFLGKIGYCRLFIPGFAELAQPLYAATRPGNDPLVWGEKEEEAFQSLKLALTQPPALALPSLDKPFQLFVEETSG | |
| | AAKGVLTQALGPWKRPVAYLSKRLDPVAAGWPRCLRAIAAAALLTREASKLTFGQDIEITSSHNLESLLRSPPDKWLTNARITQYQVLLLDPPRVRFKQTAAL | |
| | NPATLLPETDDTLPIHHCLDTLDSLTSTRPDLTDQPLAQAEATLFTDGSSYIRDGKRYAGAAVVTLDSVIWAEPLPIGTSAQKAELIALTKALEWSKDKSVNIYT | |
| | DSRYAFATLHVHGMIYRERGWLTAGGKAIKNAPEILALLTAVWLPKRVAVMHCKGHQKDDAPTSTGNRRADEVAREVAIRPLSTQATISKRTADGSEFESP | |
| | KKKAKVE | |
| PL11976 | MPAAKRVKLDGGDKKYSIGLDIGTNSVGWAVITDEYKVPSKKFKVLGNTDRHSIKKNLIGALLFDSGETAEATRLKRTARRRYTRRKNRICYLQEIFSNEMAKV | 16,036 |
| | DDSFFHRLEESFLVEEDKKHERHPIFGNIVDEVAYHEKYPTIYHLRKKLVDSTDKADLRLIYLALAHMIKFRGHFLIEGDLNPDNSDVDKLFIQLVQTYNQLFEE | |
| | NPINASGVDAKAILSARLSKSRRLENLIAQLPGEKKNGLFGNLIALSLGLTPNFKSNFDLAEDAKLQLSKDTYDDDLDNLLAQIGDQYADLFLAAKNLSDAILLS | |
| | DILRVNTEITKAPLSASMIKRYDEHHQDLTLLKALVRQQLPEKYKEIFFDQSKNGYAGYIDGGASQEEFYKFIKPILEKMDGTEELLVKLNREDLLRKQRTFDNG | |
| | SIPHQIHLGELHAILRRQEDFYPFLKDNREKIEKILTFRIPYYVGPLARGNSRFAWMTRKSEETITPWNFEEVVDKGASAQSFIERMTNFDKNLPNEKVLPKHSL | |
| | LYEYFTVYNELTKVKYVTEGMRKPAFLSGEQKKAIVDLLFKTNRKVTVKQLKEDYFKKIECFDSVEISGVEDRFNASLGTYHDLLKIIKDKDFLDNEENEDILEDIV | |
| | LTLTLFEDREMIEERLKTYAHLFDDKVMKQLKRRRYTGWGRLSRKLINGIRDKQSGKTILDFLKSDGFANRNFMQLIHDDSLTFKEDIQKAQVSGQGDSLHE | |
| | HIANLAGSPAIKKGILQTVKVVDELVKVMGRHKPENIVIEMARENQTTQKGQKNSRERMKRIEEGIKELGSQILKEHPVENTQLQNEKLYLYYLQNGRDMYV | |
| | DQELDINRLSDYDVDHIVPQSFLKDDSIDNKVLTRSDKARGKSDNVPSEEVVKKMKNYWRQLLNAKLITQRKFDNLTKAERGGLSELDKAGFIKRQLVETRQI | |
| | TKHVAQILDSRMNTKYDENDKLIREVKVITLKSKLVSDFRKDFQFYKVREINNYHHAHDAYLNAVVGTALIKKYPKLESEFVYGDYKVYDVRKMIAKSEQEIGK | |
| | ATAKYFFYSNIMNFFKTEITLANGEIRKRPLIETNGETGEIVWDKGRDFATVRKVLSMPQVNIVKKTEVQTGGFSKESILPKRNSDKLIARKKDWDPKKYGGFD | |
| | SPTVAYSVLVVAKVEKGKSKKLKSVKELLGITIMERSSFEKNPIDFLEAKGYKEVKKDLIIKLPKYSLFELENGRKRMLASAGELQKGNELALPSKYVNFLYLASHY | |
| | EKLKGSPEDNEQKQLFVEQHKHYLDEIIEQISEFSKRVILADANLDKVLSAYNKHRDKPIREQAENIIHLFTLTNLGAPAAFKYFDTTIDRKRYTSTKEVLDATLIH | |
| | QSITGLYETRIDLSQLGGDGSSGSSGSSGSSGSSGSSMASNFTQFVLVDNGGTGDVTVAPSNFANGIAEWISSNSRSQAYKVTCSVRQSSAQNRKYTIKVEV | |
| | PKGAWRSYLNMELTIPIFATNSDCELIVKAMQGLLKDGNPIPSAIAANSGIYGGSGGSMASNFTQFVLVDNGGTGDVTVAPSNFANGIAEWISSNSRSQAY | |
| | KVTCSVRQSSAQNRKYTIKVEVPKGAWRSYLNMELTIPIFATNSDCELIVKAMQGLLKDGNPIPSAIAANSGIYGGGSGGGSGGGSGGGSMASNFTQFVLV | |
| | DNGGTGDVTVAPSNFANGIAEWISSNSRSQAYKVTCSVRQSSAQNRKYTIKVEVPKGAWRSYLNMELTIPIFATNSDCELIVKAMQGLLKDGNPIPSAIAAN | |
| | SGIYGGSGGSMASNFTQFVLVDNGGTGDVTVAPSNFANGIAEWISSNSRSQAYKVTCSVRQSSAQNRKYTIKVEVPKGAWRSYLNMELTIPIFATNSDCELI | |
| | VKAMQGLLKDGNPIPSAIAANSGIYGSSGGGEAAAKTAPLEEEYRLFLEAPIQNVTLLEQWKREIPKVWAEINPPGLASTQAPIHVQLLSTALPVRVRQYPITL | |
| | EAKRSLRETIRKFRAAGILRPVHSPWNTPLLPVRKSGTSEYRMVQDLREVNKRVETIHPTVPNPYTLLSLLPPDRIWYSVLDLKDAFFCIPLAPESQLIFAFEWA | |
| | DAEEGESGQLTWTRLPQGFKNSPTLFNEALNRDLQGFRLDHPSVSLLQYVDDLLIAADTQAACLSATRDLLMTLAELGYRVSGKKAQLCQEEVTYLGFKIHK | |
| | GSRSLSNSRTQAILQIPVPKTKRQVREFLGKIGYCRLFIPGFAELAQPLYAATRPGNDPLVWGEKEEEAFQSLKLALTQPPALALPSLDKPFQLFVEETSGAAKG | |
| | VLTQALGPWKRPVAYLSKRLDPVAAGWPRCLRAIAAAALLTREASKLTFGQDIEITSSHNLESLLRSPPDKWLTNARITQYQVLLLDPPRVRFKQTAALNPATL | |
| | LPETDDTLPIHHCLDTLDSLTSTRPDLTDQPLAQAEATLFTDGSSYIRDGKRYAGAAVVTLDSVIWAEPLPIGTSAQKAELIALTKALEWSKDKSVNIYTDSRYA | |
| | FATLHVHGMIYRERGWLTAGGKAIKNAPEILALLTAVWLPKRVAVMHCKGHQKDDAPTSTGNRRADEVAREVAIRPLSTQATISKRTADGSEFESPKKKAK | |
| | VE | |
| PL11977 | MPAAKRVKLDGGDKKYSIGLDIGTNSVGWAVITDEYKVPSKKFKVLGNTDRHSIKKNLIGALLFDSGETAEATRLKRTARRRYTRRKNRICYLQEIFSNEMAKV | 16,037 |
| | DDSFFHRLEESFLVEEDKKHERHPIFGNIVDEVAYHEKYPTIYHLRKKLVDSTDKADLRLIYLALAHMIKFRGHFLIEGDLNPDNSDVDKLFIQLVQTYNQLFEE | |
| | NPINASGVDAKAILSARLSKSRRLENLIAQLPGEKKNGLFGNLIALSLGLTPNFKSNFDLAEDAKLQLSKDTYDDDLDNLLAQIGDQYADLFLAAKNLSDAILLS | |
| | DILRVNTEITKAPLSASMIKRYDEHHQDLTLLKALVRQQLPEKYKEIFFDQSKNGYAGYIDGGASQEEFYKFIKPILEKMDGTEELLVKLNREDLLRKQRTFDNG | |
| | SIPHQIHLGELHAILRRQEDFYPFLKDNREKIEKILTFRIPYYVGPLARGNSRFAWMTRKSEETITPWNFEEVVDKGASAQSFIERMTNFDKNLPNEKVLPKHSL | |
| | LYEYFTVYNELTKVKYVTEGMRKPAFLSGEQKKAIVDLLFKTNRKVTVKQLKEDYFKKIECFDSVEISGVEDRFNASLGTYHDLLKIIKDKDFLDNEENEDILEDIV | |
| | LTLTLFEDREMIEERLKTYAHLFDDKVMKQLKRRRYTGWGRLSRKLINGIRDKQSGKTILDFLKSDGFANRNFMQLIHDDSLTFKEDIQKAQVSGQGDSLHE | |
| | HIANLAGSPAIKKGILQTVKVVDELVKVMGRHKPENIVIEMARENQTTQKGQKNSRERMKRIEEGIKELGSQILKEHPVENTQLQNEKLYLYYLQNGRDMYV | |
| | DQELDINRLSDYDVDHIVPQSFLKDDSIDNKVLTRSDKARGKSDNVPSEEVVKKMKNYWRQLLNAKLITQRKFDNLTKAERGGLSELDKAGFIKRQLVETRQI | |
| | TKHVAQILDSRMNTKYDENDKLIREVKVITLKSKLVSDFRKDFQFYKVREINNYHHAHDAYLNAVVGTALIKKYPKLESEFVYGDYKVYDVRKMIAKSEQEIGK | |
| | ATAKYFFYSNIMNFFKTEITLANGEIRKRPLIETNGETGEIVWDKGRDFATVRKVLSMPQVNIVKKTEVQTGGFSKESILPKRNSDKLIARKKDWDPKKYGGFD | |
| | SPTVAYSVLVVAKVEKGKSKKLKSVKELLGITIMERSSFEKNPIDFLEAKGYKEVKKDLIIKLPKYSLFELENGRKRMLASAGELQKGNELALPSKYVNFLYLASHY | |
| | EKLKGSPEDNEQKQLFVEQHKHYLDEIIEQISEFSKRVILADANLDKVLSAYNKHRDKPIREQAENIIHLFTLTNLGAPAAFKYFDTTIDRKRYTSTKEVLDATLIH | |
| | QSITGLYETRIDLSQLGGDGSSGGGEAAAKMASNFTQFVLVDNGGTGDVTVAPSNFANGIAEWISSNSRSQAYKVTCSVRQSSAQNRKYTIKVEVPKGAW | |
| | RSYLNMELTIPIFATNSDCELIVKAMQGLLKDGNPIPSAIAANSGIYAEAAAKEAAAKEAAAKEAAAKALEAEAAAKEAAAKEAAAKEAAAKATAPLEEEYRLF | |
| | LEAPIQNVTLLEQWKREIPKVWAEINPPGLASTQAPIHVQLLSTALPVRVRQYPITLEAKRSLRETIRKFRAAGILRPVHSPWNTPLLPVRKSGTSEYRMVQDL | |
| | REVNKRVETIHPTVPNPYTLLSLLPPDRIWYSVLDLKDAFFCIPLAPESQLIFAFEWADAEEGESGQLTWTRLPQGFKNSPTLFNEALNRDLQGFRLDHPSVSL | |
| | LQYVDDLLIAADTQAACLSATRDLLMTLAELGYRVSGKKAQLCQEEVTYLGFKIHKGSRSLSNSRTQAILQIPVPKTKRQVREFLGKIGYCRLFIPGFAELAQPLY | |
| | AATRPGNDPLVWGEKEEEAFQSLKLALTQPPALALPSLDKPFQLFVEETSGAAKGVLTQALGPWKRPVAYLSKRLDPVAAGWPRCLRAIAAAALLTREASKL | |
| | TFGQDIEITSSHNLESLLRSPPDKWLTNARITQYQVLLLDPPRVRFKQTAALNPATLLPETDDTLPIHHCLDTLDSLTSTRPDLTDQPLAQAEATLFTDGSSYIRD | |
| | GKRYAGAAVVTLDSVIWAEPLPIGTSAQKAELIALTKALEWSKDKSVNIYTDSRYAFATLHVHGMIYRERGWLTAGGKAIKNAPEILALLTAVWLPKRVAVM | |
| | HCKGHQKDDAPTSTGNRRADEVAREVAIRPLSTQATISKRTADGSEFESPKKKAKVE | |
| PL11978 | MPAAKRVKLDGGDKKYSIGLDIGTNSVGWAVITDEYKVPSKKFKVLGNTDRHSIKKNLIGALLFDSGETAEATRLKRTARRRYTRRKNRICYLQEIFSNEMAKV | 16,038 |
| | DDSFFHRLEESFLVEEDKKHERHPIFGNIVDEVAYHEKYPTIYHLRKKLVDSTDKADLRLIYLALAHMIKFRGHFLIEGDLNPDNSDVDKLFIQLVQTYNQLFEE | |
| | NPINASGVDAKAILSARLSKSRRLENLIAQLPGEKKNGLFGNLIALSLGLTPNFKSNFDLAEDAKLQLSKDTYDDDLDNLLAQIGDQYADLFLAAKNLSDAILLS | |
| | DILRVNTEITKAPLSASMIKRYDEHHQDLTLLKALVRQQLPEKYKEIFFDQSKNGYAGYIDGGASQEEFYKFIKPILEKMDGTEELLVKLNREDLLRKQRTFDNG | |
| | SIPHQIHLGELHAILRRQEDFYPFLKDNREKIEKILTFRIPYYVGPLARGNSRFAWMTRKSEETITPWNFEEVVDKGASAQSFIERMTNFDKNLPNEKVLPKHSL | |
| | LYEYFTVYNELTKVKYVTEGMRKPAFLSGEQKKAIVDLLFKTNRKVTVKQLKEDYFKKIECFDSVEISGVEDRFNASLGTYHDLLKIIKDKDFLDNEENEDILEDIV | |
| | LTLTLFEDREMIEERLKTYAHLFDDKVMKQLKRRRYTGWGRLSRKLINGIRDKQSGKTILDFLKSDGFANRNFMQLIHDDSLTFKEDIQKAQVSGQGDSLHE | |
| | HIANLAGSPAIKKGILQTVKVVDELVKVMGRHKPENIVIEMARENQTTQKGQKNSRERMKRIEEGIKELGSQILKEHPVENTQLQNEKLYLYYLQNGRDMYV | |
| | DQELDINRLSDYDVDHIVPQSFLKDDSIDNKVLTRSDKARGKSDNVPSEEVVKKMKNYWRQLLNAKLITQRKFDNLTKAERGGLSELDKAGFIKRQLVETRQI | |
| | TKHVAQILDSRMNTKYDENDKLIREVKVITLKSKLVSDFRKDFQFYKVREINNYHHAHDAYLNAVVGTALIKKYPKLESEFVYGDYKVYDVRKMIAKSEQEIGK | |
| | ATAKYFFYSNIMNFFKTEITLANGEIRKRPLIETNGETGEIVWDKGRDFATVRKVLSMPQVNIVKKTEVQTGGFSKESILPKRNSDKLIARKKDWDPKKYGGFD | |
| | SPTVAYSVLVVAKVEKGKSKKLKSVKELLGITIMERSSFEKNPIDFLEAKGYKEVKKDLIIKLPKYSLFELENGRKRMLASAGELQKGNELALPSKYVNFLYLASHY | |
| | EKLKGSPEDNEQKQLFVEQHKHYLDEIIEQISEFSKRVILADANLDKVLSAYNKHRDKPIREQAENIIHLFTLTNLGAPAAFKYFDTTIDRKRYTSTKEVLDATLIH | |
| | QSITGLYETRIDLSQLGGDGSSGGGEAAAKMASNFTQFVLVDNGGTGDVTVAPSNFANGIAEWISSNSRSQAYKVTCSVRQSSAQNRKYTIKVEVPKGAW | |
| | RSYLNMELTIPIFATNSDCELIVKAMQGLLKDGNPIPSAIAANSGIYSGGSSGGSSGSETPGTSESATPESSGGSSGGSSTAPLEEEYRLFLEAPIQNVTLLEQWK | |
| | REIPKVWAEINPPGLASTQAPIHVQLLSTALPVRVRQYPITLEAKRSLRETIRKFRAAGILRPVHSPWNTPLLPVRKSGTSEYRMVQDLREVNKRVETIHPTVP | |
| | NPYTLLSLLPPDRIWYSVLDLKDAFFCIPLAPESQLIFAFEWADAEEGESGQLTWTRLPQGFKNSPTLFNEALNRDLQGFRLDHPSVSLLQYVDDLLIAADTQA | |
| | ACLSATRDLLMTLAELGYRVSGKKAQLCQEEVTYLGFKIHKGSRSLSNSRTQAILQIPVPKTKRQVREFLGKIGYCRLFIPGFAELAQPLYAATRPGNDPLVWG | |
| | EKEEEAFQSLKLALTQPPALALPSLDKPFQLFVEETSGAAKGVLTQALGPWKRPVAYLSKRLDPVAAGWPRCLRAIAAAALLTREASKLTFGQDIEITSSHNLES | |
| | LLRSPPDKWLTNARITQYQVLLLDPPRVRFKQTAALNPATLLPETDDTLPIHHCLDTLDSLTSTRPDLTDQPLAQAEATLFTDGSSYIRDGKRYAGAAVVTLDS | |
| | VIWAEPLPIGTSAQKAELIALTKALEWSKDKSVNIYTDSRYAFATLHVHGMIYRERGWLTAGGKAIKNAPEILALLTAVWLPKRVAVMHCKGHQKDDAPTST | |
| | GNRRADEVAREVAIRPLSTQATISKRTADGSEFESPKKKAKVE | |
| PL11979 | MPAAKRVKLDGGDKKYSIGLDIGTNSVGWAVITDEYKVPSKKFKVLGNTDRHSIKKNLIGALLFDSGETAEATRLKRTARRRYTRRKNRICYLQEIFSNEMAKV | 16,039 |
| | DDSFFHRLEESFLVEEDKKHERHPIFGNIVDEVAYHEKYPTIYHLRKKLVDSTDKADLRLIYLALAHMIKFRGHFLIEGDLNPDNSDVDKLFIQLVQTYNQLFEE | |
| | NPINASGVDAKAILSARLSKSRRLENLIAQLPGEKKNGLFGNLIALSLGLTPNFKSNFDLAEDAKLQLSKDTYDDDLDNLLAQIGDQYADLFLAAKNLSDAILLS | |
| | DILRVNTEITKAPLSASMIKRYDEHHQDLTLLKALVRQQLPEKYKEIFFDQSKNGYAGYIDGGASQEEFYKFIKPILEKMDGTEELLVKLNREDLLRKQRTFDNG | |
| | SIPHQIHLGELHAILRRQEDFYPFLKDNREKIEKILTFRIPYYVGPLARGNSRFAWMTRKSEETITPWNFEEVVDKGASAQSFIERMTNFDKNLPNEKVLPKHSL | |
| | LYEYFTVYNELTKVKYVTEGMRKPAFLSGEQKKAIVDLLFKTNRKVTVKQLKEDYFKKIECFDSVEISGVEDRFNASLGTYHDLLKIIKDKDFLDNEENEDILEDIV | |
| | LTLTLFEDREMIEERLKTYAHLFDDKVMKQLKRRRYTGWGRLSRKLINGIRDKQSGKTILDFLKSDGFANRNFMQLIHDDSLTFKEDIQKAQVSGQGDSLHE | |
| | HIANLAGSPAIKKGILQTVKVVDELVKVMGRHKPENIVIEMARENQTTQKGQKNSRERMKRIEEGIKELGSQILKEHPVENTQLQNEKLYLYYLQNGRDMYV | |
| | DQELDINRLSDYDVDHIVPQSFLKDDSIDNKVLTRSDKARGKSDNVPSEEVVKKMKNYWRQLLNAKLITQRKFDNLTKAERGGLSELDKAGFIKRQLVETRQI | |
| | TKHVAQILDSRMNTKYDENDKLIREVKVITLKSKLVSDFRKDFQFYKVREINNYHHAHDAYLNAVVGTALIKKYPKLESEFVYGDYKVYDVRKMIAKSEQEIGK | |
| | ATAKYFFYSNIMNFFKTEITLANGEIRKRPLIETNGETGEIVWDKGRDFATVRKVLSMPQVNIVKKTEVQTGGFSKESILPKRNSDKLIARKKDWDPKKYGGFD | |
| | SPTVAYSVLVVAKVEKGKSKKLKSVKELLGITIMERSSFEKNPIDFLEAKGYKEVKKDLIIKLPKYSLFELENGRKRMLASAGELQKGNELALPSKYVNFLYLASHY | |
| | EKLKGSPEDNEQKQLFVEQHKHYLDEIIEQISEFSKRVILADANLDKVLSAYNKHRDKPIREQAENIIHLFTLTNLGAPAAFKYFDTTIDRKRYTSTKEVLDATLIH | |
| | QSITGLYETRIDLSQLGGDGSSGGGEAAAKMASNFTQFVLVDNGGTGDVTVAPSNFANGIAEWISSNSRSQAYKVTCSVRQSSAQNRKYTIKVEVPKGAW | |
| | RSYLNMELTIPIFATNSDCELIVKAMQGLLKDGNPIPSAIAANSGIYGSSGSSGSSGSSGSSGSSTAPLEEEYRLFLEAPIQNVTLLEQWKREIPKVWAEINPPGL | |
| | ASTQAPIHVQLLSTALPVRVRQYPITLEAKRSLRETIRKFRAAGILRPVHSPWNTPLLPVRKSGTSEYRMVQDLREVNKRVETIHPTVPNPYTLLSLLPPDRIWY | |
| | SVLDLKDAFFCIPLAPESQLIFAFEWADAEEGESGQLTWTRLPQGFKNSPTLFNEALNRDLQGFRLDHPSVSLLQYVDDLLIAADTQAACLSATRDLLMTLAE | |
| | LGYRVSGKKAQLCQEEVTYLGFKIHKGSRSLSNSRTQAILQIPVPKTKRQVREFLGKIGYCRLFIPGFAELAQPLYAATRPGNDPLVWGEKEEEAFQSLKLALTQ | |
| | PPALALPSLDKPFQLFVEETSGAAKGVLTQALGPWKRPVAYLSKRLDPVAAGWPRCLRAIAAAALLTREASKLTFGQDIEITSSHNLESLLRSPPDKWLTNARI | |
| | TQYQVLLLDPPRVRFKQTAALNPATLLPETDDTLPIHHCLDTLDSLTSTRPDLTDQPLAQAEATLFTDGSSYIRDGKRYAGAAVVTLDSVIWAEPLPIGTSAQK | |
| | AELIALTKALEWSKDKSVNIYTDSRYAFATLHVHGMIYRERGWLTAGGKAIKNAPEILALLTAVWLPKRVAVMHCKGHQKDDAPTSTGNRRADEVAREVAI | |
| | RPLSTQATISKRTADGSEFESPKKKAKVE | |
| PL11980 | MPAAKRVKLDGGDKKYSIGLDIGTNSVGWAVITDEYKVPSKKFKVLGNTDRHSIKKNLIGALLFDSGETAEATRLKRTARRRYTRRKNRICYLQEIFSNEMAKV | 16,040 |
| | DDSFFHRLEESFLVEEDKKHERHPIFGNIVDEVAYHEKYPTIYHLRKKLVDSTDKADLRLIYLALAHMIKFRGHFLIEGDLNPDNSDVDKLFIQLVQTYNQLFEE | |
| | NPINASGVDAKAILSARLSKSRRLENLIAQLPGEKKNGLFGNLIALSLGLTPNFKSNFDLAEDAKLQLSKDTYDDDLDNLLAQIGDQYADLFLAAKNLSDAILLS | |
| | DILRVNTEITKAPLSASMIKRYDEHHQDLTLLKALVRQQLPEKYKEIFFDQSKNGYAGYIDGGASQEEFYKFIKPILEKMDGTEELLVKLNREDLLRKQRTFDNG | |
| | SIPHQIHLGELHAILRRQEDFYPFLKDNREKIEKILTFRIPYYVGPLARGNSRFAWMTRKSEETITPWNFEEVVDKGASAQSFIERMTNFDKNLPNEKVLPKHSL | |
| | LYEYFTVYNELTKVKYVTEGMRKPAFLSGEQKKAIVDLLFKTNRKVTVKQLKEDYFKKIECFDSVEISGVEDRFNASLGTYHDLLKIIKDKDFLDNEENEDILEDIV | |
| | LTLTLFEDREMIEERLKTYAHLFDDKVMKQLKRRRYTGWGRLSRKLINGIRDKQSGKTILDFLKSDGFANRNFMQLIHDDSLTFKEDIQKAQVSGQGDSLHE | |
| | HIANLAGSPAIKKGILQTVKVVDELVKVMGRHKPENIVIEMARENQTTQKGQKNSRERMKRIEEGIKELGSQILKEHPVENTQLQNEKLYLYYLQNGRDMYV | |
| | DQELDINRLSDYDVDHIVPQSFLKDDSIDNKVLTRSDKARGKSDNVPSEEVVKKMKNYWRQLLNAKLITQRKFDNLTKAERGGLSELDKAGFIKRQLVETRQI | |
| | TKHVAQILDSRMNTKYDENDKLIREVKVITLKSKLVSDFRKDFQFYKVREINNYHHAHDAYLNAVVGTALIKKYPKLESEFVYGDYKVYDVRKMIAKSEQEIGK | |
| | ATAKYFFYSNIMNFFKTEITLANGEIRKRPLIETNGETGEIVWDKGRDFATVRKVLSMPQVNIVKKTEVQTGGFSKESILPKRNSDKLIARKKDWDPKKYGGFD | |
| | SPTVAYSVLVVAKVEKGKSKKLKSVKELLGITIMERSSFEKNPIDFLEAKGYKEVKKDLIIKLPKYSLFELENGRKRMLASAGELQKGNELALPSKYVNFLYLASHY | |
| | EKLKGSPEDNEQKQLFVEQHKHYLDEIIEQISEFSKRVILADANLDKVLSAYNKHRDKPIREQAENIIHLFTLTNLGAPAAFKYFDTTIDRKRYTSTKEVLDATLIH | |
| | QSITGLYETRIDLSQLGGDGSSGGGEAAAKMASNFTQFVLVDNGGTGDVTVAPSNFANGIAEWISSNSRSQAYKVTCSVRQSSAQNRKYTIKVEVPKGAW | |
| | RSYLNMELTIPIFATNSDCELIVKAMQGLLKDGNPIPSAIAANSGIYGSSGGGEAAAKTAPLEEEYRLFLEAPIQNVTLLEQWKREIPKVWAEINPPGLASTQA | |
| | PIHVQLLSTALPVRVRQYPITLEAKRSLRETIRKFRAAGILRPVHSPWNTPLLPVRKSGTSEYRMVQDLREVNKRVETIHPTVPNPYTLLSLLPPDRIWYSVLDLK | |
| | DAFFCIPLAPESQLIFAFEWADAEEGESGQLTWTRLPQGFKNSPTLFNEALNRDLQGFRLDHPSVSLLQYVDDLLIAADTQAACLSATRDLLMTLAELGYRVS | |
| | GKKAQLCQEEVTYLGFKIHKGSRSLSNSRTQAILQIPVPKTKRQVREFLGKIGYCRLFIPGFAELAQPLYAATRPGNDPLVWGEKEEEAFQSLKLALTQPPALAL | |
| | PSLDKPFQLFVEETSGAAKGVLTQALGPWKRPVAYLSKRLDPVAAGWPRCLRAIAAAALLTREASKLTFGQDIEITSSHNLESLLRSPPDKWLTNARITQYQVL | |
| | LLDPPRVRFKQTAALNPATLLPETDDTLPIHHCLDTLDSLTSTRPDLTDQPLAQAEATLFTDGSSYIRDGKRYAGAAVVTLDSVIWAEPLPIGTSAQKAELIALT | |
| | KALEWSKDKSVNIYTDSRYAFATLHVHGMIYRERGWLTAGGKAIKNAPEILALLTAVWLPKRVAVMHCKGHQKDDAPTSTGNRRADEVAREVAIRPLSTQ | |
| | ATISKRTADGSEFESPKKKAKVE | |
| PL11981 | MPAAKRVKLDGGDKKYSIGLDIGTNSVGWAVITDEYKVPSKKFKVLGNTDRHSIKKNLIGALLFDSGETAEATRLKRTARRRYTRRKNRICYLQEIFSNEMAKV | 16,041 |
| | DDSFFHRLEESFLVEEDKKHERHPIFGNIVDEVAYHEKYPTIYHLRKKLVDSTDKADLRLIYLALAHMIKFRGHFLIEGDLNPDNSDVDKLFIQLVQTYNQLFEE | |
| | NPINASGVDAKAILSARLSKSRRLENLIAQLPGEKKNGLFGNLIALSLGLTPNFKSNFDLAEDAKLQLSKDTYDDDLDNLLAQIGDQYADLFLAAKNLSDAILLS | |
| | DILRVNTEITKAPLSASMIKRYDEHHQDLTLLKALVRQQLPEKYKEIFFDQSKNGYAGYIDGGASQEEFYKFIKPILEKMDGTEELLVKLNREDLLRKQRTFDNG | |
| | SIPHQIHLGELHAILRRQEDFYPFLKDNREKIEKILTFRIPYYVGPLARGNSRFAWMTRKSEETITPWNFEEVVDKGASAQSFIERMTNFDKNLPNEKVLPKHSL | |
| | LYEYFTVYNELTKVKYVTEGMRKPAFLSGEQKKAIVDLLFKTNRKVTVKQLKEDYFKKIECFDSVEISGVEDRFNASLGTYHDLLKIIKDKDFLDNEENEDILEDIV | |
| | LTLTLFEDREMIEERLKTYAHLFDDKVMKQLKRRRYTGWGRLSRKLINGIRDKQSGKTILDFLKSDGFANRNFMQLIHDDSLTFKEDIQKAQVSGQGDSLHE | |
| | HIANLAGSPAIKKGILQTVKVVDELVKVMGRHKPENIVIEMARENQTTQKGQKNSRERMKRIEEGIKELGSQILKEHPVENTQLQNEKLYLYYLQNGRDMYV | |
| | DQELDINRLSDYDVDHIVPQSFLKDDSIDNKVLTRSDKARGKSDNVPSEEVVKKMKNYWRQLLNAKLITQRKFDNLTKAERGGLSELDKAGFIKRQLVETRQI | |
| | TKHVAQILDSRMNTKYDENDKLIREVKVITLKSKLVSDFRKDFQFYKVREINNYHHAHDAYLNAVVGTALIKKYPKLESEFVYGDYKVYDVRKMIAKSEQEIGK | |
| | ATAKYFFYSNIMNFFKTEITLANGEIRKRPLIETNGETGEIVWDKGRDFATVRKVLSMPQVNIVKKTEVQTGGFSKESILPKRNSDKLIARKKDWDPKKYGGFD | |
| | SPTVAYSVLVVAKVEKGKSKKLKSVKELLGITIMERSSFEKNPIDFLEAKGYKEVKKDLIIKLPKYSLFELENGRKRMLASAGELQKGNELALPSKYVNFLYLASHY | |
| | EKLKGSPEDNEQKQLFVEQHKHYLDEIIEQISEFSKRVILADANLDKVLSAYNKHRDKPIREQAENIIHLFTLTNLGAPAAFKYFDTTIDRKRYTSTKEVLDATLIH | |
| | QSITGLYETRIDLSQLGGDGSSGGGEAAAKMASNFTQFVLVDNGGTGDVTVAPSNFANGIAEWISSNSRSQAYKVTCSVRQSSAQNRKYTIKVEVPKGAW | |
| | RSYLNMELTIPIFATNSDCELIVKAMQGLLKDGNPIPSAIAANSGIYGGSGGSMASNFTQFVLVDNGGTGDVTVAPSNFANGIAEWISSNSRSQAYKVTCSV | |
| | RQSSAQNRKYTIKVEVPKGAWRSYLNMELTIPIFATNSDCELIVKAMQGLLKDGNPIPSAIAANSGIYAEAAAKEAAAKEAAAKEAAAKALEAEAAAKEAAAK | |
| | EAAAKEAAAKATAPLEEEYRLFLEAPIQNVTLLEQWKREIPKVWAEINPPGLASTQAPIHVQLLSTALPVRVRQYPITLEAKRSLRETIRKFRAAGILRPVHSPW | |
| | NTPLLPVRKSGTSEYRMVQDLREVNKRVETIHPTVPNPYTLLSLLPPDRIWYSVLDLKDAFFCIPLAPESQLIFAFEWADAEEGESGQLTWTRLPQGFKNSPTL | |
| | FNEALNRDLQGFRLDHPSVSLLQYVDDLLIAADTQAACLSATRDLLMTLAELGYRVSGKKAQLCQEEVTYLGFKIHKGSRSLSNSRTQAILQIPVPKTKRQVRE | |
| | FLGKIGYCRLFIPGFAELAQPLYAATRPGNDPLVWGEKEEEAFQSLKLALTQPPALALPSLDKPFQLFVEETSGAAKGVLTQALGPWKRPVAYLSKRLDPVAA | |
| | GWPRCLRAIAAAALLTREASKLTFGQDIEITSSHNLESLLRSPPDKWLTNARITQYQVLLLDPPRVRFKQTAALNPATLLPETDDTLPIHHCLDTLDSLTSTRPDL | |
| | TDQPLAQAEATLFTDGSSYIRDGKRYAGAAVVTLDSVIWAEPLPIGTSAQKAELIALTKALEWSKDKSVNIYTDSRYAFATLHVHGMIYRERGWLTAGGKAIK | |
| | NAPEILALLTAVWLPKRVAVMHCKGHQKDDAPTSTGNRRADEVAREVAIRPLSTQATISKRTADGSEFESPKKKAKVE | |
| PL11982 | MPAAKRVKLDGGDKKYSIGLDIGTNSVGWAVITDEYKVPSKKFKVLGNTDRHSIKKNLIGALLFDSGETAEATRLKRTARRRYTRRKNRICYLQEIFSNEMAKV | 16,042 |
| | DDSFFHRLEESFLVEEDKKHERHPIFGNIVDEVAYHEKYPTIYHLRKKLVDSTDKADLRLIYLALAHMIKFRGHFLIEGDLNPDNSDVDKLFIQLVQTYNQLFEE | |
| | NPINASGVDAKAILSARLSKSRRLENLIAQLPGEKKNGLFGNLIALSLGLTPNFKSNFDLAEDAKLQLSKDTYDDDLDNLLAQIGDQYADLFLAAKNLSDAILLS | |
| | DILRVNTEITKAPLSASMIKRYDEHHQDLTLLKALVRQQLPEKYKEIFFDQSKNGYAGYIDGGASQEEFYKFIKPILEKMDGTEELLVKLNREDLLRKQRTFDNG | |
| | SIPHQIHLGELHAILRRQEDFYPFLKDNREKIEKILTFRIPYYVGPLARGNSRFAWMTRKSEETITPWNFEEVVDKGASAQSFIERMTNFDKNLPNEKVLPKHSL | |
| | LYEYFTVYNELTKVKYVTEGMRKPAFLSGEQKKAIVDLLFKTNRKVTVKQLKEDYFKKIECFDSVEISGVEDRFNASLGTYHDLLKIIKDKDFLDNEENEDILEDIV | |
| | LTLTLFEDREMIEERLKTYAHLFDDKVMKQLKRRRYTGWGRLSRKLINGIRDKQSGKTILDFLKSDGFANRNFMQLIHDDSLTFKEDIQKAQVSGQGDSLHE | |
| | HIANLAGSPAIKKGILQTVKVVDELVKVMGRHKPENIVIEMARENQTTQKGQKNSRERMKRIEEGIKELGSQILKEHPVENTQLQNEKLYLYYLQNGRDMYV | |
| | DQELDINRLSDYDVDHIVPQSFLKDDSIDNKVLTRSDKARGKSDNVPSEEVVKKMKNYWRQLLNAKLITQRKFDNLTKAERGGLSELDKAGFIKRQLVETRQI | |
| | TKHVAQILDSRMNTKYDENDKLIREVKVITLKSKLVSDFRKDFQFYKVREINNYHHAHDAYLNAVVGTALIKKYPKLESEFVYGDYKVYDVRKMIAKSEQEIGK | |
| | ATAKYFFYSNIMNFFKTEITLANGEIRKRPLIETNGETGEIVWDKGRDFATVRKVLSMPQVNIVKKTEVQTGGFSKESILPKRNSDKLIARKKDWDPKKYGGFD | |
| | SPTVAYSVLVVAKVEKGKSKKLKSVKELLGITIMERSSFEKNPIDFLEAKGYKEVKKDLIIKLPKYSLFELENGRKRMLASAGELQKGNELALPSKYVNFLYLASHY | |
| | EKLKGSPEDNEQKQLFVEQHKHYLDEIIEQISEFSKRVILADANLDKVLSAYNKHRDKPIREQAENIIHLFTLTNLGAPAAFKYFDTTIDRKRYTSTKEVLDATLIH | |
| | QSITGLYETRIDLSQLGGDGSSGGGEAAAKMASNFTQFVLVDNGGTGDVTVAPSNFANGIAEWISSNSRSQAYKVTCSVRQSSAQNRKYTIKVEVPKGAW | |
| | RSYLNMELTIPIFATNSDCELIVKAMQGLLKDGNPIPSAIAANSGIYGGSGGSMASNFTQFVLVDNGGTGDVTVAPSNFANGIAEWISSNSRSQAYKVTCSV | |
| | RQSSAQNRKYTIKVEVPKGAWRSYLNMELTIPIFATNSDCELIVKAMQGLLKDGNPIPSAIAANSGIYSGGSSGGSSGSETPGTSESATPESSGGSSGGSSTAP | |
| | LEEEYRLFLEAPIQNVTLLEQWKREIPKVWAEINPPGLASTQAPIHVQLLSTALPVRVRQYPITLEAKRSLRETIRKFRAAGILRPVHSPWNTPLLPVRKSGTSEY | |
| | RMVQDLREVNKRVETIHPTVPNPYTLLSLLPPDRIWYSVLDLKDAFFCIPLAPESQLIFAFEWADAEEGESGQLTWTRLPQGFKNSPTLFNEALNRDLQGFRL | |
| | DHPSVSLLQYVDDLLIAADTQAACLSATRDLLMTLAELGYRVSGKKAQLCQEEVTYLGFKIHKGSRSLSNSRTQAILQIPVPKTKRQVREFLGKIGYCRLFIPGF | |
| | AELAQPLYAATRPGNDPLVWGEKEEEAFQSLKLALTQPPALALPSLDKPFQLFVEETSGAAKGVLTQALGPWKRPVAYLSKRLDPVAAGWPRCLRAIAAAAL | |
| | LTREASKLTFGQDIEITSSHNLESLLRSPPDKWLTNARITQYQVLLLDPPRVRFKQTAALNPATLLPETDDTLPIHHCLDTLDSLTSTRPDLTDQPLAQAEATLFT | |
| | DGSSYIRDGKRYAGAAVVTLDSVIWAEPLPIGTSAQKAELIALTKALEWSKDKSVNIYTDSRYAFATLHVHGMIYRERGWLTAGGKAIKNAPEILALLTAVWL | |
| | PKRVAVMHCKGHQKDDAPTSTGNRRADEVAREVAIRPLSTQATISKRTADGSEFESPKKKAKVE | |
| PL11983 | MPAAKRVKLDGGDKKYSIGLDIGTNSVGWAVITDEYKVPSKKFKVLGNTDRHSIKKNLIGALLFDSGETAEATRLKRTARRRYTRRKNRICYLQEIFSNEMAKV | 16,043 |
| | DDSFFHRLEESFLVEEDKKHERHPIFGNIVDEVAYHEKYPTIYHLRKKLVDSTDKADLRLIYLALAHMIKFRGHFLIEGDLNPDNSDVDKLFIQLVQTYNQLFEE | |
| | NPINASGVDAKAILSARLSKSRRLENLIAQLPGEKKNGLFGNLIALSLGLTPNFKSNFDLAEDAKLQLSKDTYDDDLDNLLAQIGDQYADLFLAAKNLSDAILLS | |
| | DILRVNTEITKAPLSASMIKRYDEHHQDLTLLKALVRQQLPEKYKEIFFDQSKNGYAGYIDGGASQEEFYKFIKPILEKMDGTEELLVKLNREDLLRKQRTFDNG | |
| | SIPHQIHLGELHAILRRQEDFYPFLKDNREKIEKILTFRIPYYVGPLARGNSRFAWMTRKSEETITPWNFEEVVDKGASAQSFIERMTNFDKNLPNEKVLPKHSL | |
| | LYEYFTVYNELTKVKYVTEGMRKPAFLSGEQKKAIVDLLFKTNRKVTVKQLKEDYFKKIECFDSVEISGVEDRFNASLGTYHDLLKIIKDKDFLDNEENEDILEDIV | |
| | LTLTLFEDREMIEERLKTYAHLFDDKVMKQLKRRRYTGWGRLSRKLINGIRDKQSGKTILDFLKSDGFANRNFMQLIHDDSLTFKEDIQKAQVSGQGDSLHE | |
| | HIANLAGSPAIKKGILQTVKVVDELVKVMGRHKPENIVIEMARENQTTQKGQKNSRERMKRIEEGIKELGSQILKEHPVENTQLQNEKLYLYYLQNGRDMYV | |
| | DQELDINRLSDYDVDHIVPQSFLKDDSIDNKVLTRSDKARGKSDNVPSEEVVKKMKNYWRQLLNAKLITQRKFDNLTKAERGGLSELDKAGFIKRQLVETRQI | |
| | TKHVAQILDSRMNTKYDENDKLIREVKVITLKSKLVSDFRKDFQFYKVREINNYHHAHDAYLNAVVGTALIKKYPKLESEFVYGDYKVYDVRKMIAKSEQEIGK | |
| | ATAKYFFYSNIMNFFKTEITLANGEIRKRPLIETNGETGEIVWDKGRDFATVRKVLSMPQVNIVKKTEVQTGGFSKESILPKRNSDKLIARKKDWDPKKYGGFD | |
| | SPTVAYSVLVVAKVEKGKSKKLKSVKELLGITIMERSSFEKNPIDFLEAKGYKEVKKDLIIKLPKYSLFELENGRKRMLASAGELQKGNELALPSKYVNFLYLASHY | |
| | EKLKGSPEDNEQKQLFVEQHKHYLDEIIEQISEFSKRVILADANLDKVLSAYNKHRDKPIREQAENIIHLFTLTNLGAPAAFKYFDTTIDRKRYTSTKEVLDATLIH | |
| | QSITGLYETRIDLSQLGGDGSSGGGEAAAKMASNFTQFVLVDNGGTGDVTVAPSNFANGIAEWISSNSRSQAYKVTCSVRQSSAQNRKYTIKVEVPKGAW | |
| | RSYLNMELTIPIFATNSDCELIVKAMQGLLKDGNPIPSAIAANSGIYGGSGGSMASNFTQFVLVDNGGTGDVTVAPSNFANGIAEWISSNSRSQAYKVTCSV | |
| | RQSSAQNRKYTIKVEVPKGAWRSYLNMELTIPIFATNSDCELIVKAMQGLLKDGNPIPSAIAANSGIYGSSGSSGSSGSSGSSGSSTAPLEEEYRLFLEAPIQNV | |
| | TLLEQWKREIPKVWAEINPPGLASTQAPIHVQLLSTALPVRVRQYPITLEAKRSLRETIRKFRAAGILRPVHSPWNTPLLPVRKSGTSEYRMVQDLREVNKRVE | |
| | TIHPTVPNPYTLLSLLPPDRIWYSVLDLKDAFFCIPLAPESQLIFAFEWADAEEGESGQLTWTRLPQGFKNSPTLFNEALNRDLQGFRLDHPSVSLLQYVDDLLI | |
| | AADTQAACLSATRDLLMTLAELGYRVSGKKAQLCQEEVTYLGFKIHKGSRSLSNSRTQAILQIPVPKTKRQVREFLGKIGYCRLFIPGFAELAQPLYAATRPGN | |
| | DPLVWGEKEEEAFQSLKLALTQPPALALPSLDKPFQLFVEETSGAAKGVLTQALGPWKRPVAYLSKRLDPVAAGWPRCLRAIAAAALLTREASKLTFGQDIEI | |
| | TSSHNLESLLRSPPDKWLTNARITQYQVLLLDPPRVRFKQTAALNPATLLPETDDTLPIHHCLDTLDSLTSTRPDLTDQPLAQAEATLFTDGSSYIRDGKRYAGA | |
| | AVVTLDSVIWAEPLPIGTSAQKAELIALTKALEWSKDKSVNIYTDSRYAFATLHVHGMIYRERGWLTAGGKAIKNAPEILALLTAVWLPKRVAVMHCKGHQK | |
| | DDAPTSTGNRRADEVAREVAIRPLSTQATISKRTADGSEFESPKKKAKVE | |
| PL11984 | MPAAKRVKLDGGDKKYSIGLDIGTNSVGWAVITDEYKVPSKKFKVLGNTDRHSIKKNLIGALLFDSGETAEATRLKRTARRRYTRRKNRICYLQEIFSNEMAKV | 16,044 |
| | DDSFFHRLEESFLVEEDKKHERHPIFGNIVDEVAYHEKYPTIYHLRKKLVDSTDKADLRLIYLALAHMIKFRGHFLIEGDLNPDNSDVDKLFIQLVQTYNQLFEE | |
| | NPINASGVDAKAILSARLSKSRRLENLIAQLPGEKKNGLFGNLIALSLGLTPNFKSNFDLAEDAKLQLSKDTYDDDLDNLLAQIGDQYADLFLAAKNLSDAILLS | |
| | DILRVNTEITKAPLSASMIKRYDEHHQDLTLLKALVRQQLPEKYKEIFFDQSKNGYAGYIDGGASQEEFYKFIKPILEKMDGTEELLVKLNREDLLRKQRTFDNG | |
| | SIPHQIHLGELHAILRRQEDFYPFLKDNREKIEKILTFRIPYYVGPLARGNSRFAWMTRKSEETITPWNFEEVVDKGASAQSFIERMTNFDKNLPNEKVLPKHSL | |
| | LYEYFTVYNELTKVKYVTEGMRKPAFLSGEQKKAIVDLLFKTNRKVTVKQLKEDYFKKIECFDSVEISGVEDRFNASLGTYHDLLKIIKDKDFLDNEENEDILEDIV | |
| | LTLTLFEDREMIEERLKTYAHLFDDKVMKQLKRRRYTGWGRLSRKLINGIRDKQSGKTILDFLKSDGFANRNFMQLIHDDSLTFKEDIQKAQVSGQGDSLHE | |
| | HIANLAGSPAIKKGILQTVKVVDELVKVMGRHKPENIVIEMARENQTTQKGQKNSRERMKRIEEGIKELGSQILKEHPVENTQLQNEKLYLYYLQNGRDMYV | |
| | DQELDINRLSDYDVDHIVPQSFLKDDSIDNKVLTRSDKARGKSDNVPSEEVVKKMKNYWRQLLNAKLITQRKFDNLTKAERGGLSELDKAGFIKRQLVETRQI | |
| | TKHVAQILDSRMNTKYDENDKLIREVKVITLKSKLVSDFRKDFQFYKVREINNYHHAHDAYLNAVVGTALIKKYPKLESEFVYGDYKVYDVRKMIAKSEQEIGK | |
| | ATAKYFFYSNIMNFFKTEITLANGEIRKRPLIETNGETGEIVWDKGRDFATVRKVLSMPQVNIVKKTEVQTGGFSKESILPKRNSDKLIARKKDWDPKKYGGFD | |
| | SPTVAYSVLVVAKVEKGKSKKLKSVKELLGITIMERSSFEKNPIDFLEAKGYKEVKKDLIIKLPKYSLFELENGRKRMLASAGELQKGNELALPSKYVNFLYLASHY | |
| | EKLKGSPEDNEQKQLFVEQHKHYLDEIIEQISEFSKRVILADANLDKVLSAYNKHRDKPIREQAENIIHLFTLTNLGAPAAFKYFDTTIDRKRYTSTKEVLDATLIH | |
| | QSITGLYETRIDLSQLGGDGSSGGGEAAAKMASNFTQFVLVDNGGTGDVTVAPSNFANGIAEWISSNSRSQAYKVTCSVRQSSAQNRKYTIKVEVPKGAW | |
| | RSYLNMELTIPIFATNSDCELIVKAMQGLLKDGNPIPSAIAANSGIYGGSGGSMASNFTQFVLVDNGGTGDVTVAPSNFANGIAEWISSNSRSQAYKVTCSV | |
| | RQSSAQNRKYTIKVEVPKGAWRSYLNMELTIPIFATNSDCELIVKAMQGLLKDGNPIPSAIAANSGIYGSSGGGEAAAKTAPLEEEYRLFLEAPIQNVTLLEQW | |
| | KREIPKVWAEINPPGLASTQAPIHVQLLSTALPVRVRQYPITLEAKRSLRETIRKFRAAGILRPVHSPWNTPLLPVRKSGTSEYRMVQDLREVNKRVETIHPTVP | |
| | NPYTLLSLLPPDRIWYSVLDLKDAFFCIPLAPESQLIFAFEWADAEEGESGQLTWTRLPQGFKNSPTLFNEALNRDLQGFRLDHPSVSLLQYVDDLLIAADTQA | |
| | ACLSATRDLLMTLAELGYRVSGKKAQLCQEEVTYLGFKIHKGSRSLSNSRTQAILQIPVPKTKRQVREFLGKIGYCRLFIPGFAELAQPLYAATRPGNDPLVWG | |
| | EKEEEAFQSLKLALTQPPALALPSLDKPFQLFVEETSGAAKGVLTQALGPWKRPVAYLSKRLDPVAAGWPRCLRAIAAAALLTREASKLTFGQDIEITSSHNLES | |
| | LLRSPPDKWLTNARITQYQVLLLDPPRVRFKQTAALNPATLLPETDDTLPIHHCLDTLDSLTSTRPDLTDQPLAQAEATLFTDGSSYIRDGKRYAGAAVVTLDS | |
| | VIWAEPLPIGTSAQKAELIALTKALEWSKDKSVNIYTDSRYAFATLHVHGMIYRERGWLTAGGKAIKNAPEILALLTAVWLPKRVAVMHCKGHQKDDAPTST | |
| | GNRRADEVAREVAIRPLSTQATISKRTADGSEFESPKKKAKVE | |
| PL11985 | MPAAKRVKLDGGDKKYSIGLDIGTNSVGWAVITDEYKVPSKKFKVLGNTDRHSIKKNLIGALLFDSGETAEATRLKRTARRRYTRRKNRICYLQEIFSNEMAKV | 16,045 |
| | DDSFFHRLEESFLVEEDKKHERHPIFGNIVDEVAYHEKYPTIYHLRKKLVDSTDKADLRLIYLALAHMIKFRGHFLIEGDLNPDNSDVDKLFIQLVQTYNQLFEE | |
| | NPINASGVDAKAILSARLSKSRRLENLIAQLPGEKKNGLFGNLIALSLGLTPNFKSNFDLAEDAKLQLSKDTYDDDLDNLLAQIGDQYADLFLAAKNLSDAILLS | |
| | DILRVNTEITKAPLSASMIKRYDEHHQDLTLLKALVRQQLPEKYKEIFFDQSKNGYAGYIDGGASQEEFYKFIKPILEKMDGTEELLVKLNREDLLRKQRTFDNG | |
| | SIPHQIHLGELHAILRRQEDFYPFLKDNREKIEKILTFRIPYYVGPLARGNSRFAWMTRKSEETITPWNFEEVVDKGASAQSFIERMTNFDKNLPNEKVLPKHSL | |
| | LYEYFTVYNELTKVKYVTEGMRKPAFLSGEQKKAIVDLLFKTNRKVTVKQLKEDYFKKIECFDSVEISGVEDRFNASLGTYHDLLKIIKDKDFLDNEENEDILEDIV | |
| | LTLTLFEDREMIEERLKTYAHLFDDKVMKQLKRRRYTGWGRLSRKLINGIRDKQSGKTILDFLKSDGFANRNFMQLIHDDSLTFKEDIQKAQVSGQGDSLHE | |
| | HIANLAGSPAIKKGILQTVKVVDELVKVMGRHKPENIVIEMARENQTTQKGQKNSRERMKRIEEGIKELGSQILKEHPVENTQLQNEKLYLYYLQNGRDMYV | |
| | DQELDINRLSDYDVDHIVPQSFLKDDSIDNKVLTRSDKARGKSDNVPSEEVVKKMKNYWRQLLNAKLITQRKFDNLTKAERGGLSELDKAGFIKRQLVETRQI | |
| | TKHVAQILDSRMNTKYDENDKLIREVKVITLKSKLVSDFRKDFQFYKVREINNYHHAHDAYLNAVVGTALIKKYPKLESEFVYGDYKVYDVRKMIAKSEQEIGK | |
| | ATAKYFFYSNIMNFFKTEITLANGEIRKRPLIETNGETGEIVWDKGRDFATVRKVLSMPQVNIVKKTEVQTGGFSKESILPKRNSDKLIARKKDWDPKKYGGFD | |
| | SPTVAYSVLVVAKVEKGKSKKLKSVKELLGITIMERSSFEKNPIDFLEAKGYKEVKKDLIIKLPKYSLFELENGRKRMLASAGELQKGNELALPSKYVNFLYLASHY | |
| | EKLKGSPEDNEQKQLFVEQHKHYLDEIIEQISEFSKRVILADANLDKVLSAYNKHRDKPIREQAENIIHLFTLTNLGAPAAFKYFDTTIDRKRYTSTKEVLDATLIH | |
| | QSITGLYETRIDLSQLGGDGSSGGGEAAAKMASNFTQFVLVDNGGTGDVTVAPSNFANGIAEWISSNSRSQAYKVTCSVRQSSAQNRKYTIKVEVPKGAW | |
| | RSYLNMELTIPIFATNSDCELIVKAMQGLLKDGNPIPSAIAANSGIYGGSGGSMASNFTQFVLVDNGGTGDVTVAPSNFANGIAEWISSNSRSQAYKVTCSV | |
| | RQSSAQNRKYTIKVEVPKGAWRSYLNMELTIPIFATNSDCELIVKAMQGLLKDGNPIPSAIAANSGIYGGGSGGGSGGGSGGGSMASNFTQFVLVDNGGT | |
| | GDVTVAPSNFANGIAEWISSNSRSQAYKVTCSVRQSSAQNRKYTIKVEVPKGAWRSYLNMELTIPIFATNSDCELIVKAMQGLLKDGNPIPSAIAANSGIYGG | |
| | SGGSMASNFTQFVLVDNGGTGDVTVAPSNFANGIAEWISSNSRSQAYKVTCSVRQSSAQNRKYTIKVEVPKGAWRSYLNMELTIPIFATNSDCELIVKAMQ | |
| | GLLKDGNPIPSAIAANSGIYAEAAAKEAAAKEAAAKEAAAKALEAEAAAKEAAAKEAAAKEAAAKATAPLEEEYRLFLEAPIQNVTLLEQWKREIPKVWAEIN | |
| | PPGLASTQAPIHVQLLSTALPVRVRQYPITLEAKRSLRETIRKFRAAGILRPVHSPWNTPLLPVRKSGTSEYRMVQDLREVNKRVETIHPTVPNPYTLLSLLPPD | |
| | RIWYSVLDLKDAFFCIPLAPESQLIFAFEWADAEEGESGQLTWTRLPQGFKNSPTLFNEALNRDLQGFRLDHPSVSLLQYVDDLLIAADTQAACLSATRDLLM | |
| | TLAELGYRVSGKKAQLCQEEVTYLGFKIHKGSRSLSNSRTQAILQIPVPKTKRQVREFLGKIGYCRLFIPGFAELAQPLYAATRPGNDPLVWGEKEEEAFQSLKL | |
| | ALTQPPALALPSLDKPFQLFVEETSGAAKGVLTQALGPWKRPVAYLSKRLDPVAAGWPRCLRAIAAAALLTREASKLTFGQDIEITSSHNLESLLRSPPDKWLT | |
| | NARITQYQVLLLDPPRVRFKQTAALNPATLLPETDDTLPIHHCLDTLDSLTSTRPDLTDQPLAQAEATLFTDGSSYIRDGKRYAGAAVVTLDSVIWAEPLPIGTS | |
| | AQKAELIALTKALEWSKDKSVNIYTDSRYAFATLHVHGMIYRERGWLTAGGKAIKNAPEILALLTAVWLPKRVAVMHCKGHQKDDAPTSTGNRRADEVAR | |
| | EVAIRPLSTQATISKRTADGSEFESPKKKAKVE | |
| PL11986 | MPAAKRVKLDGGDKKYSIGLDIGTNSVGWAVITDEYKVPSKKFKVLGNTDRHSIKKNLIGALLFDSGETAEATRLKRTARRRYTRRKNRICYLQEIFSNEMAKV | 16,046 |
| | DDSFFHRLEESFLVEEDKKHERHPIFGNIVDEVAYHEKYPTIYHLRKKLVDSTDKADLRLIYLALAHMIKFRGHFLIEGDLNPDNSDVDKLFIQLVQTYNQLFEE | |
| | NPINASGVDAKAILSARLSKSRRLENLIAQLPGEKKNGLFGNLIALSLGLTPNFKSNFDLAEDAKLQLSKDTYDDDLDNLLAQIGDQYADLFLAAKNLSDAILLS | |
| | DILRVNTEITKAPLSASMIKRYDEHHQDLTLLKALVRQQLPEKYKEIFFDQSKNGYAGYIDGGASQEEFYKFIKPILEKMDGTEELLVKLNREDLLRKQRTFDNG | |
| | SIPHQIHLGELHAILRRQEDFYPFLKDNREKIEKILTFRIPYYVGPLARGNSRFAWMTRKSEETITPWNFEEVVDKGASAQSFIERMTNFDKNLPNEKVLPKHSL | |
| | LYEYFTVYNELTKVKYVTEGMRKPAFLSGEQKKAIVDLLFKTNRKVTVKQLKEDYFKKIECFDSVEISGVEDRFNASLGTYHDLLKIIKDKDFLDNEENEDILEDIV | |
| | LTLTLFEDREMIEERLKTYAHLFDDKVMKQLKRRRYTGWGRLSRKLINGIRDKQSGKTILDFLKSDGFANRNFMQLIHDDSLTFKEDIQKAQVSGQGDSLHE | |
| | HIANLAGSPAIKKGILQTVKVVDELVKVMGRHKPENIVIEMARENQTTQKGQKNSRERMKRIEEGIKELGSQILKEHPVENTQLQNEKLYLYYLQNGRDMYV | |
| | DQELDINRLSDYDVDHIVPQSFLKDDSIDNKVLTRSDKARGKSDNVPSEEVVKKMKNYWRQLLNAKLITQRKFDNLTKAERGGLSELDKAGFIKRQLVETRQI | |
| | TKHVAQILDSRMNTKYDENDKLIREVKVITLKSKLVSDFRKDFQFYKVREINNYHHAHDAYLNAVVGTALIKKYPKLESEFVYGDYKVYDVRKMIAKSEQEIGK | |
| | ATAKYFFYSNIMNFFKTEITLANGEIRKRPLIETNGETGEIVWDKGRDFATVRKVLSMPQVNIVKKTEVQTGGFSKESILPKRNSDKLIARKKDWDPKKYGGFD | |
| | SPTVAYSVLVVAKVEKGKSKKLKSVKELLGITIMERSSFEKNPIDFLEAKGYKEVKKDLIIKLPKYSLFELENGRKRMLASAGELQKGNELALPSKYVNFLYLASHY | |
| | EKLKGSPEDNEQKQLFVEQHKHYLDEIIEQISEFSKRVILADANLDKVLSAYNKHRDKPIREQAENIIHLFTLTNLGAPAAFKYFDTTIDRKRYTSTKEVLDATLIH | |
| | QSITGLYETRIDLSQLGGDGSSGGGEAAAKMASNFTQFVLVDNGGTGDVTVAPSNFANGIAEWISSNSRSQAYKVTCSVRQSSAQNRKYTIKVEVPKGAW | |
| | RSYLNMELTIPIFATNSDCELIVKAMQGLLKDGNPIPSAIAANSGIYGGSGGSMASNFTQFVLVDNGGTGDVTVAPSNFANGIAEWISSNSRSQAYKVTCSV | |
| | RQSSAQNRKYTIKVEVPKGAWRSYLNMELTIPIFATNSDCELIVKAMQGLLKDGNPIPSAIAANSGIYGGGSGGGSGGGSGGGSMASNFTQFVLVDNGGT | |
| | GDVTVAPSNFANGIAEWISSNSRSQAYKVTCSVRQSSAQNRKYTIKVEVPKGAWRSYLNMELTIPIFATNSDCELIVKAMQGLLKDGNPIPSAIAANSGIYGG | |
| | SGGSMASNFTQFVLVDNGGTGDVTVAPSNFANGIAEWISSNSRSQAYKVTCSVRQSSAQNRKYTIKVEVPKGAWRSYLNMELTIPIFATNSDCELIVKAMQ | |
| | GLLKDGNPIPSAIAANSGIYSGGSSGGSSGSETPGTSESATPESSGGSSGGSSTAPLEEEYRLFLEAPIQNVTLLEQWKREIPKVWAEINPPGLASTQAPIHVQL | |
| | LSTALPVRVRQYPITLEAKRSLRETIRKFRAAGILRPVHSPWNTPLLPVRKSGTSEYRMVQDLREVNKRVETIHPTVPNPYTLLSLLPPDRIWYSVLDLKDAFFCI | |
| | PLAPESQLIFAFEWADAEEGESGQLTWTRLPQGFKNSPTLFNEALNRDLQGFRLDHPSVSLLQYVDDLLIAADTQAACLSATRDLLMTLAELGYRVSGKKAQ | |
| | LCQEEVTYLGFKIHKGSRSLSNSRTQAILQIPVPKTKRQVREFLGKIGYCRLFIPGFAELAQPLYAATRPGNDPLVWGEKEEEAFQSLKLALTQPPALALPSLDKP | |
| | FQLFVEETSGAAKGVLTQALGPWKRPVAYLSKRLDPVAAGWPRCLRAIAAAALLTREASKLTFGQDIEITSSHNLESLLRSPPDKWLTNARITQYQVLLLDPPR | |
| | VRFKQTAALNPATLLPETDDTLPIHHCLDTLDSLTSTRPDLTDQPLAQAEATLFTDGSSYIRDGKRYAGAAVVTLDSVIWAEPLPIGTSAQKAELIALTKALEWS | |
| | KDKSVNIYTDSRYAFATLHVHGMIYRERGWLTAGGKAIKNAPEILALLTAVWLPKRVAVMHCKGHQKDDAPTSTGNRRADEVAREVAIRPLSTQATISKRT | |
| | ADGSEFESPKKKAKVE | |
| PL11987 | MPAAKRVKLDGGDKKYSIGLDIGTNSVGWAVITDEYKVPSKKFKVLGNTDRHSIKKNLIGALLFDSGETAEATRLKRTARRRYTRRKNRICYLQEIFSNEMAKV | 16,047 |
| | DDSFFHRLEESFLVEEDKKHERHPIFGNIVDEVAYHEKYPTIYHLRKKLVDSTDKADLRLIYLALAHMIKFRGHFLIEGDLNPDNSDVDKLFIQLVQTYNQLFEE | |
| | NPINASGVDAKAILSARLSKSRRLENLIAQLPGEKKNGLFGNLIALSLGLTPNFKSNFDLAEDAKLQLSKDTYDDDLDNLLAQIGDQYADLFLAAKNLSDAILLS | |
| | DILRVNTEITKAPLSASMIKRYDEHHQDLTLLKALVRQQLPEKYKEIFFDQSKNGYAGYIDGGASQEEFYKFIKPILEKMDGTEELLVKLNREDLLRKQRTFDNG | |
| | SIPHQIHLGELHAILRRQEDFYPFLKDNREKIEKILTFRIPYYVGPLARGNSRFAWMTRKSEETITPWNFEEVVDKGASAQSFIERMTNFDKNLPNEKVLPKHSL | |
| | LYEYFTVYNELTKVKYVTEGMRKPAFLSGEQKKAIVDLLFKTNRKVTVKQLKEDYFKKIECFDSVEISGVEDRFNASLGTYHDLLKIIKDKDFLDNEENEDILEDIV | |
| | LTLTLFEDREMIEERLKTYAHLFDDKVMKQLKRRRYTGWGRLSRKLINGIRDKQSGKTILDFLKSDGFANRNFMQLIHDDSLTFKEDIQKAQVSGQGDSLHE | |
| | HIANLAGSPAIKKGILQTVKVVDELVKVMGRHKPENIVIEMARENQTTQKGQKNSRERMKRIEEGIKELGSQILKEHPVENTQLQNEKLYLYYLQNGRDMYV | |
| | DQELDINRLSDYDVDHIVPQSFLKDDSIDNKVLTRSDKARGKSDNVPSEEVVKKMKNYWRQLLNAKLITQRKFDNLTKAERGGLSELDKAGFIKRQLVETRQI | |
| | TKHVAQILDSRMNTKYDENDKLIREVKVITLKSKLVSDFRKDFQFYKVREINNYHHAHDAYLNAVVGTALIKKYPKLESEFVYGDYKVYDVRKMIAKSEQEIGK | |
| | ATAKYFFYSNIMNFFKTEITLANGEIRKRPLIETNGETGEIVWDKGRDFATVRKVLSMPQVNIVKKTEVQTGGFSKESILPKRNSDKLIARKKDWDPKKYGGFD | |
| | SPTVAYSVLVVAKVEKGKSKKLKSVKELLGITIMERSSFEKNPIDFLEAKGYKEVKKDLIIKLPKYSLFELENGRKRMLASAGELQKGNELALPSKYVNFLYLASHY | |
| | EKLKGSPEDNEQKQLFVEQHKHYLDEIIEQISEFSKRVILADANLDKVLSAYNKHRDKPIREQAENIIHLFTLTNLGAPAAFKYFDTTIDRKRYTSTKEVLDATLIH | |
| | QSITGLYETRIDLSQLGGDGSSGGGEAAAKMASNFTQFVLVDNGGTGDVTVAPSNFANGIAEWISSNSRSQAYKVTCSVRQSSAQNRKYTIKVEVPKGAW | |
| | RSYLNMELTIPIFATNSDCELIVKAMQGLLKDGNPIPSAIAANSGIYGGSGGSMASNFTQFVLVDNGGTGDVTVAPSNFANGIAEWISSNSRSQAYKVTCSV | |
| | RQSSAQNRKYTIKVEVPKGAWRSYLNMELTIPIFATNSDCELIVKAMQGLLKDGNPIPSAIAANSGIYGGGSGGGSGGGSGGGSMASNFTQFVLVDNGGT | |
| | GDVTVAPSNFANGIAEWISSNSRSQAYKVTCSVRQSSAQNRKYTIKVEVPKGAWRSYLNMELTIPIFATNSDCELIVKAMQGLLKDGNPIPSAIAANSGIYGG | |
| | SGGSMASNFTQFVLVDNGGTGDVTVAPSNFANGIAEWISSNSRSQAYKVTCSVRQSSAQNRKYTIKVEVPKGAWRSYLNMELTIPIFATNSDCELIVKAMQ | |
| | GLLKDGNPIPSAIAANSGIYGSSGSSGSSGSSGSSGSSTAPLEEEYRLFLEAPIQNVTLLEQWKREIPKVWAEINPPGLASTQAPIHVQLLSTALPVRVRQYPITL | |
| | EAKRSLRETIRKFRAAGILRPVHSPWNTPLLPVRKSGTSEYRMVQDLREVNKRVETIHPTVPNPYTLLSLLPPDRIWYSVLDLKDAFFCIPLAPESQLIFAFEWA | |
| | DAEEGESGQLTWTRLPQGFKNSPTLFNEALNRDLQGFRLDHPSVSLLQYVDDLLIAADTQAACLSATRDLLMTLAELGYRVSGKKAQLCQEEVTYLGFKIHK | |
| | GSRSLSNSRTQAILQIPVPKTKRQVREFLGKIGYCRLFIPGFAELAQPLYAATRPGNDPLVWGEKEEEAFQSLKLALTQPPALALPSLDKPFQLFVEETSGAAKG | |
| | VLTQALGPWKRPVAYLSKRLDPVAAGWPRCLRAIAAAALLTREASKLTFGQDIEITSSHNLESLLRSPPDKWLTNARITQYQVLLLDPPRVRFKQTAALNPATL | |
| | LPETDDTLPIHHCLDTLDSLTSTRPDLTDQPLAQAEATLFTDGSSYIRDGKRYAGAAVVTLDSVIWAEPLPIGTSAQKAELIALTKALEWSKDKSVNIYTDSRYA | |
| | FATLHVHGMIYRERGWLTAGGKAIKNAPEILALLTAVWLPKRVAVMHCKGHQKDDAPTSTGNRRADEVAREVAIRPLSTQATISKRTADGSEFESPKKKAK | |
| | VE | |
| PL11988 | MPAAKRVKLDGGDKKYSIGLDIGTNSVGWAVITDEYKVPSKKFKVLGNTDRHSIKKNLIGALLFDSGETAEATRLKRTARRRYTRRKNRICYLQEIFSNEMAKV | 16,048 |
| | DDSFFHRLEESFLVEEDKKHERHPIFGNIVDEVAYHEKYPTIYHLRKKLVDSTDKADLRLIYLALAHMIKFRGHFLIEGDLNPDNSDVDKLFIQLVQTYNQLFEE | |
| | NPINASGVDAKAILSARLSKSRRLENLIAQLPGEKKNGLFGNLIALSLGLTPNFKSNFDLAEDAKLQLSKDTYDDDLDNLLAQIGDQYADLFLAAKNLSDAILLS | |
| | DILRVNTEITKAPLSASMIKRYDEHHQDLTLLKALVRQQLPEKYKEIFFDQSKNGYAGYIDGGASQEEFYKFIKPILEKMDGTEELLVKLNREDLLRKQRTFDNG | |
| | SIPHQIHLGELHAILRRQEDFYPFLKDNREKIEKILTFRIPYYVGPLARGNSRFAWMTRKSEETITPWNFEEVVDKGASAQSFIERMTNFDKNLPNEKVLPKHSL | |
| | LYEYFTVYNELTKVKYVTEGMRKPAFLSGEQKKAIVDLLFKTNRKVTVKQLKEDYFKKIECFDSVEISGVEDRFNASLGTYHDLLKIIKDKDFLDNEENEDILEDIV | |
| | LTLTLFEDREMIEERLKTYAHLFDDKVMKQLKRRRYTGWGRLSRKLINGIRDKQSGKTILDFLKSDGFANRNFMQLIHDDSLTFKEDIQKAQVSGQGDSLHE | |
| | HIANLAGSPAIKKGILQTVKVVDELVKVMGRHKPENIVIEMARENQTTQKGQKNSRERMKRIEEGIKELGSQILKEHPVENTQLQNEKLYLYYLQNGRDMYV | |
| | DQELDINRLSDYDVDHIVPQSFLKDDSIDNKVLTRSDKARGKSDNVPSEEVVKKMKNYWRQLLNAKLITQRKFDNLTKAERGGLSELDKAGFIKRQLVETRQI | |
| | TKHVAQILDSRMNTKYDENDKLIREVKVITLKSKLVSDFRKDFQFYKVREINNYHHAHDAYLNAVVGTALIKKYPKLESEFVYGDYKVYDVRKMIAKSEQEIGK | |
| | ATAKYFFYSNIMNFFKTEITLANGEIRKRPLIETNGETGEIVWDKGRDFATVRKVLSMPQVNIVKKTEVQTGGFSKESILPKRNSDKLIARKKDWDPKKYGGFD | |
| | SPTVAYSVLVVAKVEKGKSKKLKSVKELLGITIMERSSFEKNPIDFLEAKGYKEVKKDLIIKLPKYSLFELENGRKRMLASAGELQKGNELALPSKYVNFLYLASHY | |
| | EKLKGSPEDNEQKQLFVEQHKHYLDEIIEQISEFSKRVILADANLDKVLSAYNKHRDKPIREQAENIIHLFTLTNLGAPAAFKYFDTTIDRKRYTSTKEVLDATLIH | |
| | QSITGLYETRIDLSQLGGDGSSGGGEAAAKMASNFTQFVLVDNGGTGDVTVAPSNFANGIAEWISSNSRSQAYKVTCSVRQSSAQNRKYTIKVEVPKGAW | |
| | RSYLNMELTIPIFATNSDCELIVKAMQGLLKDGNPIPSAIAANSGIYGGSGGSMASNFTQFVLVDNGGTGDVTVAPSNFANGIAEWISSNSRSQAYKVTCSV | |
| | RQSSAQNRKYTIKVEVPKGAWRSYLNMELTIPIFATNSDCELIVKAMQGLLKDGNPIPSAIAANSGIYGGGSGGGSGGGSGGGSMASNFTQFVLVDNGGT | |
| | GDVTVAPSNFANGIAEWISSNSRSQAYKVTCSVRQSSAQNRKYTIKVEVPKGAWRSYLNMELTIPIFATNSDCELIVKAMQGLLKDGNPIPSAIAANSGIYGG | |
| | SGGSMASNFTQFVLVDNGGTGDVTVAPSNFANGIAEWISSNSRSQAYKVTCSVRQSSAQNRKYTIKVEVPKGAWRSYLNMELTIPIFATNSDCELIVKAMQ | |
| | GLLKDGNPIPSAIAANSGIYGSSGGGEAAAKTAPLEEEYRLFLEAPIQNVTLLEQWKREIPKVWAEINPPGLASTQAPIHVQLLSTALPVRVRQYPITLEAKRSL | |
| | RETIRKFRAAGILRPVHSPWNTPLLPVRKSGTSEYRMVQDLREVNKRVETIHPTVPNPYTLLSLLPPDRIWYSVLDLKDAFFCIPLAPESQLIFAFEWADAEEGE | |
| | SGQLTWTRLPQGFKNSPTLFNEALNRDLQGFRLDHPSVSLLQYVDDLLIAADTQAACLSATRDLLMTLAELGYRVSGKKAQLCQEEVTYLGFKIHKGSRSLSN | |
| | SRTQAILQIPVPKTKRQVREFLGKIGYCRLFIPGFAELAQPLYAATRPGNDPLVWGEKEEEAFQSLKLALTQPPALALPSLDKPFQLFVEETSGAAKGVLTQALG | |
| | PWKRPVAYLSKRLDPVAAGWPRCLRAIAAAALLTREASKLTFGQDIEITSSHNLESLLRSPPDKWLTNARITQYQVLLLDPPRVRFKQTAALNPATLLPETDDT | |
| | LPIHHCLDTLDSLTSTRPDLTDQPLAQAEATLFTDGSSYIRDGKRYAGAAVVTLDSVIWAEPLPIGTSAQKAELIALTKALEWSKDKSVNIYTDSRYAFATLHVH | |
| | GMIYRERGWLTAGGKAIKNAPEILALLTAVWLPKRVAVMHCKGHQKDDAPTSTGNRRADEVAREVAIRPLSTQATISKRTADGSEFESPKKKAKVE | |
| PL11989 | MPAAKRVKLDGGDKKYSIGLDIGTNSVGWAVITDEYKVPSKKFKVLGNTDRHSIKKNLIGALLFDSGETAEATRLKRTARRRYTRRKNRICYLQEIFSNEMAKV | 16,049 |
| | DDSFFHRLEESFLVEEDKKHERHPIFGNIVDEVAYHEKYPTIYHLRKKLVDSTDKADLRLIYLALAHMIKFRGHFLIEGDLNPDNSDVDKLFIQLVQTYNQLFEE | |
| | NPINASGVDAKAILSARLSKSRRLENLIAQLPGEKKNGLFGNLIALSLGLTPNFKSNFDLAEDAKLQLSKDTYDDDLDNLLAQIGDQYADLFLAAKNLSDAILLS | |
| | DILRVNTEITKAPLSASMIKRYDEHHQDLTLLKALVRQQLPEKYKEIFFDQSKNGYAGYIDGGASQEEFYKFIKPILEKMDGTEELLVKLNREDLLRKQRTFDNG | |
| | SIPHQIHLGELHAILRRQEDFYPFLKDNREKIEKILTFRIPYYVGPLARGNSRFAWMTRKSEETITPWNFEEVVDKGASAQSFIERMTNFDKNLPNEKVLPKHSL | |
| | LYEYFTVYNELTKVKYVTEGMRKPAFLSGEQKKAIVDLLFKTNRKVTVKQLKEDYFKKIECFDSVEISGVEDRFNASLGTYHDLLKIIKDKDFLDNEENEDILEDIV | |
| | LTLTLFEDREMIEERLKTYAHLFDDKVMKQLKRRRYTGWGRLSRKLINGIRDKQSGKTILDFLKSDGFANRNFMQLIHDDSLTFKEDIQKAQVSGQGDSLHE | |
| | HIANLAGSPAIKKGILQTVKVVDELVKVMGRHKPENIVIEMARENQTTQKGQKNSRERMKRIEEGIKELGSQILKEHPVENTQLQNEKLYLYYLQNGRDMYV | |
| | DQELDINRLSDYDVDHIVPQSFLKDDSIDNKVLTRSDKARGKSDNVPSEEVVKKMKNYWRQLLNAKLITQRKFDNLTKAERGGLSELDKAGFIKRQLVETRQI | |
| | TKHVAQILDSRMNTKYDENDKLIREVKVITLKSKLVSDFRKDFQFYKVREINNYHHAHDAYLNAVVGTALIKKYPKLESEFVYGDYKVYDVRKMIAKSEQEIGK | |
| | ATAKYFFYSNIMNFFKTEITLANGEIRKRPLIETNGETGEIVWDKGRDFATVRKVLSMPQVNIVKKTEVQTGGFSKESILPKRNSDKLIARKKDWDPKKYGGFD | |
| | SPTVAYSVLVVAKVEKGKSKKLKSVKELLGITIMERSSFEKNPIDFLEAKGYKEVKKDLIIKLPKYSLFELENGRKRMLASAGELQKGNELALPSKYVNFLYLASHY | |
| | EKLKGSPEDNEQKQLFVEQHKHYLDEIIEQISEFSKRVILADANLDKVLSAYNKHRDKPIREQAENIIHLFTLTNLGAPAAFKYFDTTIDRKRYTSTKEVLDATLIH | |
| | QSITGLYETRIDLSQLGGDAEAAAKEAAAKEAAAKEAAAKALEAEAAAKEAAAKEAAAKEAAAKAMASNFTQFVLVDNGGTGDVTVAPSNFANGIAEWIS | |
| | SNSRSQAYKVTCSVRQSSAQNRKYTIKVEVPKGAWRSYLNMELTIPIFATNSDCELIVKAMQGLLKDGNPIPSAIAANSGIYAEAAAKEAAAKEAAAKEAAAK | |
| | ALEAEAAAKEAAAKEAAAKEAAAKATLNIEDEHRLHETSKEPDVSLGSTWLSDFPQAWAETGGMGLAVRQAPLIIPLKATSTPVSIKQYPMSQEARLGIKPHI | |
| | QRLLDQGILVPCQSPWNTPLLPVKKPGTNDYRPVQDLREVNKRVEDIHPTVPNPYNLLSGLPPSHQWYTVLDLKDAFFCLRLHPTSQPLFAFEWRDPEMGI | |
| | SGQLTWTRLPQGFKNSPTLFNEALHRDLADFRIQHPDLILLQYVDDLLLAATSELDCQQGTRALLQTLGNLGYRASAKKAQICQKQVKYLGYLLKEGQRWLT | |
| | EARKETVMGQPTPKTPRQLREFLGKAGFCRLFIPGFAEMAAPLYPLTKPGTLFNWGPDQQKAYQEIKQALLTAPALGLPDLTKPFELFVDEKQGYAKGVLTQ | |
| | KLGPWRRPVAYLSKKLDPVAAGWPPCLRMVAAIAVLTKDAGKLTMGQPLVILAPHAVEALVKQPPDRWLSNARMTHYQALLLDTDRVQFGPVVALNPAT | |
| | LLPLPEEGLQHNCLDILAEAHGTRPDLTDQPLPDADHTWYTDGSSLLQEGQRKAGAAVTTETEVIWAKALPAGTSAQRAELIALTQALKMAEGKKLNVYTD | |
| | SRYAFATAHIHGEIYRRRGWLTSEGKEIKNKDEILALLKALFLPKRLSIIHCPGHQKGHSAEARGNRMADQAARKAAITETPDTSTLLKRTADGSEFESPKKKAK | |
| | VE | |
| PL11990 | MPAAKRVKLDGGDKKYSIGLDIGTNSVGWAVITDEYKVPSKKFKVLGNTDRHSIKKNLIGALLFDSGETAEATRLKRTARRRYTRRKNRICYLQEIFSNEMAKV | 16,050 |
| | DDSFFHRLEESFLVEEDKKHERHPIFGNIVDEVAYHEKYPTIYHLRKKLVDSTDKADLRLIYLALAHMIKFRGHFLIEGDLNPDNSDVDKLFIQLVQTYNQLFEE | |
| | NPINASGVDAKAILSARLSKSRRLENLIAQLPGEKKNGLFGNLIALSLGLTPNFKSNFDLAEDAKLQLSKDTYDDDLDNLLAQIGDQYADLFLAAKNLSDAILLS | |
| | DILRVNTEITKAPLSASMIKRYDEHHQDLTLLKALVRQQLPEKYKEIFFDQSKNGYAGYIDGGASQEEFYKFIKPILEKMDGTEELLVKLNREDLLRKQRTFDNG | |
| | SIPHQIHLGELHAILRRQEDFYPFLKDNREKIEKILTFRIPYYVGPLARGNSRFAWMTRKSEETITPWNFEEVVDKGASAQSFIERMTNFDKNLPNEKVLPKHSL | |
| | LYEYFTVYNELTKVKYVTEGMRKPAFLSGEQKKAIVDLLFKTNRKVTVKQLKEDYFKKIECFDSVEISGVEDRFNASLGTYHDLLKIIKDKDFLDNEENEDILEDIV | |
| | LTLTLFEDREMIEERLKTYAHLFDDKVMKQLKRRRYTGWGRLSRKLINGIRDKQSGKTILDFLKSDGFANRNFMQLIHDDSLTFKEDIQKAQVSGQGDSLHE | |
| | HIANLAGSPAIKKGILQTVKVVDELVKVMGRHKPENIVIEMARENQTTQKGQKNSRERMKRIEEGIKELGSQILKEHPVENTQLQNEKLYLYYLQNGRDMYV | |
| | DQELDINRLSDYDVDHIVPQSFLKDDSIDNKVLTRSDKARGKSDNVPSEEVVKKMKNYWRQLLNAKLITQRKFDNLTKAERGGLSELDKAGFIKRQLVETRQI | |
| | TKHVAQILDSRMNTKYDENDKLIREVKVITLKSKLVSDFRKDFQFYKVREINNYHHAHDAYLNAVVGTALIKKYPKLESEFVYGDYKVYDVRKMIAKSEQEIGK | |
| | ATAKYFFYSNIMNFFKTEITLANGEIRKRPLIETNGETGEIVWDKGRDFATVRKVLSMPQVNIVKKTEVQTGGFSKESILPKRNSDKLIARKKDWDPKKYGGFD | |
| | SPTVAYSVLVVAKVEKGKSKKLKSVKELLGITIMERSSFEKNPIDFLEAKGYKEVKKDLIIKLPKYSLFELENGRKRMLASAGELQKGNELALPSKYVNFLYLASHY | |
| | EKLKGSPEDNEQKQLFVEQHKHYLDEIIEQISEFSKRVILADANLDKVLSAYNKHRDKPIREQAENIIHLFTLTNLGAPAAFKYFDTTIDRKRYTSTKEVLDATLIH | |
| | QSITGLYETRIDLSQLGGDAEAAAKEAAAKEAAAKEAAAKALEAEAAAKEAAAKEAAAKEAAAKAMASNFTQFVLVDNGGTGDVTVAPSNFANGIAEWIS | |
| | SNSRSQAYKVTCSVRQSSAQNRKYTIKVEVPKGAWRSYLNMELTIPIFATNSDCELIVKAMQGLLKDGNPIPSAIAANSGIYSGGSSGGSSGSETPGTSESATP | |
| | ESSGGSSGGSSTLNIEDEHRLHETSKEPDVSLGSTWLSDFPQAWAETGGMGLAVRQAPLIIPLKATSTPVSIKQYPMSQEARLGIKPHIQRLLDQGILVPCQS | |
| | PWNTPLLPVKKPGTNDYRPVQDLREVNKRVEDIHPTVPNPYNLLSGLPPSHQWYTVLDLKDAFFCLRLHPTSQPLFAFEWRDPEMGISGQLTWTRLPQGF | |
| | KNSPTLFNEALHRDLADFRIQHPDLILLQYVDDLLLAATSELDCQQGTRALLQTLGNLGYRASAKKAQICQKQVKYLGYLLKEGQRWLTEARKETVMGQPTP | |
| | KTPRQLREFLGKAGFCRLFIPGFAEMAAPLYPLTKPGTLFNWGPDQQKAYQEIKQALLTAPALGLPDLTKPFELFVDEKQGYAKGVLTQKLGPWRRPVAYLS | |
| | KKLDPVAAGWPPCLRMVAAIAVLTKDAGKLTMGQPLVILAPHAVEALVKQPPDRWLSNARMTHYQALLLDTDRVQFGPVVALNPATLLPLPEEGLQHNC | |
| | LDILAEAHGTRPDLTDQPLPDADHTWYTDGSSLLQEGQRKAGAAVTTETEVIWAKALPAGTSAQRAELIALTQALKMAEGKKLNVYTDSRYAFATAHIHGEI | |
| | YRRRGWLTSEGKEIKNKDEILALLKALFLPKRLSIIHCPGHQKGHSAEARGNRMADQAARKAAITETPDTSTLLKRTADGSEFESPKKKAKVE | |
| PL11991 | MPAAKRVKLDGGDKKYSIGLDIGTNSVGWAVITDEYKVPSKKFKVLGNTDRHSIKKNLIGALLFDSGETAEATRLKRTARRRYTRRKNRICYLQEIFSNEMAKV | 16,051 |
| | DDSFFHRLEESFLVEEDKKHERHPIFGNIVDEVAYHEKYPTIYHLRKKLVDSTDKADLRLIYLALAHMIKFRGHFLIEGDLNPDNSDVDKLFIQLVQTYNQLFEE | |
| | NPINASGVDAKAILSARLSKSRRLENLIAQLPGEKKNGLFGNLIALSLGLTPNFKSNFDLAEDAKLQLSKDTYDDDLDNLLAQIGDQYADLFLAAKNLSDAILLS | |
| | DILRVNTEITKAPLSASMIKRYDEHHQDLTLLKALVRQQLPEKYKEIFFDQSKNGYAGYIDGGASQEEFYKFIKPILEKMDGTEELLVKLNREDLLRKQRTFDNG | |
| | SIPHQIHLGELHAILRRQEDFYPFLKDNREKIEKILTFRIPYYVGPLARGNSRFAWMTRKSEETITPWNFEEVVDKGASAQSFIERMTNFDKNLPNEKVLPKHSL | |
| | LYEYFTVYNELTKVKYVTEGMRKPAFLSGEQKKAIVDLLFKTNRKVTVKQLKEDYFKKIECFDSVEISGVEDRFNASLGTYHDLLKIIKDKDFLDNEENEDILEDIV | |
| | LTLTLFEDREMIEERLKTYAHLFDDKVMKQLKRRRYTGWGRLSRKLINGIRDKQSGKTILDFLKSDGFANRNFMQLIHDDSLTFKEDIQKAQVSGQGDSLHE | |
| | HIANLAGSPAIKKGILQTVKVVDELVKVMGRHKPENIVIEMARENQTTQKGQKNSRERMKRIEEGIKELGSQILKEHPVENTQLQNEKLYLYYLQNGRDMYV | |
| | DQELDINRLSDYDVDHIVPQSFLKDDSIDNKVLTRSDKARGKSDNVPSEEVVKKMKNYWRQLLNAKLITQRKFDNLTKAERGGLSELDKAGFIKRQLVETRQI | |
| | TKHVAQILDSRMNTKYDENDKLIREVKVITLKSKLVSDFRKDFQFYKVREINNYHHAHDAYLNAVVGTALIKKYPKLESEFVYGDYKVYDVRKMIAKSEQEIGK | |
| | ATAKYFFYSNIMNFFKTEITLANGEIRKRPLIETNGETGEIVWDKGRDFATVRKVLSMPQVNIVKKTEVQTGGFSKESILPKRNSDKLIARKKDWDPKKYGGFD | |
| | SPTVAYSVLVVAKVEKGKSKKLKSVKELLGITIMERSSFEKNPIDFLEAKGYKEVKKDLIIKLPKYSLFELENGRKRMLASAGELQKGNELALPSKYVNFLYLASHY | |
| | EKLKGSPEDNEQKQLFVEQHKHYLDEIIEQISEFSKRVILADANLDKVLSAYNKHRDKPIREQAENIIHLFTLTNLGAPAAFKYFDTTIDRKRYTSTKEVLDATLIH | |
| | QSITGLYETRIDLSQLGGDAEAAAKEAAAKEAAAKEAAAKALEAEAAAKEAAAKEAAAKEAAAKAMASNFTQFVLVDNGGTGDVTVAPSNFANGIAEWIS | |
| | SNSRSQAYKVTCSVRQSSAQNRKYTIKVEVPKGAWRSYLNMELTIPIFATNSDCELIVKAMQGLLKDGNPIPSAIAANSGIYGSSGSSGSSGSSGSSGSSTLNIE | |
| | DEHRLHETSKEPDVSLGSTWLSDFPQAWAETGGMGLAVRQAPLIIPLKATSTPVSIKQYPMSQEARLGIKPHIQRLLDQGILVPCQSPWNTPLLPVKKPGTN | |
| | DYRPVQDLREVNKRVEDIHPTVPNPYNLLSGLPPSHQWYTVLDLKDAFFCLRLHPTSQPLFAFEWRDPEMGISGQLTWTRLPQGFKNSPTLFNEALHRDLA | |
| | DFRIQHPDLILLQYVDDLLLAATSELDCQQGTRALLQTLGNLGYRASAKKAQICQKQVKYLGYLLKEGQRWLTEARKETVMGQPTPKTPRQLREFLGKAGFC | |
| | RLFIPGFAEMAAPLYPLTKPGTLFNWGPDQQKAYQEIKQALLTAPALGLPDLTKPFELFVDEKQGYAKGVLTQKLGPWRRPVAYLSKKLDPVAAGWPPCLR | |
| | MVAAIAVLTKDAGKLTMGQPLVILAPHAVEALVKQPPDRWLSNARMTHYQALLLDTDRVQFGPVVALNPATLLPLPEEGLQHNCLDILAEAHGTRPDLTD | |
| | QPLPDADHTWYTDGSSLLQEGQRKAGAAVTTETEVIWAKALPAGTSAQRAELIALTQALKMAEGKKLNVYTDSRYAFATAHIHGEIYRRRGWLTSEGKEIK | |
| | NKDEILALLKALFLPKRLSIIHCPGHQKGHSAEARGNRMADQAARKAAITETPDTSTLLKRTADGSEFESPKKKAKVE | |
| PL11992 | MPAAKRVKLDGGDKKYSIGLDIGTNSVGWAVITDEYKVPSKKFKVLGNTDRHSIKKNLIGALLFDSGETAEATRLKRTARRRYTRRKNRICYLQEIFSNEMAKV | 16,052 |
| | DDSFFHRLEESFLVEEDKKHERHPIFGNIVDEVAYHEKYPTIYHLRKKLVDSTDKADLRLIYLALAHMIKFRGHFLIEGDLNPDNSDVDKLFIQLVQTYNQLFEE | |
| | NPINASGVDAKAILSARLSKSRRLENLIAQLPGEKKNGLFGNLIALSLGLTPNFKSNFDLAEDAKLQLSKDTYDDDLDNLLAQIGDQYADLFLAAKNLSDAILLS | |
| | DILRVNTEITKAPLSASMIKRYDEHHQDLTLLKALVRQQLPEKYKEIFFDQSKNGYAGYIDGGASQEEFYKFIKPILEKMDGTEELLVKLNREDLLRKQRTFDNG | |
| | SIPHQIHLGELHAILRRQEDFYPFLKDNREKIEKILTFRIPYYVGPLARGNSRFAWMTRKSEETITPWNFEEVVDKGASAQSFIERMTNFDKNLPNEKVLPKHSL | |
| | LYEYFTVYNELTKVKYVTEGMRKPAFLSGEQKKAIVDLLFKTNRKVTVKQLKEDYFKKIECFDSVEISGVEDRFNASLGTYHDLLKIIKDKDFLDNEENEDILEDIV | |
| | LTLTLFEDREMIEERLKTYAHLFDDKVMKQLKRRRYTGWGRLSRKLINGIRDKQSGKTILDFLKSDGFANRNFMQLIHDDSLTFKEDIQKAQVSGQGDSLHE | |
| | HIANLAGSPAIKKGILQTVKVVDELVKVMGRHKPENIVIEMARENQTTQKGQKNSRERMKRIEEGIKELGSQILKEHPVENTQLQNEKLYLYYLQNGRDMYV | |
| | DQELDINRLSDYDVDHIVPQSFLKDDSIDNKVLTRSDKARGKSDNVPSEEVVKKMKNYWRQLLNAKLITQRKFDNLTKAERGGLSELDKAGFIKRQLVETRQI | |
| | TKHVAQILDSRMNTKYDENDKLIREVKVITLKSKLVSDFRKDFQFYKVREINNYHHAHDAYLNAVVGTALIKKYPKLESEFVYGDYKVYDVRKMIAKSEQEIGK | |
| | ATAKYFFYSNIMNFFKTEITLANGEIRKRPLIETNGETGEIVWDKGRDFATVRKVLSMPQVNIVKKTEVQTGGFSKESILPKRNSDKLIARKKDWDPKKYGGFD | |
| | SPTVAYSVLVVAKVEKGKSKKLKSVKELLGITIMERSSFEKNPIDFLEAKGYKEVKKDLIIKLPKYSLFELENGRKRMLASAGELQKGNELALPSKYVNFLYLASHY | |
| | EKLKGSPEDNEQKQLFVEQHKHYLDEIIEQISEFSKRVILADANLDKVLSAYNKHRDKPIREQAENIIHLFTLTNLGAPAAFKYFDTTIDRKRYTSTKEVLDATLIH | |
| | QSITGLYETRIDLSQLGGDAEAAAKEAAAKEAAAKEAAAKALEAEAAAKEAAAKEAAAKEAAAKAMASNFTQFVLVDNGGTGDVTVAPSNFANGIAEWIS | |
| | SNSRSQAYKVTCSVRQSSAQNRKYTIKVEVPKGAWRSYLNMELTIPIFATNSDCELIVKAMQGLLKDGNPIPSAIAANSGIYGSSGGGEAAAKTLNIEDEHRL | |
| | HETSKEPDVSLGSTWLSDFPQAWAETGGMGLAVRQAPLIIPLKATSTPVSIKQYPMSQEARLGIKPHIQRLLDQGILVPCQSPWNTPLLPVKKPGTNDYRPV | |
| | QDLREVNKRVEDIHPTVPNPYNLLSGLPPSHQWYTVLDLKDAFFCLRLHPTSQPLFAFEWRDPEMGISGQLTWTRLPQGFKNSPTLFNEALHRDLADFRIQ | |
| | HPDLILLQYVDDLLLAATSELDCQQGTRALLQTLGNLGYRASAKKAQICQKQVKYLGYLLKEGQRWLTEARKETVMGQPTPKTPRQLREFLGKAGFCRLFIP | |
| | GFAEMAAPLYPLTKPGTLFNWGPDQQKAYQEIKQALLTAPALGLPDLTKPFELFVDEKQGYAKGVLTQKLGPWRRPVAYLSKKLDPVAAGWPPCLRMVAA | |
| | IAVLTKDAGKLTMGQPLVILAPHAVEALVKQPPDRWLSNARMTHYQALLLDTDRVQFGPVVALNPATLLPLPEEGLQHNCLDILAEAHGTRPDLTDQPLPD | |
| | ADHTWYTDGSSLLQEGQRKAGAAVTTETEVIWAKALPAGTSAQRAELIALTQALKMAEGKKLNVYTDSRYAFATAHIHGEIYRRRGWLTSEGKEIKNKDEIL | |
| | ALLKALFLPKRLSIIHCPGHQKGHSAEARGNRMADQAARKAAITETPDTSTLLKRTADGSEFESPKKKAKVE | |
| PL11993 | MPAAKRVKLDGGDKKYSIGLDIGTNSVGWAVITDEYKVPSKKFKVLGNTDRHSIKKNLIGALLFDSGETAEATRLKRTARRRYTRRKNRICYLQEIFSNEMAKV | 16,053 |
| | DDSFFHRLEESFLVEEDKKHERHPIFGNIVDEVAYHEKYPTIYHLRKKLVDSTDKADLRLIYLALAHMIKFRGHFLIEGDLNPDNSDVDKLFIQLVQTYNQLFEE | |
| | NPINASGVDAKAILSARLSKSRRLENLIAQLPGEKKNGLFGNLIALSLGLTPNFKSNFDLAEDAKLQLSKDTYDDDLDNLLAQIGDQYADLFLAAKNLSDAILLS | |
| | DILRVNTEITKAPLSASMIKRYDEHHQDLTLLKALVRQQLPEKYKEIFFDQSKNGYAGYIDGGASQEEFYKFIKPILEKMDGTEELLVKLNREDLLRKQRTFDNG | |
| | SIPHQIHLGELHAILRRQEDFYPFLKDNREKIEKILTFRIPYYVGPLARGNSRFAWMTRKSEETITPWNFEEVVDKGASAQSFIERMTNFDKNLPNEKVLPKHSL | |
| | LYEYFTVYNELTKVKYVTEGMRKPAFLSGEQKKAIVDLLFKTNRKVTVKQLKEDYFKKIECFDSVEISGVEDRFNASLGTYHDLLKIIKDKDFLDNEENEDILEDIV | |
| | LTLTLFEDREMIEERLKTYAHLFDDKVMKQLKRRRYTGWGRLSRKLINGIRDKQSGKTILDFLKSDGFANRNFMQLIHDDSLTFKEDIQKAQVSGQGDSLHE | |
| | HIANLAGSPAIKKGILQTVKVVDELVKVMGRHKPENIVIEMARENQTTQKGQKNSRERMKRIEEGIKELGSQILKEHPVENTQLQNEKLYLYYLQNGRDMYV | |
| | DQELDINRLSDYDVDHIVPQSFLKDDSIDNKVLTRSDKARGKSDNVPSEEVVKKMKNYWRQLLNAKLITQRKFDNLTKAERGGLSELDKAGFIKRQLVETRQI | |
| | TKHVAQILDSRMNTKYDENDKLIREVKVITLKSKLVSDFRKDFQFYKVREINNYHHAHDAYLNAVVGTALIKKYPKLESEFVYGDYKVYDVRKMIAKSEQEIGK | |
| | ATAKYFFYSNIMNFFKTEITLANGEIRKRPLIETNGETGEIVWDKGRDFATVRKVLSMPQVNIVKKTEVQTGGFSKESILPKRNSDKLIARKKDWDPKKYGGFD | |
| | SPTVAYSVLVVAKVEKGKSKKLKSVKELLGITIMERSSFEKNPIDFLEAKGYKEVKKDLIIKLPKYSLFELENGRKRMLASAGELQKGNELALPSKYVNFLYLASHY | |
| | EKLKGSPEDNEQKQLFVEQHKHYLDEIIEQISEFSKRVILADANLDKVLSAYNKHRDKPIREQAENIIHLFTLTNLGAPAAFKYFDTTIDRKRYTSTKEVLDATLIH | |
| | QSITGLYETRIDLSQLGGDAEAAAKEAAAKEAAAKEAAAKALEAEAAAKEAAAKEAAAKEAAAKAMASNFTQFVLVDNGGTGDVTVAPSNFANGIAEWIS | |
| | SNSRSQAYKVTCSVRQSSAQNRKYTIKVEVPKGAWRSYLNMELTIPIFATNSDCELIVKAMQGLLKDGNPIPSAIAANSGIYGGSGGSMASNFTQFVLVDNG | |
| | GTGDVTVAPSNFANGIAEWISSNSRSQAYKVTCSVRQSSAQNRKYTIKVEVPKGAWRSYLNMELTIPIFATNSDCELIVKAMQGLLKDGNPIPSAIAANSGIY | |
| | AEAAAKEAAAKEAAAKEAAAKALEAEAAAKEAAAKEAAAKEAAAKATLNIEDEHRLHETSKEPDVSLGSTWLSDFPQAWAETGGMGLAVRQAPLIIPLKAT | |
| | STPVSIKQYPMSQEARLGIKPHIQRLLDQGILVPCQSPWNTPLLPVKKPGTNDYRPVQDLREVNKRVEDIHPTVPNPYNLLSGLPPSHQWYTVLDLKDAFFCL | |
| | RLHPTSQPLFAFEWRDPEMGISGQLTWTRLPQGFKNSPTLFNEALHRDLADFRIQHPDLILLQYVDDLLLAATSELDCQQGTRALLQTLGNLGYRASAKKAQ | |
| | ICQKQVKYLGYLLKEGQRWLTEARKETVMGQPTPKTPRQLREFLGKAGFCRLFIPGFAEMAAPLYPLTKPGTLFNWGPDQQKAYQEIKQALLTAPALGLPDL | |
| | TKPFELFVDEKQGYAKGVLTQKLGPWRRPVAYLSKKLDPVAAGWPPCLRMVAAIAVLTKDAGKLTMGQPLVILAPHAVEALVKQPPDRWLSNARMTHYQ | |
| | ALLLDTDRVQFGPVVALNPATLLPLPEEGLQHNCLDILAEAHGTRPDLTDQPLPDADHTWYTDGSSLLQEGQRKAGAAVTTETEVIWAKALPAGTSAQRAE | |
| | LIALTQALKMAEGKKLNVYTDSRYAFATAHIHGEIYRRRGWLTSEGKEIKNKDEILALLKALFLPKRLSIIHCPGHQKGHSAEARGNRMADQAARKAAITETPD | |
| | TSTLLKRTADGSEFESPKKKAKVE | |
| PL11994 | MPAAKRVKLDGGDKKYSIGLDIGTNSVGWAVITDEYKVPSKKFKVLGNTDRHSIKKNLIGALLFDSGETAEATRLKRTARRRYTRRKNRICYLQEIFSNEMAKV | 16,054 |
| | DDSFFHRLEESFLVEEDKKHERHPIFGNIVDEVAYHEKYPTIYHLRKKLVDSTDKADLRLIYLALAHMIKFRGHFLIEGDLNPDNSDVDKLFIQLVQTYNQLFEE | |
| | NPINASGVDAKAILSARLSKSRRLENLIAQLPGEKKNGLFGNLIALSLGLTPNFKSNFDLAEDAKLQLSKDTYDDDLDNLLAQIGDQYADLFLAAKNLSDAILLS | |
| | DILRVNTEITKAPLSASMIKRYDEHHQDLTLLKALVRQQLPEKYKEIFFDQSKNGYAGYIDGGASQEEFYKFIKPILEKMDGTEELLVKLNREDLLRKQRTFDNG | |
| | SIPHQIHLGELHAILRRQEDFYPFLKDNREKIEKILTFRIPYYVGPLARGNSRFAWMTRKSEETITPWNFEEVVDKGASAQSFIERMTNFDKNLPNEKVLPKHSL | |
| | LYEYFTVYNELTKVKYVTEGMRKPAFLSGEQKKAIVDLLFKTNRKVTVKQLKEDYFKKIECFDSVEISGVEDRFNASLGTYHDLLKIIKDKDFLDNEENEDILEDIV | |
| | LTLTLFEDREMIEERLKTYAHLFDDKVMKQLKRRRYTGWGRLSRKLINGIRDKQSGKTILDFLKSDGFANRNFMQLIHDDSLTFKEDIQKAQVSGQGDSLHE | |
| | HIANLAGSPAIKKGILQTVKVVDELVKVMGRHKPENIVIEMARENQTTQKGQKNSRERMKRIEEGIKELGSQILKEHPVENTQLQNEKLYLYYLQNGRDMYV | |
| | DQELDINRLSDYDVDHIVPQSFLKDDSIDNKVLTRSDKARGKSDNVPSEEVVKKMKNYWRQLLNAKLITQRKFDNLTKAERGGLSELDKAGFIKRQLVETRQI | |
| | TKHVAQILDSRMNTKYDENDKLIREVKVITLKSKLVSDFRKDFQFYKVREINNYHHAHDAYLNAVVGTALIKKYPKLESEFVYGDYKVYDVRKMIAKSEQEIGK | |
| | ATAKYFFYSNIMNFFKTEITLANGEIRKRPLIETNGETGEIVWDKGRDFATVRKVLSMPQVNIVKKTEVQTGGFSKESILPKRNSDKLIARKKDWDPKKYGGFD | |
| | SPTVAYSVLVVAKVEKGKSKKLKSVKELLGITIMERSSFEKNPIDFLEAKGYKEVKKDLIIKLPKYSLFELENGRKRMLASAGELQKGNELALPSKYVNFLYLASHY | |
| | EKLKGSPEDNEQKQLFVEQHKHYLDEIIEQISEFSKRVILADANLDKVLSAYNKHRDKPIREQAENIIHLFTLTNLGAPAAFKYFDTTIDRKRYTSTKEVLDATLIH | |
| | QSITGLYETRIDLSQLGGDAEAAAKEAAAKEAAAKEAAAKALEAEAAAKEAAAKEAAAKEAAAKAMASNFTQFVLVDNGGTGDVTVAPSNFANGIAEWIS | |
| | SNSRSQAYKVTCSVRQSSAQNRKYTIKVEVPKGAWRSYLNMELTIPIFATNSDCELIVKAMQGLLKDGNPIPSAIAANSGIYGGSGGSMASNFTQFVLVDNG | |
| | GTGDVTVAPSNFANGIAEWISSNSRSQAYKVTCSVRQSSAQNRKYTIKVEVPKGAWRSYLNMELTIPIFATNSDCELIVKAMQGLLKDGNPIPSAIAANSGIY | |
| | SGGSSGGSSGSETPGTSESATPESSGGSSGGSSTLNIEDEHRLHETSKEPDVSLGSTWLSDFPQAWAETGGMGLAVRQAPLIIPLKATSTPVSIKQYPMSQEA | |
| | RLGIKPHIQRLLDQGILVPCQSPWNTPLLPVKKPGTNDYRPVQDLREVNKRVEDIHPTVPNPYNLLSGLPPSHQWYTVLDLKDAFFCLRLHPTSQPLFAFEW | |
| | RDPEMGISGQLTWTRLPQGFKNSPTLFNEALHRDLADFRIQHPDLILLQYVDDLLLAATSELDCQQGTRALLQTLGNLGYRASAKKAQICQKQVKYLGYLLKE | |
| | GQRWLTEARKETVMGQPTPKTPRQLREFLGKAGFCRLFIPGFAEMAAPLYPLTKPGTLFNWGPDQQKAYQEIKQALLTAPALGLPDLTKPFELFVDEKQGY | |
| | AKGVLTQKLGPWRRPVAYLSKKLDPVAAGWPPCLRMVAAIAVLTKDAGKLTMGQPLVILAPHAVEALVKQPPDRWLSNARMTHYQALLLDTDRVQFGP | |
| | VVALNPATLLPLPEEGLQHNCLDILAEAHGTRPDLTDQPLPDADHTWYTDGSSLLQEGQRKAGAAVTTETEVIWAKALPAGTSAQRAELIALTQALKMAEG | |
| | KKLNVYTDSRYAFATAHIHGEIYRRRGWLTSEGKEIKNKDEILALLKALFLPKRLSIIHCPGHQKGHSAEARGNRMADQAARKAAITETPDTSTLLKRTADGSE | |
| | FESPKKKAKVE | |
| PL11995 | MPAAKRVKLDGGDKKYSIGLDIGTNSVGWAVITDEYKVPSKKFKVLGNTDRHSIKKNLIGALLFDSGETAEATRLKRTARRRYTRRKNRICYLQEIFSNEMAKV | 16,055 |
| | DDSFFHRLEESFLVEEDKKHERHPIFGNIVDEVAYHEKYPTIYHLRKKLVDSTDKADLRLIYLALAHMIKFRGHFLIEGDLNPDNSDVDKLFIQLVQTYNQLFEE | |
| | NPINASGVDAKAILSARLSKSRRLENLIAQLPGEKKNGLFGNLIALSLGLTPNFKSNFDLAEDAKLQLSKDTYDDDLDNLLAQIGDQYADLFLAAKNLSDAILLS | |
| | DILRVNTEITKAPLSASMIKRYDEHHQDLTLLKALVRQQLPEKYKEIFFDQSKNGYAGYIDGGASQEEFYKFIKPILEKMDGTEELLVKLNREDLLRKQRTFDNG | |
| | SIPHQIHLGELHAILRRQEDFYPFLKDNREKIEKILTFRIPYYVGPLARGNSRFAWMTRKSEETITPWNFEEVVDKGASAQSFIERMTNFDKNLPNEKVLPKHSL | |
| | LYEYFTVYNELTKVKYVTEGMRKPAFLSGEQKKAIVDLLFKTNRKVTVKQLKEDYFKKIECFDSVEISGVEDRFNASLGTYHDLLKIIKDKDFLDNEENEDILEDIV | |
| | LTLTLFEDREMIEERLKTYAHLFDDKVMKQLKRRRYTGWGRLSRKLINGIRDKQSGKTILDFLKSDGFANRNFMQLIHDDSLTFKEDIQKAQVSGQGDSLHE | |
| | HIANLAGSPAIKKGILQTVKVVDELVKVMGRHKPENIVIEMARENQTTQKGQKNSRERMKRIEEGIKELGSQILKEHPVENTQLQNEKLYLYYLQNGRDMYV | |
| | DQELDINRLSDYDVDHIVPQSFLKDDSIDNKVLTRSDKARGKSDNVPSEEVVKKMKNYWRQLLNAKLITQRKFDNLTKAERGGLSELDKAGFIKRQLVETRQI | |
| | TKHVAQILDSRMNTKYDENDKLIREVKVITLKSKLVSDFRKDFQFYKVREINNYHHAHDAYLNAVVGTALIKKYPKLESEFVYGDYKVYDVRKMIAKSEQEIGK | |
| | ATAKYFFYSNIMNFFKTEITLANGEIRKRPLIETNGETGEIVWDKGRDFATVRKVLSMPQVNIVKKTEVQTGGFSKESILPKRNSDKLIARKKDWDPKKYGGFD | |
| | SPTVAYSVLVVAKVEKGKSKKLKSVKELLGITIMERSSFEKNPIDFLEAKGYKEVKKDLIIKLPKYSLFELENGRKRMLASAGELQKGNELALPSKYVNFLYLASHY | |
| | EKLKGSPEDNEQKQLFVEQHKHYLDEIIEQISEFSKRVILADANLDKVLSAYNKHRDKPIREQAENIIHLFTLTNLGAPAAFKYFDTTIDRKRYTSTKEVLDATLIH | |
| | QSITGLYETRIDLSQLGGDAEAAAKEAAAKEAAAKEAAAKALEAEAAAKEAAAKEAAAKEAAAKAMASNFTQFVLVDNGGTGDVTVAPSNFANGIAEWIS | |
| | SNSRSQAYKVTCSVRQSSAQNRKYTIKVEVPKGAWRSYLNMELTIPIFATNSDCELIVKAMQGLLKDGNPIPSAIAANSGIYGGSGGSMASNFTQFVLVDNG | |
| | GTGDVTVAPSNFANGIAEWISSNSRSQAYKVTCSVRQSSAQNRKYTIKVEVPKGAWRSYLNMELTIPIFATNSDCELIVKAMQGLLKDGNPIPSAIAANSGIY | |
| | GSSGSSGSSGSSGSSGSSTLNIEDEHRLHETSKEPDVSLGSTWLSDFPQAWAETGGMGLAVRQAPLIIPLKATSTPVSIKQYPMSQEARLGIKPHIQRLLDQGI | |
| | LVPCQSPWNTPLLPVKKPGTNDYRPVQDLREVNKRVEDIHPTVPNPYNLLSGLPPSHQWYTVLDLKDAFFCLRLHPTSQPLFAFEWRDPEMGISGQLTWT | |
| | RLPQGFKNSPTLFNEALHRDLADFRIQHPDLILLQYVDDLLLAATSELDCQQGTRALLQTLGNLGYRASAKKAQICQKQVKYLGYLLKEGQRWLTEARKETV | |
| | MGQPTPKTPRQLREFLGKAGFCRLFIPGFAEMAAPLYPLTKPGTLFNWGPDQQKAYQEIKQALLTAPALGLPDLTKPFELFVDEKQGYAKGVLTQKLGPWR | |
| | RPVAYLSKKLDPVAAGWPPCLRMVAAIAVLTKDAGKLTMGQPLVILAPHAVEALVKQPPDRWLSNARMTHYQALLLDTDRVQFGPVVALNPATLLPLPEE | |
| | GLQHNCLDILAEAHGTRPDLTDQPLPDADHTWYTDGSSLLQEGQRKAGAAVTTETEVIWAKALPAGTSAQRAELIALTQALKMAEGKKLNVYTDSRYAFAT | |
| | AHIHGEIYRRRGWLTSEGKEIKNKDEILALLKALFLPKRLSIIHCPGHQKGHSAEARGNRMADQAARKAAITETPDTSTLLKRTADGSEFESPKKKAKVE | |
| PL11996 | MPAAKRVKLDGGDKKYSIGLDIGTNSVGWAVITDEYKVPSKKFKVLGNTDRHSIKKNLIGALLFDSGETAEATRLKRTARRRYTRRKNRICYLQEIFSNEMAKV | 16,056 |
| | DDSFFHRLEESFLVEEDKKHERHPIFGNIVDEVAYHEKYPTIYHLRKKLVDSTDKADLRLIYLALAHMIKFRGHFLIEGDLNPDNSDVDKLFIQLVQTYNQLFEE | |
| | NPINASGVDAKAILSARLSKSRRLENLIAQLPGEKKNGLFGNLIALSLGLTPNFKSNFDLAEDAKLQLSKDTYDDDLDNLLAQIGDQYADLFLAAKNLSDAILLS | |
| | DILRVNTEITKAPLSASMIKRYDEHHQDLTLLKALVRQQLPEKYKEIFFDQSKNGYAGYIDGGASQEEFYKFIKPILEKMDGTEELLVKLNREDLLRKQRTFDNG | |
| | SIPHQIHLGELHAILRRQEDFYPFLKDNREKIEKILTFRIPYYVGPLARGNSRFAWMTRKSEETITPWNFEEVVDKGASAQSFIERMTNFDKNLPNEKVLPKHSL | |
| | LYEYFTVYNELTKVKYVTEGMRKPAFLSGEQKKAIVDLLFKTNRKVTVKQLKEDYFKKIECFDSVEISGVEDRFNASLGTYHDLLKIIKDKDFLDNEENEDILEDIV | |
| | LTLTLFEDREMIEERLKTYAHLFDDKVMKQLKRRRYTGWGRLSRKLINGIRDKQSGKTILDFLKSDGFANRNFMQLIHDDSLTFKEDIQKAQVSGQGDSLHE | |
| | HIANLAGSPAIKKGILQTVKVVDELVKVMGRHKPENIVIEMARENQTTQKGQKNSRERMKRIEEGIKELGSQILKEHPVENTQLQNEKLYLYYLQNGRDMYV | |
| | DQELDINRLSDYDVDHIVPQSFLKDDSIDNKVLTRSDKARGKSDNVPSEEVVKKMKNYWRQLLNAKLITQRKFDNLTKAERGGLSELDKAGFIKRQLVETRQI | |
| | TKHVAQILDSRMNTKYDENDKLIREVKVITLKSKLVSDFRKDFQFYKVREINNYHHAHDAYLNAVVGTALIKKYPKLESEFVYGDYKVYDVRKMIAKSEQEIGK | |
| | ATAKYFFYSNIMNFFKTEITLANGEIRKRPLIETNGETGEIVWDKGRDFATVRKVLSMPQVNIVKKTEVQTGGFSKESILPKRNSDKLIARKKDWDPKKYGGFD | |
| | SPTVAYSVLVVAKVEKGKSKKLKSVKELLGITIMERSSFEKNPIDFLEAKGYKEVKKDLIIKLPKYSLFELENGRKRMLASAGELQKGNELALPSKYVNFLYLASHY | |
| | EKLKGSPEDNEQKQLFVEQHKHYLDEIIEQISEFSKRVILADANLDKVLSAYNKHRDKPIREQAENIIHLFTLTNLGAPAAFKYFDTTIDRKRYTSTKEVLDATLIH | |
| | QSITGLYETRIDLSQLGGDAEAAAKEAAAKEAAAKEAAAKALEAEAAAKEAAAKEAAAKEAAAKAMASNFTQFVLVDNGGTGDVTVAPSNFANGIAEWIS | |
| | SNSRSQAYKVTCSVRQSSAQNRKYTIKVEVPKGAWRSYLNMELTIPIFATNSDCELIVKAMQGLLKDGNPIPSAIAANSGIYGGSGGSMASNFTQFVLVDNG | |
| | GTGDVTVAPSNFANGIAEWISSNSRSQAYKVTCSVRQSSAQNRKYTIKVEVPKGAWRSYLNMELTIPIFATNSDCELIVKAMQGLLKDGNPIPSAIAANSGIY | |
| | GSSGGGEAAAKTLNIEDEHRLHETSKEPDVSLGSTWLSDFPQAWAETGGMGLAVRQAPLIIPLKATSTPVSIKQYPMSQEARLGIKPHIQRLLDQGILVPCQS | |
| | PWNTPLLPVKKPGTNDYRPVQDLREVNKRVEDIHPTVPNPYNLLSGLPPSHQWYTVLDLKDAFFCLRLHPTSQPLFAFEWRDPEMGISGQLTWTRLPQGF | |
| | KNSPTLFNEALHRDLADFRIQHPDLILLQYVDDLLLAATSELDCQQGTRALLQTLGNLGYRASAKKAQICQKQVKYLGYLLKEGQRWLTEARKETVMGQPTP | |
| | KTPRQLREFLGKAGFCRLFIPGFAEMAAPLYPLTKPGTLFNWGPDQQKAYQEIKQALLTAPALGLPDLTKPFELFVDEKQGYAKGVLTQKLGPWRRPVAYLS | |
| | KKLDPVAAGWPPCLRMVAAIAVLTKDAGKLTMGQPLVILAPHAVEALVKQPPDRWLSNARMTHYQALLLDTDRVQFGPVVALNPATLLPLPEEGLQHNC | |
| | LDILAEAHGTRPDLTDQPLPDADHTWYTDGSSLLQEGQRKAGAAVTTETEVIWAKALPAGTSAQRAELIALTQALKMAEGKKLNVYTDSRYAFATAHIHGEI | |
| | YRRRGWLTSEGKEIKNKDEILALLKALFLPKRLSIIHCPGHQKGHSAEARGNRMADQAARKAAITETPDTSTLLKRTADGSEFESPKKKAKVE | |
| PL11997 | MPAAKRVKLDGGDKKYSIGLDIGTNSVGWAVITDEYKVPSKKFKVLGNTDRHSIKKNLIGALLFDSGETAEATRLKRTARRRYTRRKNRICYLQEI | 16,057 |
| | FSNEMAKVDDSFFHRLEESFLVEEDKKHERHPIFGNIVDEVAYHEKYPTIYHLRKKLVDSTDKADLRLIYLALAHMIKFRGHFLIEGDLNPDNSDV | |
| | DKLFIQLVQTYNQLFEENPINASGVDAKAILSARLSKSRRLENLIAQLPGEKKNGLFGNLIALSLGLTPNFKSNFDLAEDAKLQLSKDTYDDDLDNL | |
| | LAQIGDQYADLFLAAKNLSDAILLSDILRVNTEITKAPLSASMIKRYDEHHQDLTLLKALVRQQLPEKYKEIFFDQSKNGYAGYIDGGASQEEFYKF | |
| | IKPILEKMDGTEELLVKLNREDLLRKQRTFDNGSIPHQIHLGELHAILRRQEDFYPFLKDNREKIEKILTFRIPYYVGPLARGNSRFAWMTRKSEETI | |
| | TPWNFEEVVDKGASAQSFIERMTNFDKNLPNEKVLPKHSLLYEYFTVYNELTKVKYVTEGMRKPAFLSGEQKKAIVDLLFKTNRKVTVKQLKED | |
| | YFKKIECFDSVEISGVEDRFNASLGTYHDLLKIIKDKDFLDNEENEDILEDIVLTLTLFEDREMIEERLKTYAHLFDDKVMKQLKRRRYTGWGRLSR | |
| | KLINGIRDKQSGKTILDFLKSDGFANRNFMQLIHDDSLTFKEDIQKAQVSGQGDSLHEHIANLAGSPAIKKGILQTVKVVDELVKVMGRHKPENI | |
| | VIEMARENQTTQKGQKNSRERMKRIEEGIKELGSQILKEHPVENTQLQNEKLYLYYLQNGRDMYVDQELDINRLSDYDVDHIVPQSFLKDDSI | |
| | DNKVLTRSDKARGKSDNVPSEEVVKKMKNYWRQLLNAKLITQRKFDNLTKAERGGLSELDKAGFIKRQLVETRQITKHVAQILDSRMNTKYDE | |
| | NDKLIREVKVITLKSKLVSDFRKDFQFYKVREINNYHHAHDAYLNAVVGTALIKKYPKLESEFVYGDYKVYDVRKMIAKSEQEIGKATAKYFFYSNI | |
| | MNFFKTEITLANGEIRKRPLIETNGETGEIVWDKGRDFATVRKVLSMPQVNIVKKTEVQTGGFSKESILPKRNSDKLIARKKDWDPKKYGGFDS | |
| | PTVAYSVLVVAKVEKGKSKKLKSVKELLGITIMERSSFEKNPIDFLEAKGYKEVKKDLIIKLPKYSLFELENGRKRMLASAGELQKGNELALPSKYVN | |
| | FLYLASHYEKLKGSPEDNEQKQLFVEQHKHYLDEIIEQISEFSKRVILADANLDKVLSAYNKHRDKPIREQAENIIHLFTLTNLGAPAAFKYFDTTID | |
| | RKRYTSTKEVLDATLIHQSITGLYETRIDLSQLGGDAEAAAKEAAAKEAAAKEAAAKALEAEAAAKEAAAKEAAAKEAAAKAMASNFTQFVLVD | |
| | NGGTGDVTVAPSNFANGIAEWISSNSRSQAYKVTCSVRQSSAQNRKYTIKVEVPKGAWRSYLNMELTIPIFATNSDCELIVKAMQGLLKDGNP | |
| | IPSAIAANSGIYGGSGGSMASNFTQFVLVDNGGTGDVTVAPSNFANGIAEWISSNSRSQAYKVTCSVRQSSAQNRKYTIKVEVPKGAWRSYL | |
| | NMELTIPIFATNSDCELIVKAMQGLLKDGNPIPSAIAANSGIYGGGSGGGSGGGSGGGSMASNFTQFVLVDNGGTGDVTVAPSNFANGIAE | |
| | WISSNSRSQAYKVTCSVRQSSAQNRKYTIKVEVPKGAWRSYLNMELTIPIFATNSDCELIVKAMQGLLKDGNPIPSAIAANSGIYGGSGGSMAS | |
| | NFTQFVLVDNGGTGDVTVAPSNFANGIAEWISSNSRSQAYKVTCSVRQSSAQNRKYTIKVEVPKGAWRSYLNMELTIPIFATNSDCELIVKAM | |
| | QGLLKDGNPIPSAIAANSGIYAEAAAKEAAAKEAAAKEAAAKALEAEAAAKEAAAKEAAAKEAAAKATLNIEDEHRLHETSKEPDVSLGSTWLS | |
| | DFPQAWAETGGMGLAVRQAPLIIPLKATSTPVSIKQYPMSQEARLGIKPHIQRLLDQGILVPCQSPWNTPLLPVKKPGTNDYRPVQDLREVNK | |
| | RVEDIHPTVPNPYNLLSGLPPSHQWYTVLDLKDAFFCLRLHPTSQPLFAFEWRDPEMGISGQLTWTRLPQGFKNSPTLFNEALHRDLADFRIQ | |
| | HPDLILLQYVDDLLLAATSELDCQQGTRALLQTLGNLGYRASAKKAQICQKQVKYLGYLLKEGQRWLTEARKETVMGQPTPKTPRQLREFLGK | |
| | AGFCRLFIPGFAEMAAPLYPLTKPGTLFNWGPDQQKAYQEIKQALLTAPALGLPDLTKPFELFVDEKQGYAKGVLTQKLGPWRRPVAYLSKKL | |
| | DPVAAGWPPCLRMVAAIAVLTKDAGKLTMGQPLVILAPHAVEALVKQPPDRWLSNARMTHYQALLLDTDRVQFGPVVALNPATLLPLPEEG | |
| | LQHNCLDILAEAHGTRPDLTDQPLPDADHTWYTDGSSLLQEGQRKAGAAVTTETEVIWAKALPAGTSAQRAELIALTQALKMAEGKKLNVYT | |
| | DSRYAFATAHIHGEIYRRRGWLTSEGKEIKNKDEILALLKALFLPKRLSIIHCPGHQKGHSAEARGNRMADQAARKAAITETPDTSTLLKRTADGS | |
| | EFESPKKKAKVE | |
| PL11998 | MPAAKRVKLDGGDKKYSIGLDIGTNSVGWAVITDEYKVPSKKFKVLGNTDRHSIKKNLIGALLFDSGETAEATRLKRTARRRYTRRKNRICYLQEIFSNEMAKV | 16,058 |
| | DDSFFHRLEESFLVEEDKKHERHPIFGNIVDEVAYHEKYPTIYHLRKKLVDSTDKADLRLIYLALAHMIKFRGHFLIEGDLNPDNSDVDKLFIQLVQTYNQLFEE | |
| | NPINASGVDAKAILSARLSKSRRLENLIAQLPGEKKNGLFGNLIALSLGLTPNFKSNFDLAEDAKLQLSKDTYDDDLDNLLAQIGDQYADLFLAAKNLSDAILLS | |
| | DILRVNTEITKAPLSASMIKRYDEHHQDLTLLKALVRQQLPEKYKEIFFDQSKNGYAGYIDGGASQEEFYKFIKPILEKMDGTEELLVKLNREDLLRKQRTFDNG | |
| | SIPHQIHLGELHAILRRQEDFYPFLKDNREKIEKILTFRIPYYVGPLARGNSRFAWMTRKSEETITPWNFEEVVDKGASAQSFIERMTNFDKNLPNEKVLPKHSL | |
| | LYEYFTVYNELTKVKYVTEGMRKPAFLSGEQKKAIVDLLFKTNRKVTVKQLKEDYFKKIECFDSVEISGVEDRFNASLGTYHDLLKIIKDKDFLDNEENEDILEDIV | |
| | LTLTLFEDREMIEERLKTYAHLFDDKVMKQLKRRRYTGWGRLSRKLINGIRDKQSGKTILDFLKSDGFANRNFMQLIHDDSLTFKEDIQKAQVSGQGDSLHE | |
| | HIANLAGSPAIKKGILQTVKVVDELVKVMGRHKPENIVIEMARENQTTQKGQKNSRERMKRIEEGIKELGSQILKEHPVENTQLQNEKLYLYYLQNGRDMYV | |
| | DQELDINRLSDYDVDHIVPQSFLKDDSIDNKVLTRSDKARGKSDNVPSEEVVKKMKNYWRQLLNAKLITQRKFDNLTKAERGGLSELDKAGFIKRQLVETRQI | |
| | TKHVAQILDSRMNTKYDENDKLIREVKVITLKSKLVSDFRKDFQFYKVREINNYHHAHDAYLNAVVGTALIKKYPKLESEFVYGDYKVYDVRKMIAKSEQEIGK | |
| | ATAKYFFYSNIMNFFKTEITLANGEIRKRPLIETNGETGEIVWDKGRDFATVRKVLSMPQVNIVKKTEVQTGGFSKESILPKRNSDKLIARKKDWDPKKYGGFD | |
| | SPTVAYSVLVVAKVEKGKSKKLKSVKELLGITIMERSSFEKNPIDFLEAKGYKEVKKDLIIKLPKYSLFELENGRKRMLASAGELQKGNELALPSKYVNFLYLASHY | |
| | EKLKGSPEDNEQKQLFVEQHKHYLDEIIEQISEFSKRVILADANLDKVLSAYNKHRDKPIREQAENIIHLFTLTNLGAPAAFKYFDTTIDRKRYTSTKEVLDATLIH | |
| | QSITGLYETRIDLSQLGGDAEAAAKEAAAKEAAAKEAAAKALEAEAAAKEAAAKEAAAKEAAAKAMASNFTQFVLVDNGGTGDVTVAPSNFANGIAEWIS | |
| | SNSRSQAYKVTCSVRQSSAQNRKYTIKVEVPKGAWRSYLNMELTIPIFATNSDCELIVKAMQGLLKDGNPIPSAIAANSGIYGGSGGSMASNFTQFVLVDNG | |
| | GTGDVTVAPSNFANGIAEWISSNSRSQAYKVTCSVRQSSAQNRKYTIKVEVPKGAWRSYLNMELTIPIFATNSDCELIVKAMQGLLKDGNPIPSAIAANSGIY | |
| | GGGSGGGSGGGSGGGSMASNFTQFVLVDNGGTGDVTVAPSNFANGIAEWISSNSRSQAYKVTCSVRQSSAQNRKYTIKVEVPKGAWRSYLNMELTIPIF | |
| | ATNSDCELIVKAMQGLLKDGNPIPSAIAANSGIYGGSGGSMASNFTQFVLVDNGGTGDVTVAPSNFANGIAEWISSNSRSQAYKVTCSVRQSSAQNRKYTI | |
| | KVEVPKGAWRSYLNMELTIPIFATNSDCELIVKAMQGLLKDGNPIPSAIAANSGIYSGGSSGGSSGSETPGTSESATPESSGGSSGGSSTLNIEDEHRLHETSKE | |
| | PDVSLGSTWLSDFPQAWAETGGMGLAVRQAPLIIPLKATSTPVSIKQYPMSQEARLGIKPHIQRLLDQGILVPCQSPWNTPLLPVKKPGTNDYRPVQDLRE | |
| | VNKRVEDIHPTVPNPYNLLSGLPPSHQWYTVLDLKDAFFCLRLHPTSQPLFAFEWRDPEMGISGQLTWTRLPQGFKNSPTLFNEALHRDLADFRIQHPDLIL | |
| | LQYVDDLLLAATSELDCQQGTRALLQTLGNLGYRASAKKAQICQKQVKYLGYLLKEGQRWLTEARKETVMGQPTPKTPRQLREFLGKAGFCRLFIPGFAEM | |
| | AAPLYPLTKPGTLFNWGPDQQKAYQEIKQALLTAPALGLPDLTKPFELFVDEKQGYAKGVLTQKLGPWRRPVAYLSKKLDPVAAGWPPCLRMVAAIAVLTK | |
| | DAGKLTMGQPLVILAPHAVEALVKQPPDRWLSNARMTHYQALLLDTDRVQFGPVVALNPATLLPLPEEGLQHNCLDILAEAHGTRPDLTDQPLPDADHT | |
| | WYTDGSSLLQEGQRKAGAAVTTETEVIWAKALPAGTSAQRAELIALTQALKMAEGKKLNVYTDSRYAFATAHIHGEIYRRRGWLTSEGKEIKNKDEILALLKA | |
| | LFLPKRLSIIHCPGHQKGHSAEARGNRMADQAARKAAITETPDTSTLLKRTADGSEFESPKKKAKVE | |
| PL11999 | MPAAKRVKLDGGDKKYSIGLDIGTNSVGWAVITDEYKVPSKKFKVLGNTDRHSIKKNLIGALLFDSGETAEATRLKRTARRRYTRRKNRICYLQEIFSNEMAKV | 16,059 |
| | DDSFFHRLEESFLVEEDKKHERHPIFGNIVDEVAYHEKYPTIYHLRKKLVDSTDKADLRLIYLALAHMIKFRGHFLIEGDLNPDNSDVDKLFIQLVQTYNQLFEE | |
| | NPINASGVDAKAILSARLSKSRRLENLIAQLPGEKKNGLFGNLIALSLGLTPNFKSNFDLAEDAKLQLSKDTYDDDLDNLLAQIGDQYADLFLAAKNLSDAILLS | |
| | DILRVNTEITKAPLSASMIKRYDEHHQDLTLLKALVRQQLPEKYKEIFFDQSKNGYAGYIDGGASQEEFYKFIKPILEKMDGTEELLVKLNREDLLRKQRTFDNG | |
| | SIPHQIHLGELHAILRRQEDFYPFLKDNREKIEKILTFRIPYYVGPLARGNSRFAWMTRKSEETITPWNFEEVVDKGASAQSFIERMTNFDKNLPNEKVLPKHSL | |
| | LYEYFTVYNELTKVKYVTEGMRKPAFLSGEQKKAIVDLLFKTNRKVTVKQLKEDYFKKIECFDSVEISGVEDRFNASLGTYHDLLKIIKDKDFLDNEENEDILEDIV | |
| | LTLTLFEDREMIEERLKTYAHLFDDKVMKQLKRRRYTGWGRLSRKLINGIRDKQSGKTILDFLKSDGFANRNFMQLIHDDSLTFKEDIQKAQVSGQGDSLHE | |
| | HIANLAGSPAIKKGILQTVKVVDELVKVMGRHKPENIVIEMARENQTTQKGQKNSRERMKRIEEGIKELGSQILKEHPVENTQLQNEKLYLYYLQNGRDMYV | |
| | DQELDINRLSDYDVDHIVPQSFLKDDSIDNKVLTRSDKARGKSDNVPSEEVVKKMKNYWRQLLNAKLITQRKFDNLTKAERGGLSELDKAGFIKRQLVETRQI | |
| | TKHVAQILDSRMNTKYDENDKLIREVKVITLKSKLVSDFRKDFQFYKVREINNYHHAHDAYLNAVVGTALIKKYPKLESEFVYGDYKVYDVRKMIAKSEQEIGK | |
| | ATAKYFFYSNIMNFFKTEITLANGEIRKRPLIETNGETGEIVWDKGRDFATVRKVLSMPQVNIVKKTEVQTGGFSKESILPKRNSDKLIARKKDWDPKKYGGFD | |
| | SPTVAYSVLVVAKVEKGKSKKLKSVKELLGITIMERSSFEKNPIDFLEAKGYKEVKKDLIIKLPKYSLFELENGRKRMLASAGELQKGNELALPSKYVNFLYLASHY | |
| | EKLKGSPEDNEQKQLFVEQHKHYLDEIIEQISEFSKRVILADANLDKVLSAYNKHRDKPIREQAENIIHLFTLTNLGAPAAFKYFDTTIDRKRYTSTKEVLDATLIH | |
| | QSITGLYETRIDLSQLGGDAEAAAKEAAAKEAAAKEAAAKALEAEAAAKEAAAKEAAAKEAAAKAMASNFTQFVLVDNGGTGDVTVAPSNFANGIAEWIS | |
| | SNSRSQAYKVTCSVRQSSAQNRKYTIKVEVPKGAWRSYLNMELTIPIFATNSDCELIVKAMQGLLKDGNPIPSAIAANSGIYGGSGGSMASNFTQFVLVDNG | |
| | GTGDVTVAPSNFANGIAEWISSNSRSQAYKVTCSVRQSSAQNRKYTIKVEVPKGAWRSYLNMELTIPIFATNSDCELIVKAMQGLLKDGNPIPSAIAANSGIY | |
| | GGGSGGGSGGGSGGGSMASNFTQFVLVDNGGTGDVTVAPSNFANGIAEWISSNSRSQAYKVTCSVRQSSAQNRKYTIKVEVPKGAWRSYLNMELTIPIF | |
| | ATNSDCELIVKAMQGLLKDGNPIPSAIAANSGIYGGSGGSMASNFTQFVLVDNGGTGDVTVAPSNFANGIAEWISSNSRSQAYKVTCSVRQSSAQNRKYTI | |
| | KVEVPKGAWRSYLNMELTIPIFATNSDCELIVKAMQGLLKDGNPIPSAIAANSGIYGSSGSSGSSGSSGSSGSSTLNIEDEHRLHETSKEPDVSLGSTWLSDFP | |
| | QAWAETGGMGLAVRQAPLIIPLKATSTPVSIKQYPMSQEARLGIKPHIQRLLDQGILVPCQSPWNTPLLPVKKPGTNDYRPVQDLREVNKRVEDIHPTVPNP | |
| | YNLLSGLPPSHQWYTVLDLKDAFFCLRLHPTSQPLFAFEWRDPEMGISGQLTWTRLPQGFKNSPTLFNEALHRDLADFRIQHPDLILLQYVDDLLLAATSELD | |
| | CQQGTRALLQTLGNLGYRASAKKAQICQKQVKYLGYLLKEGQRWLTEARKETVMGQPTPKTPRQLREFLGKAGFCRLFIPGFAEMAAPLYPLTKPGTLFNW | |
| | GPDQQKAYQEIKQALLTAPALGLPDLTKPFELFVDEKQGYAKGVLTQKLGPWRRPVAYLSKKLDPVAAGWPPCLRMVAAIAVLTKDAGKLTMGQPLVILAP | |
| | HAVEALVKQPPDRWLSNARMTHYQALLLDTDRVQFGPVVALNPATLLPLPEEGLQHNCLDILAEAHGTRPDLTDQPLPDADHTWYTDGSSLLQEGQRKA | |
| | GAAVTTETEVIWAKALPAGTSAQRAELIALTQALKMAEGKKLNVYTDSRYAFATAHIHGEIYRRRGWLTSEGKEIKNKDEILALLKALFLPKRLSIIHCPGHQKG | |
| | HSAEARGNRMADQAARKAAITETPDTSTLLKRTADGSEFESPKKKAKVE | |
| PL12000 | MPAAKRVKLDGGDKKYSIGLDIGTNSVGWAVITDEYKVPSKKFKVLGNTDRHSIKKNLIGALLFDSGETAEATRLKRTARRRYTRRKNRICYLQEIFSNEMAKV | 16,060 |
| | DDSFFHRLEESFLVEEDKKHERHPIFGNIVDEVAYHEKYPTIYHLRKKLVDSTDKADLRLIYLALAHMIKFRGHFLIEGDLNPDNSDVDKLFIQLVQTYNQLFEE | |
| | NPINASGVDAKAILSARLSKSRRLENLIAQLPGEKKNGLFGNLIALSLGLTPNFKSNFDLAEDAKLQLSKDTYDDDLDNLLAQIGDQYADLFLAAKNLSDAILLS | |
| | DILRVNTEITKAPLSASMIKRYDEHHQDLTLLKALVRQQLPEKYKEIFFDQSKNGYAGYIDGGASQEEFYKFIKPILEKMDGTEELLVKLNREDLLRKQRTFDNG | |
| | SIPHQIHLGELHAILRRQEDFYPFLKDNREKIEKILTFRIPYYVGPLARGNSRFAWMTRKSEETITPWNFEEVVDKGASAQSFIERMTNFDKNLPNEKVLPKHSL | |
| | LYEYFTVYNELTKVKYVTEGMRKPAFLSGEQKKAIVDLLFKTNRKVTVKQLKEDYFKKIECFDSVEISGVEDRFNASLGTYHDLLKIIKDKDFLDNEENEDILEDIV | |
| | LTLTLFEDREMIEERLKTYAHLFDDKVMKQLKRRRYTGWGRLSRKLINGIRDKQSGKTILDFLKSDGFANRNFMQLIHDDSLTFKEDIQKAQVSGQGDSLHE | |
| | HIANLAGSPAIKKGILQTVKVVDELVKVMGRHKPENIVIEMARENQTTQKGQKNSRERMKRIEEGIKELGSQILKEHPVENTQLQNEKLYLYYLQNGRDMYV | |
| | DQELDINRLSDYDVDHIVPQSFLKDDSIDNKVLTRSDKARGKSDNVPSEEVVKKMKNYWRQLLNAKLITQRKFDNLTKAERGGLSELDKAGFIKRQLVETRQI | |
| | TKHVAQILDSRMNTKYDENDKLIREVKVITLKSKLVSDFRKDFQFYKVREINNYHHAHDAYLNAVVGTALIKKYPKLESEFVYGDYKVYDVRKMIAKSEQEIGK | |
| | ATAKYFFYSNIMNFFKTEITLANGEIRKRPLIETNGETGEIVWDKGRDFATVRKVLSMPQVNIVKKTEVQTGGFSKESILPKRNSDKLIARKKDWDPKKYGGFD | |
| | SPTVAYSVLVVAKVEKGKSKKLKSVKELLGITIMERSSFEKNPIDFLEAKGYKEVKKDLIIKLPKYSLFELENGRKRMLASAGELQKGNELALPSKYVNFLYLASHY | |
| | EKLKGSPEDNEQKQLFVEQHKHYLDEIIEQISEFSKRVILADANLDKVLSAYNKHRDKPIREQAENIIHLFTLTNLGAPAAFKYFDTTIDRKRYTSTKEVLDATLIH | |
| | QSITGLYETRIDLSQLGGDAEAAAKEAAAKEAAAKEAAAKALEAEAAAKEAAAKEAAAKEAAAKAMASNFTQFVLVDNGGTGDVTVAPSNFANGIAEWIS | |
| | SNSRSQAYKVTCSVRQSSAQNRKYTIKVEVPKGAWRSYLNMELTIPIFATNSDCELIVKAMQGLLKDGNPIPSAIAANSGIYGGSGGSMASNFTQFVLVDNG | |
| | GTGDVTVAPSNFANGIAEWISSNSRSQAYKVTCSVRQSSAQNRKYTIKVEVPKGAWRSYLNMELTIPIFATNSDCELIVKAMQGLLKDGNPIPSAIAANSGIY | |
| | GGGSGGGSGGGSGGGSMASNFTQFVLVDNGGTGDVTVAPSNFANGIAEWISSNSRSQAYKVTCSVRQSSAQNRKYTIKVEVPKGAWRSYLNMELTIPIF | |
| | ATNSDCELIVKAMQGLLKDGNPIPSAIAANSGIYGGSGGSMASNFTQFVLVDNGGTGDVTVAPSNFANGIAEWISSNSRSQAYKVTCSVRQSSAQNRKYTI | |
| | KVEVPKGAWRSYLNMELTIPIFATNSDCELIVKAMQGLLKDGNPIPSAIAANSGIYGSSGGGEAAAKTLNIEDEHRLHETSKEPDVSLGSTWLSDFPQAWAE | |
| | TGGMGLAVRQAPLIIPLKATSTPVSIKQYPMSQEARLGIKPHIQRLLDQGILVPCQSPWNTPLLPVKKPGTNDYRPVQDLREVNKRVEDIHPTVPNPYNLLSG | |
| | LPPSHQWYTVLDLKDAFFCLRLHPTSQPLFAFEWRDPEMGISGQLTWTRLPQGFKNSPTLFNEALHRDLADFRIQHPDLILLQYVDDLLLAATSELDCQQGT | |
| | RALLQTLGNLGYRASAKKAQICQKQVKYLGYLLKEGQRWLTEARKETVMGQPTPKTPRQLREFLGKAGFCRLFIPGFAEMAAPLYPLTKPGTLFNWGPDQQ | |
| | KAYQEIKQALLTAPALGLPDLTKPFELFVDEKQGYAKGVLTQKLGPWRRPVAYLSKKLDPVAAGWPPCLRMVAAIAVLTKDAGKLTMGQPLVILAPHAVEA | |
| | LVKQPPDRWLSNARMTHYQALLLDTDRVQFGPVVALNPATLLPLPEEGLQHNCLDILAEAHGTRPDLTDQPLPDADHTWYTDGSSLLQEGQRKAGAAVT | |
| | TETEVIWAKALPAGTSAQRAELIALTQALKMAEGKKLNVYTDSRYAFATAHIHGEIYRRRGWLTSEGKEIKNKDEILALLKALFLPKRLSIIHCPGHQKGHSAEA | |
| | RGNRMADQAARKAAITETPDTSTLLKRTADGSEFESPKKKAKVE | |
| PL12001 | MPAAKRVKLDGGDKKYSIGLDIGTNSVGWAVITDEYKVPSKKFKVLGNTDRHSIKKNLIGALLFDSGETAEATRLKRTARRRYTRRKNRICYLQEIFSNEMAKV | 16,061 |
| | DDSFFHRLEESFLVEEDKKHERHPIFGNIVDEVAYHEKYPTIYHLRKKLVDSTDKADLRLIYLALAHMIKFRGHFLIEGDLNPDNSDVDKLFIQLVQTYNQLFEE | |
| | NPINASGVDAKAILSARLSKSRRLENLIAQLPGEKKNGLFGNLIALSLGLTPNFKSNFDLAEDAKLQLSKDTYDDDLDNLLAQIGDQYADLFLAAKNLSDAILLS | |
| | DILRVNTEITKAPLSASMIKRYDEHHQDLTLLKALVRQQLPEKYKEIFFDQSKNGYAGYIDGGASQEEFYKFIKPILEKMDGTEELLVKLNREDLLRKQRTFDNG | |
| | SIPHQIHLGELHAILRRQEDFYPFLKDNREKIEKILTFRIPYYVGPLARGNSRFAWMTRKSEETITPWNFEEVVDKGASAQSFIERMTNFDKNLPNEKVLPKHSL | |
| | LYEYFTVYNELTKVKYVTEGMRKPAFLSGEQKKAIVDLLFKTNRKVTVKQLKEDYFKKIECFDSVEISGVEDRFNASLGTYHDLLKIIKDKDFLDNEENEDILEDIV | |
| | LTLTLFEDREMIEERLKTYAHLFDDKVMKQLKRRRYTGWGRLSRKLINGIRDKQSGKTILDFLKSDGFANRNFMQLIHDDSLTFKEDIQKAQVSGQGDSLHE | |
| | HIANLAGSPAIKKGILQTVKVVDELVKVMGRHKPENIVIEMARENQTTQKGQKNSRERMKRIEEGIKELGSQILKEHPVENTQLQNEKLYLYYLQNGRDMYV | |
| | DQELDINRLSDYDVDHIVPQSFLKDDSIDNKVLTRSDKARGKSDNVPSEEVVKKMKNYWRQLLNAKLITQRKFDNLTKAERGGLSELDKAGFIKRQLVETRQI | |
| | TKHVAQILDSRMNTKYDENDKLIREVKVITLKSKLVSDFRKDFQFYKVREINNYHHAHDAYLNAVVGTALIKKYPKLESEFVYGDYKVYDVRKMIAKSEQEIGK | |
| | ATAKYFFYSNIMNFFKTEITLANGEIRKRPLIETNGETGEIVWDKGRDFATVRKVLSMPQVNIVKKTEVQTGGFSKESILPKRNSDKLIARKKDWDPKKYGGFD | |
| | SPTVAYSVLVVAKVEKGKSKKLKSVKELLGITIMERSSFEKNPIDFLEAKGYKEVKKDLIIKLPKYSLFELENGRKRMLASAGELQKGNELALPSKYVNFLYLASHY | |
| | EKLKGSPEDNEQKQLFVEQHKHYLDEIIEQISEFSKRVILADANLDKVLSAYNKHRDKPIREQAENIIHLFTLTNLGAPAAFKYFDTTIDRKRYTSTKEVLDATLIH | |
| | QSITGLYETRIDLSQLGGDSGGSSGGSSGSETPGTSESATPESSGGSSGGSSMASNFTQFVLVDNGGTGDVTVAPSNFANGIAEWISSNSRSQAYKVTCSVR | |
| | QSSAQNRKYTIKVEVPKGAWRSYLNMELTIPIFATNSDCELIVKAMQGLLKDGNPIPSAIAANSGIYAEAAAKEAAAKEAAAKEAAAKALEAEAAAKEAAAKE | |
| | AAAKEAAAKATLNIEDEHRLHETSKEPDVSLGSTWLSDFPQAWAETGGMGLAVRQAPLIIPLKATSTPVSIKQYPMSQEARLGIKPHIQRLLDQGILVPCQSP | |
| | WNTPLLPVKKPGTNDYRPVQDLREVNKRVEDIHPTVPNPYNLLSGLPPSHQWYTVLDLKDAFFCLRLHPTSQPLFAFEWRDPEMGISGQLTWTRLPQGFK | |
| | NSPTLFNEALHRDLADFRIQHPDLILLQYVDDLLLAATSELDCQQGTRALLQTLGNLGYRASAKKAQICQKQVKYLGYLLKEGQRWLTEARKETVMGQPTPK | |
| | TPRQLREFLGKAGFCRLFIPGFAEMAAPLYPLTKPGTLFNWGPDQQKAYQEIKQALLTAPALGLPDLTKPFELFVDEKQGYAKGVLTQKLGPWRRPVAYLSK | |
| | KLDPVAAGWPPCLRMVAAIAVLTKDAGKLTMGQPLVILAPHAVEALVKQPPDRWLSNARMTHYQALLLDTDRVQFGPVVALNPATLLPLPEEGLQHNCL | |
| | DILAEAHGTRPDLTDQPLPDADHTWYTDGSSLLQEGQRKAGAAVTTETEVIWAKALPAGTSAQRAELIALTQALKMAEGKKLNVYTDSRYAFATAHIHGEIY | |
| | RRRGWLTSEGKEIKNKDEILALLKALFLPKRLSIIHCPGHQKGHSAEARGNRMADQAARKAAITETPDTSTLLKRTADGSEFESPKKKAKVE | |
| PL12002 | MPAAKRVKLDGGDKKYSIGLDIGTNSVGWAVITDEYKVPSKKFKVLGNTDRHSIKKNLIGALLFDSGETAEATRLKRTARRRYTRRKNRICYLQEIFSNEMAKV | 16,062 |
| | DDSFFHRLEESFLVEEDKKHERHPIFGNIVDEVAYHEKYPTIYHLRKKLVDSTDKADLRLIYLALAHMIKFRGHFLIEGDLNPDNSDVDKLFIQLVQTYNQLFEE | |
| | NPINASGVDAKAILSARLSKSRRLENLIAQLPGEKKNGLFGNLIALSLGLTPNFKSNFDLAEDAKLQLSKDTYDDDLDNLLAQIGDQYADLFLAAKNLSDAILLS | |
| | DILRVNTEITKAPLSASMIKRYDEHHQDLTLLKALVRQQLPEKYKEIFFDQSKNGYAGYIDGGASQEEFYKFIKPILEKMDGTEELLVKLNREDLLRKQRTFDNG | |
| | SIPHQIHLGELHAILRRQEDFYPFLKDNREKIEKILTFRIPYYVGPLARGNSRFAWMTRKSEETITPWNFEEVVDKGASAQSFIERMTNFDKNLPNEKVLPKHSL | |
| | LYEYFTVYNELTKVKYVTEGMRKPAFLSGEQKKAIVDLLFKTNRKVTVKQLKEDYFKKIECFDSVEISGVEDRFNASLGTYHDLLKIIKDKDFLDNEENEDILEDIV | |
| | LTLTLFEDREMIEERLKTYAHLFDDKVMKQLKRRRYTGWGRLSRKLINGIRDKQSGKTILDFLKSDGFANRNFMQLIHDDSLTFKEDIQKAQVSGQGDSLHE | |
| | HIANLAGSPAIKKGILQTVKVVDELVKVMGRHKPENIVIEMARENQTTQKGQKNSRERMKRIEEGIKELGSQILKEHPVENTQLQNEKLYLYYLQNGRDMYV | |
| | DQELDINRLSDYDVDHIVPQSFLKDDSIDNKVLTRSDKARGKSDNVPSEEVVKKMKNYWRQLLNAKLITQRKFDNLTKAERGGLSELDKAGFIKRQLVETRQI | |
| | TKHVAQILDSRMNTKYDENDKLIREVKVITLKSKLVSDFRKDFQFYKVREINNYHHAHDAYLNAVVGTALIKKYPKLESEFVYGDYKVYDVRKMIAKSEQEIGK | |
| | ATAKYFFYSNIMNFFKTEITLANGEIRKRPLIETNGETGEIVWDKGRDFATVRKVLSMPQVNIVKKTEVQTGGFSKESILPKRNSDKLIARKKDWDPKKYGGFD | |
| | SPTVAYSVLVVAKVEKGKSKKLKSVKELLGITIMERSSFEKNPIDFLEAKGYKEVKKDLIIKLPKYSLFELENGRKRMLASAGELQKGNELALPSKYVNFLYLASHY | |
| | EKLKGSPEDNEQKQLFVEQHKHYLDEIIEQISEFSKRVILADANLDKVLSAYNKHRDKPIREQAENIIHLFTLTNLGAPAAFKYFDTTIDRKRYTSTKEVLDATLIH | |
| | QSITGLYETRIDLSQLGGDSGGSSGGSSGSETPGTSESATPESSGGSSGGSSMASNFTQFVLVDNGGTGDVTVAPSNFANGIAEWISSNSRSQAYKVTCSVR | |
| | QSSAQNRKYTIKVEVPKGAWRSYLNMELTIPIFATNSDCELIVKAMQGLLKDGNPIPSAIAANSGIYSGGSSGGSSGSETPGTSESATPESSGGSSGGSSTLNIE | |
| | DEHRLHETSKEPDVSLGSTWLSDFPQAWAETGGMGLAVRQAPLIIPLKATSTPVSIKQYPMSQEARLGIKPHIQRLLDQGILVPCQSPWNTPLLPVKKPGTN | |
| | DYRPVQDLREVNKRVEDIHPTVPNPYNLLSGLPPSHQWYTVLDLKDAFFCLRLHPTSQPLFAFEWRDPEMGISGQLTWTRLPQGFKNSPTLFNEALHRDLA | |
| | DFRIQHPDLILLQYVDDLLLAATSELDCQQGTRALLQTLGNLGYRASAKKAQICQKQVKYLGYLLKEGQRWLTEARKETVMGQPTPKTPRQLREFLGKAGFC | |
| | RLFIPGFAEMAAPLYPLTKPGTLFNWGPDQQKAYQEIKQALLTAPALGLPDLTKPFELFVDEKQGYAKGVLTQKLGPWRRPVAYLSKKLDPVAAGWPPCLR | |
| | MVAAIAVLTKDAGKLTMGQPLVILAPHAVEALVKQPPDRWLSNARMTHYQALLLDTDRVQFGPVVALNPATLLPLPEEGLQHNCLDILAEAHGTRPDLTD | |
| | QPLPDADHTWYTDGSSLLQEGQRKAGAAVTTETEVIWAKALPAGTSAQRAELIALTQALKMAEGKKLNVYTDSRYAFATAHIHGEIYRRRGWLTSEGKEIK | |
| | NKDEILALLKALFLPKRLSIIHCPGHQKGHSAEARGNRMADQAARKAAITETPDTSTLLKRTADGSEFESPKKKAKVE | |
| PL12003 | MPAAKRVKLDGGDKKYSIGLDIGTNSVGWAVITDEYKVPSKKFKVLGNTDRHSIKKNLIGALLFDSGETAEATRLKRTARRRYTRRKNRICYLQEIFSNEMAKV | 16,063 |
| | DDSFFHRLEESFLVEEDKKHERHPIFGNIVDEVAYHEKYPTIYHLRKKLVDSTDKADLRLIYLALAHMIKFRGHFLIEGDLNPDNSDVDKLFIQLVQTYNQLFEE | |
| | NPINASGVDAKAILSARLSKSRRLENLIAQLPGEKKNGLFGNLIALSLGLTPNFKSNFDLAEDAKLQLSKDTYDDDLDNLLAQIGDQYADLFLAAKNLSDAILLS | |
| | DILRVNTEITKAPLSASMIKRYDEHHQDLTLLKALVRQQLPEKYKEIFFDQSKNGYAGYIDGGASQEEFYKFIKPILEKMDGTEELLVKLNREDLLRKQRTFDNG | |
| | SIPHQIHLGELHAILRRQEDFYPFLKDNREKIEKILTFRIPYYVGPLARGNSRFAWMTRKSEETITPWNFEEVVDKGASAQSFIERMTNFDKNLPNEKVLPKHSL | |
| | LYEYFTVYNELTKVKYVTEGMRKPAFLSGEQKKAIVDLLFKTNRKVTVKQLKEDYFKKIECFDSVEISGVEDRFNASLGTYHDLLKIIKDKDFLDNEENEDILEDIV | |
| | LTLTLFEDREMIEERLKTYAHLFDDKVMKQLKRRRYTGWGRLSRKLINGIRDKQSGKTILDFLKSDGFANRNFMQLIHDDSLTFKEDIQKAQVSGQGDSLHE | |
| | HIANLAGSPAIKKGILQTVKVVDELVKVMGRHKPENIVIEMARENQTTQKGQKNSRERMKRIEEGIKELGSQILKEHPVENTQLQNEKLYLYYLQNGRDMYV | |
| | DQELDINRLSDYDVDHIVPQSFLKDDSIDNKVLTRSDKARGKSDNVPSEEVVKKMKNYWRQLLNAKLITQRKFDNLTKAERGGLSELDKAGFIKRQLVETRQI | |
| | TKHVAQILDSRMNTKYDENDKLIREVKVITLKSKLVSDFRKDFQFYKVREINNYHHAHDAYLNAVVGTALIKKYPKLESEFVYGDYKVYDVRKMIAKSEQEIGK | |
| | ATAKYFFYSNIMNFFKTEITLANGEIRKRPLIETNGETGEIVWDKGRDFATVRKVLSMPQVNIVKKTEVQTGGFSKESILPKRNSDKLIARKKDWDPKKYGGFD | |
| | SPTVAYSVLVVAKVEKGKSKKLKSVKELLGITIMERSSFEKNPIDFLEAKGYKEVKKDLIIKLPKYSLFELENGRKRMLASAGELQKGNELALPSKYVNFLYLASHY | |
| | EKLKGSPEDNEQKQLFVEQHKHYLDEIIEQISEFSKRVILADANLDKVLSAYNKHRDKPIREQAENIIHLFTLTNLGAPAAFKYFDTTIDRKRYTSTKEVLDATLIH | |
| | QSITGLYETRIDLSQLGGDSGGSSGGSSGSETPGTSESATPESSGGSSGGSSMASNFTQFVLVDNGGTGDVTVAPSNFANGIAEWISSNSRSQAYKVTCSVR | |
| | QSSAQNRKYTIKVEVPKGAWRSYLNMELTIPIFATNSDCELIVKAMQGLLKDGNPIPSAIAANSGIYGSSGSSGSSGSSGSSGSSTLNIEDEHRLHETSKEPDVS | |
| | LGSTWLSDFPQAWAETGGMGLAVRQAPLIIPLKATSTPVSIKQYPMSQEARLGIKPHIQRLLDQGILVPCQSPWNTPLLPVKKPGTNDYRPVQDLREVNKR | |
| | VEDIHPTVPNPYNLLSGLPPSHQWYTVLDLKDAFFCLRLHPTSQPLFAFEWRDPEMGISGQLTWTRLPQGFKNSPTLFNEALHRDLADFRIQHPDLILLQYV | |
| | DDLLLAATSELDCQQGTRALLQTLGNLGYRASAKKAQICQKQVKYLGYLLKEGQRWLTEARKETVMGQPTPKTPRQLREFLGKAGFCRLFIPGFAEMAAPLY | |
| | PLTKPGTLFNWGPDQQKAYQEIKQALLTAPALGLPDLTKPFELFVDEKQGYAKGVLTQKLGPWRRPVAYLSKKLDPVAAGWPPCLRMVAAIAVLTKDAGKL | |
| | TMGQPLVILAPHAVEALVKQPPDRWLSNARMTHYQALLLDTDRVQFGPVVALNPATLLPLPEEGLQHNCLDILAEAHGTRPDLTDQPLPDADHTWYTDG | |
| | SSLLQEGQRKAGAAVTTETEVIWAKALPAGTSAQRAELIALTQALKMAEGKKLNVYTDSRYAFATAHIHGEIYRRRGWLTSEGKEIKNKDEILALLKALFLPKR | |
| | LSIIHCPGHQKGHSAEARGNRMADQAARKAAITETPDTSTLLKRTADGSEFESPKKKAKVE | |
| PL12004 | MPAAKRVKLDGGDKKYSIGLDIGTNSVGWAVITDEYKVPSKKFKVLGNTDRHSIKKNLIGALLFDSGETAEATRLKRTARRRYTRRKNRICYLQEIFSNEMAKV | 16,064 |
| | DDSFFHRLEESFLVEEDKKHERHPIFGNIVDEVAYHEKYPTIYHLRKKLVDSTDKADLRLIYLALAHMIKFRGHFLIEGDLNPDNSDVDKLFIQLVQTYNQLFEE | |
| | NPINASGVDAKAILSARLSKSRRLENLIAQLPGEKKNGLFGNLIALSLGLTPNFKSNFDLAEDAKLQLSKDTYDDDLDNLLAQIGDQYADLFLAAKNLSDAILLS | |
| | DILRVNTEITKAPLSASMIKRYDEHHQDLTLLKALVRQQLPEKYKEIFFDQSKNGYAGYIDGGASQEEFYKFIKPILEKMDGTEELLVKLNREDLLRKQRTFDNG | |
| | SIPHQIHLGELHAILRRQEDFYPFLKDNREKIEKILTFRIPYYVGPLARGNSRFAWMTRKSEETITPWNFEEVVDKGASAQSFIERMTNFDKNLPNEKVLPKHSL | |
| | LYEYFTVYNELTKVKYVTEGMRKPAFLSGEQKKAIVDLLFKTNRKVTVKQLKEDYFKKIECFDSVEISGVEDRFNASLGTYHDLLKIIKDKDFLDNEENEDILEDIV | |
| | LTLTLFEDREMIEERLKTYAHLFDDKVMKQLKRRRYTGWGRLSRKLINGIRDKQSGKTILDFLKSDGFANRNFMQLIHDDSLTFKEDIQKAQVSGQGDSLHE | |
| | HIANLAGSPAIKKGILQTVKVVDELVKVMGRHKPENIVIEMARENQTTQKGQKNSRERMKRIEEGIKELGSQILKEHPVENTQLQNEKLYLYYLQNGRDMYV | |
| | DQELDINRLSDYDVDHIVPQSFLKDDSIDNKVLTRSDKARGKSDNVPSEEVVKKMKNYWRQLLNAKLITQRKFDNLTKAERGGLSELDKAGFIKRQLVETRQI | |
| | TKHVAQILDSRMNTKYDENDKLIREVKVITLKSKLVSDFRKDFQFYKVREINNYHHAHDAYLNAVVGTALIKKYPKLESEFVYGDYKVYDVRKMIAKSEQEIGK | |
| | ATAKYFFYSNIMNFFKTEITLANGEIRKRPLIETNGETGEIVWDKGRDFATVRKVLSMPQVNIVKKTEVQTGGFSKESILPKRNSDKLIARKKDWDPKKYGGFD | |
| | SPTVAYSVLVVAKVEKGKSKKLKSVKELLGITIMERSSFEKNPIDFLEAKGYKEVKKDLIIKLPKYSLFELENGRKRMLASAGELQKGNELALPSKYVNFLYLASHY | |
| | EKLKGSPEDNEQKQLFVEQHKHYLDEIIEQISEFSKRVILADANLDKVLSAYNKHRDKPIREQAENIIHLFTLTNLGAPAAFKYFDTTIDRKRYTSTKEVLDATLIH | |
| | QSITGLYETRIDLSQLGGDSGGSSGGSSGSETPGTSESATPESSGGSSGGSSMASNFTQFVLVDNGGTGDVTVAPSNFANGIAEWISSNSRSQAYKVTCSVR | |
| | QSSAQNRKYTIKVEVPKGAWRSYLNMELTIPIFATNSDCELIVKAMQGLLKDGNPIPSAIAANSGIYGSSGGGEAAAKTLNIEDEHRLHETSKEPDVSLGSTW | |
| | LSDFPQAWAETGGMGLAVRQAPLIIPLKATSTPVSIKQYPMSQEARLGIKPHIQRLLDQGILVPCQSPWNTPLLPVKKPGTNDYRPVQDLREVNKRVEDIHP | |
| | TVPNPYNLLSGLPPSHQWYTVLDLKDAFFCLRLHPTSQPLFAFEWRDPEMGISGQLTWTRLPQGFKNSPTLFNEALHRDLADFRIQHPDLILLQYVDDLLLA | |
| | ATSELDCQQGTRALLQTLGNLGYRASAKKAQICQKQVKYLGYLLKEGQRWLTEARKETVMGQPTPKTPRQLREFLGKAGFCRLFIPGFAEMAAPLYPLTKP | |
| | GTLFNWGPDQQKAYQEIKQALLTAPALGLPDLTKPFELFVDEKQGYAKGVLTQKLGPWRRPVAYLSKKLDPVAAGWPPCLRMVAAIAVLTKDAGKLTMG | |
| | QPLVILAPHAVEALVKQPPDRWLSNARMTHYQALLLDTDRVQFGPVVALNPATLLPLPEEGLQHNCLDILAEAHGTRPDLTDQPLPDADHTWYTDGSSLL | |
| | QEGQRKAGAAVTTETEVIWAKALPAGTSAQRAELIALTQALKMAEGKKLNVYTDSRYAFATAHIHGEIYRRRGWLTSEGKEIKNKDEILALLKALFLPKRLSIIH | |
| | CPGHQKGHSAEARGNRMADQAARKAAITETPDTSTLLKRTADGSEFESPKKKAKVE | |
| PL12005 | MPAAKRVKLDGGDKKYSIGLDIGTNSVGWAVITDEYKVPSKKFKVLGNTDRHSIKKNLIGALLFDSGETAEATRLKRTARRRYTRRKNRICYLQEIFSNEMAKV | 16,065 |
| | DDSFFHRLEESFLVEEDKKHERHPIFGNIVDEVAYHEKYPTIYHLRKKLVDSTDKADLRLIYLALAHMIKFRGHFLIEGDLNPDNSDVDKLFIQLVQTYNQLFEE | |
| | NPINASGVDAKAILSARLSKSRRLENLIAQLPGEKKNGLFGNLIALSLGLTPNFKSNFDLAEDAKLQLSKDTYDDDLDNLLAQIGDQYADLFLAAKNLSDAILLS | |
| | DILRVNTEITKAPLSASMIKRYDEHHQDLTLLKALVRQQLPEKYKEIFFDQSKNGYAGYIDGGASQEEFYKFIKPILEKMDGTEELLVKLNREDLLRKQRTFDNG | |
| | SIPHQIHLGELHAILRRQEDFYPFLKDNREKIEKILTFRIPYYVGPLARGNSRFAWMTRKSEETITPWNFEEVVDKGASAQSFIERMTNFDKNLPNEKVLPKHSL | |
| | LYEYFTVYNELTKVKYVTEGMRKPAFLSGEQKKAIVDLLFKTNRKVTVKQLKEDYFKKIECFDSVEISGVEDRFNASLGTYHDLLKIIKDKDFLDNEENEDILEDIV | |
| | LTLTLFEDREMIEERLKTYAHLFDDKVMKQLKRRRYTGWGRLSRKLINGIRDKQSGKTILDFLKSDGFANRNFMQLIHDDSLTFKEDIQKAQVSGQGDSLHE | |
| | HIANLAGSPAIKKGILQTVKVVDELVKVMGRHKPENIVIEMARENQTTQKGQKNSRERMKRIEEGIKELGSQILKEHPVENTQLQNEKLYLYYLQNGRDMYV | |
| | DQELDINRLSDYDVDHIVPQSFLKDDSIDNKVLTRSDKARGKSDNVPSEEVVKKMKNYWRQLLNAKLITQRKFDNLTKAERGGLSELDKAGFIKRQLVETRQI | |
| | TKHVAQILDSRMNTKYDENDKLIREVKVITLKSKLVSDFRKDFQFYKVREINNYHHAHDAYLNAVVGTALIKKYPKLESEFVYGDYKVYDVRKMIAKSEQEIGK | |
| | ATAKYFFYSNIMNFFKTEITLANGEIRKRPLIETNGETGEIVWDKGRDFATVRKVLSMPQVNIVKKTEVQTGGFSKESILPKRNSDKLIARKKDWDPKKYGGFD | |
| | SPTVAYSVLVVAKVEKGKSKKLKSVKELLGITIMERSSFEKNPIDFLEAKGYKEVKKDLIIKLPKYSLFELENGRKRMLASAGELQKGNELALPSKYVNFLYLASHY | |
| | EKLKGSPEDNEQKQLFVEQHKHYLDEIIEQISEFSKRVILADANLDKVLSAYNKHRDKPIREQAENIIHLFTLTNLGAPAAFKYFDTTIDRKRYTSTKEVLDATLIH | |
| | QSITGLYETRIDLSQLGGDSGGSSGGSSGSETPGTSESATPESSGGSSGGSSMASNFTQFVLVDNGGTGDVTVAPSNFANGIAEWISSNSRSQAYKVTCSVR | |
| | QSSAQNRKYTIKVEVPKGAWRSYLNMELTIPIFATNSDCELIVKAMQGLLKDGNPIPSAIAANSGIYGGSGGSMASNFTQFVLVDNGGTGDVTVAPSNFAN | |
| | GIAEWISSNSRSQAYKVTCSVRQSSAQNRKYTIKVEVPKGAWRSYLNMELTIPIFATNSDCELIVKAMQGLLKDGNPIPSAIAANSGIYAEAAAKEAAAKEAA | |
| | AKEAAAKALEAEAAAKEAAAKEAAAKEAAAKATLNIEDEHRLHETSKEPDVSLGSTWLSDFPQAWAETGGMGLAVRQAPLIIPLKATSTPVSIKQYPMSQE | |
| | ARLGIKPHIQRLLDQGILVPCQSPWNTPLLPVKKPGTNDYRPVQDLREVNKRVEDIHPTVPNPYNLLSGLPPSHQWYTVLDLKDAFFCLRLHPTSQPLFAFE | |
| | WRDPEMGISGQLTWTRLPQGFKNSPTLFNEALHRDLADFRIQHPDLILLQYVDDLLLAATSELDCQQGTRALLQTLGNLGYRASAKKAQICQKQVKYLGYLL | |
| | KEGQRWLTEARKETVMGQPTPKTPRQLREFLGKAGFCRLFIPGFAEMAAPLYPLTKPGTLFNWGPDQQKAYQEIKQALLTAPALGLPDLTKPFELFVDEKQ | |
| | GYAKGVLTQKLGPWRRPVAYLSKKLDPVAAGWPPCLRMVAAIAVLTKDAGKLTMGQPLVILAPHAVEALVKQPPDRWLSNARMTHYQALLLDTDRVQF | |
| | GPVVALNPATLLPLPEEGLQHNCLDILAEAHGTRPDLTDQPLPDADHTWYTDGSSLLQEGQRKAGAAVTTETEVIWAKALPAGTSAQRAELIALTQALKMA | |
| | EGKKLNVYTDSRYAFATAHIHGEIYRRRGWLTSEGKEIKNKDEILALLKALFLPKRLSIIHCPGHQKGHSAEARGNRMADQAARKAAITETPDTSTLLKRTADG | |
| | SEFESPKKKAKVE | |
| PL12006 | MPAAKRVKLDGGDKKYSIGLDIGTNSVGWAVITDEYKVPSKKFKVLGNTDRHSIKKNLIGALLFDSGETAEATRLKRTARRRYTRRKNRICYLQEIFSNEMAKV | 16,066 |
| | DDSFFHRLEESFLVEEDKKHERHPIFGNIVDEVAYHEKYPTIYHLRKKLVDSTDKADLRLIYLALAHMIKFRGHFLIEGDLNPDNSDVDKLFIQLVQTYNQLFEE | |
| | NPINASGVDAKAILSARLSKSRRLENLIAQLPGEKKNGLFGNLIALSLGLTPNFKSNFDLAEDAKLQLSKDTYDDDLDNLLAQIGDQYADLFLAAKNLSDAILLS | |
| | DILRVNTEITKAPLSASMIKRYDEHHQDLTLLKALVRQQLPEKYKEIFFDQSKNGYAGYIDGGASQEEFYKFIKPILEKMDGTEELLVKLNREDLLRKQRTFDNG | |
| | SIPHQIHLGELHAILRRQEDFYPFLKDNREKIEKILTFRIPYYVGPLARGNSRFAWMTRKSEETITPWNFEEVVDKGASAQSFIERMTNFDKNLPNEKVLPKHSL | |
| | LYEYFTVYNELTKVKYVTEGMRKPAFLSGEQKKAIVDLLFKTNRKVTVKQLKEDYFKKIECFDSVEISGVEDRFNASLGTYHDLLKIIKDKDFLDNEENEDILEDIV | |
| | LTLTLFEDREMIEERLKTYAHLFDDKVMKQLKRRRYTGWGRLSRKLINGIRDKQSGKTILDFLKSDGFANRNFMQLIHDDSLTFKEDIQKAQVSGQGDSLHE | |
| | HIANLAGSPAIKKGILQTVKVVDELVKVMGRHKPENIVIEMARENQTTQKGQKNSRERMKRIEEGIKELGSQILKEHPVENTQLQNEKLYLYYLQNGRDMYV | |
| | DQELDINRLSDYDVDHIVPQSFLKDDSIDNKVLTRSDKARGKSDNVPSEEVVKKMKNYWRQLLNAKLITQRKFDNLTKAERGGLSELDKAGFIKRQLVETRQI | |
| | TKHVAQILDSRMNTKYDENDKLIREVKVITLKSKLVSDFRKDFQFYKVREINNYHHAHDAYLNAVVGTALIKKYPKLESEFVYGDYKVYDVRKMIAKSEQEIGK | |
| | ATAKYFFYSNIMNFFKTEITLANGEIRKRPLIETNGETGEIVWDKGRDFATVRKVLSMPQVNIVKKTEVQTGGFSKESILPKRNSDKLIARKKDWDPKKYGGFD | |
| | SPTVAYSVLVVAKVEKGKSKKLKSVKELLGITIMERSSFEKNPIDFLEAKGYKEVKKDLIIKLPKYSLFELENGRKRMLASAGELQKGNELALPSKYVNFLYLASHY | |
| | EKLKGSPEDNEQKQLFVEQHKHYLDEIIEQISEFSKRVILADANLDKVLSAYNKHRDKPIREQAENIIHLFTLTNLGAPAAFKYFDTTIDRKRYTSTKEVLDATLIH | |
| | QSITGLYETRIDLSQLGGDSGGSSGGSSGSETPGTSESATPESSGGSSGGSSMASNFTQFVLVDNGGTGDVTVAPSNFANGIAEWISSNSRSQAYKVTCSVR | |
| | QSSAQNRKYTIKVEVPKGAWRSYLNMELTIPIFATNSDCELIVKAMQGLLKDGNPIPSAIAANSGIYGGSGGSMASNFTQFVLVDNGGTGDVTVAPSNFAN | |
| | GIAEWISSNSRSQAYKVTCSVRQSSAQNRKYTIKVEVPKGAWRSYLNMELTIPIFATNSDCELIVKAMQGLLKDGNPIPSAIAANSGIYSGGSSGGSSGSETPG | |
| | TSESATPESSGGSSGGSSTLNIEDEHRLHETSKEPDVSLGSTWLSDFPQAWAETGGMGLAVRQAPLIIPLKATSTPVSIKQYPMSQEARLGIKPHIQRLLDQGI | |
| | LVPCQSPWNTPLLPVKKPGTNDYRPVQDLREVNKRVEDIHPTVPNPYNLLSGLPPSHQWYTVLDLKDAFFCLRLHPTSQPLFAFEWRDPEMGISGQLTWT | |
| | RLPQGFKNSPTLFNEALHRDLADFRIQHPDLILLQYVDDLLLAATSELDCQQGTRALLQTLGNLGYRASAKKAQICQKQVKYLGYLLKEGQRWLTEARKETV | |
| | MGQPTPKTPRQLREFLGKAGFCRLFIPGFAEMAAPLYPLTKPGTLFNWGPDQQKAYQEIKQALLTAPALGLPDLTKPFELFVDEKQGYAKGVLTQKLGPWR | |
| | RPVAYLSKKLDPVAAGWPPCLRMVAAIAVLTKDAGKLTMGQPLVILAPHAVEALVKQPPDRWLSNARMTHYQALLLDTDRVQFGPVVALNPATLLPLPEE | |
| | GLQHNCLDILAEAHGTRPDLTDQPLPDADHTWYTDGSSLLQEGQRKAGAAVTTETEVIWAKALPAGTSAQRAELIALTQALKMAEGKKLNVYTDSRYAFAT | |
| | AHIHGEIYRRRGWLTSEGKEIKNKDEILALLKALFLPKRLSIIHCPGHQKGHSAEARGNRMADQAARKAAITETPDTSTLLKRTADGSEFESPKKKAKVE | |
| PL12007 | MPAAKRVKLDGGDKKYSIGLDIGTNSVGWAVITDEYKVPSKKFKVLGNTDRHSIKKNLIGALLFDSGETAEATRLKRTARRRYTRRKNRICYLQEIFSNEMAKV | 16,067 |
| | DDSFFHRLEESFLVEEDKKHERHPIFGNIVDEVAYHEKYPTIYHLRKKLVDSTDKADLRLIYLALAHMIKFRGHFLIEGDLNPDNSDVDKLFIQLVQTYNQLFEE | |
| | NPINASGVDAKAILSARLSKSRRLENLIAQLPGEKKNGLFGNLIALSLGLTPNFKSNFDLAEDAKLQLSKDTYDDDLDNLLAQIGDQYADLFLAAKNLSDAILLS | |
| | DILRVNTEITKAPLSASMIKRYDEHHQDLTLLKALVRQQLPEKYKEIFFDQSKNGYAGYIDGGASQEEFYKFIKPILEKMDGTEELLVKLNREDLLRKQRTFDNG | |
| | SIPHQIHLGELHAILRRQEDFYPFLKDNREKIEKILTFRIPYYVGPLARGNSRFAWMTRKSEETITPWNFEEVVDKGASAQSFIERMTNFDKNLPNEKVLPKHSL | |
| | LYEYFTVYNELTKVKYVTEGMRKPAFLSGEQKKAIVDLLFKTNRKVTVKQLKEDYFKKIECFDSVEISGVEDRFNASLGTYHDLLKIIKDKDFLDNEENEDILEDIV | |
| | LTLTLFEDREMIEERLKTYAHLFDDKVMKQLKRRRYTGWGRLSRKLINGIRDKQSGKTILDFLKSDGFANRNFMQLIHDDSLTFKEDIQKAQVSGQGDSLHE | |
| | HIANLAGSPAIKKGILQTVKVVDELVKVMGRHKPENIVIEMARENQTTQKGQKNSRERMKRIEEGIKELGSQILKEHPVENTQLQNEKLYLYYLQNGRDMYV | |
| | DQELDINRLSDYDVDHIVPQSFLKDDSIDNKVLTRSDKARGKSDNVPSEEVVKKMKNYWRQLLNAKLITQRKFDNLTKAERGGLSELDKAGFIKRQLVETRQI | |
| | TKHVAQILDSRMNTKYDENDKLIREVKVITLKSKLVSDFRKDFQFYKVREINNYHHAHDAYLNAVVGTALIKKYPKLESEFVYGDYKVYDVRKMIAKSEQEIGK | |
| | ATAKYFFYSNIMNFFKTEITLANGEIRKRPLIETNGETGEIVWDKGRDFATVRKVLSMPQVNIVKKTEVQTGGFSKESILPKRNSDKLIARKKDWDPKKYGGFD | |
| | SPTVAYSVLVVAKVEKGKSKKLKSVKELLGITIMERSSFEKNPIDFLEAKGYKEVKKDLIIKLPKYSLFELENGRKRMLASAGELQKGNELALPSKYVNFLYLASHY | |
| | EKLKGSPEDNEQKQLFVEQHKHYLDEIIEQISEFSKRVILADANLDKVLSAYNKHRDKPIREQAENIIHLFTLTNLGAPAAFKYFDTTIDRKRYTSTKEVLDATLIH | |
| | QSITGLYETRIDLSQLGGDSGGSSGGSSGSETPGTSESATPESSGGSSGGSSMASNFTQFVLVDNGGTGDVTVAPSNFANGIAEWISSNSRSQAYKVTCSVR | |
| | QSSAQNRKYTIKVEVPKGAWRSYLNMELTIPIFATNSDCELIVKAMQGLLKDGNPIPSAIAANSGIYGGSGGSMASNFTQFVLVDNGGTGDVTVAPSNFAN | |
| | GIAEWISSNSRSQAYKVTCSVRQSSAQNRKYTIKVEVPKGAWRSYLNMELTIPIFATNSDCELIVKAMQGLLKDGNPIPSAIAANSGIYGSSGSSGSSGSSGSS | |
| | GSSTLNIEDEHRLHETSKEPDVSLGSTWLSDFPQAWAETGGMGLAVRQAPLIIPLKATSTPVSIKQYPMSQEARLGIKPHIQRLLDQGILVPCQSPWNTPLLP | |
| | VKKPGTNDYRPVQDLREVNKRVEDIHPTVPNPYNLLSGLPPSHQWYTVLDLKDAFFCLRLHPTSQPLFAFEWRDPEMGISGQLTWTRLPQGFKNSPTLFNE | |
| | ALHRDLADFRIQHPDLILLQYVDDLLLAATSELDCQQGTRALLQTLGNLGYRASAKKAQICQKQVKYLGYLLKEGQRWLTEARKETVMGQPTPKTPRQLREF | |
| | LGKAGFCRLFIPGFAEMAAPLYPLTKPGTLFNWGPDQQKAYQEIKQALLTAPALGLPDLTKPFELFVDEKQGYAKGVLTQKLGPWRRPVAYLSKKLDPVAAG | |
| | WPPCLRMVAAIAVLTKDAGKLTMGQPLVILAPHAVEALVKQPPDRWLSNARMTHYQALLLDTDRVQFGPVVALNPATLLPLPEEGLQHNCLDILAEAHGT | |
| | RPDLTDQPLPDADHTWYTDGSSLLQEGQRKAGAAVTTETEVIWAKALPAGTSAQRAELIALTQALKMAEGKKLNVYTDSRYAFATAHIHGEIYRRRGWLTS | |
| | EGKEIKNKDEILALLKALFLPKRLSIIHCPGHQKGHSAEARGNRMADQAARKAAITETPDTSTLLKRTADGSEFESPKKKAKVE | |
| PL12008 | MPAAKRVKLDGGDKKYSIGLDIGTNSVGWAVITDEYKVPSKKFKVLGNTDRHSIKKNLIGALLFDSGETAEATRLKRTARRRYTRRKNRICYLQEIFSNEMAKV | 16,068 |
| | DDSFFHRLEESFLVEEDKKHERHPIFGNIVDEVAYHEKYPTIYHLRKKLVDSTDKADLRLIYLALAHMIKFRGHFLIEGDLNPDNSDVDKLFIQLVQTYNQLFEE | |
| | NPINASGVDAKAILSARLSKSRRLENLIAQLPGEKKNGLFGNLIALSLGLTPNFKSNFDLAEDAKLQLSKDTYDDDLDNLLAQIGDQYADLFLAAKNLSDAILLS | |
| | DILRVNTEITKAPLSASMIKRYDEHHQDLTLLKALVRQQLPEKYKEIFFDQSKNGYAGYIDGGASQEEFYKFIKPILEKMDGTEELLVKLNREDLLRKQRTFDNG | |
| | SIPHQIHLGELHAILRRQEDFYPFLKDNREKIEKILTFRIPYYVGPLARGNSRFAWMTRKSEETITPWNFEEVVDKGASAQSFIERMTNFDKNLPNEKVLPKHSL | |
| | LYEYFTVYNELTKVKYVTEGMRKPAFLSGEQKKAIVDLLFKTNRKVTVKQLKEDYFKKIECFDSVEISGVEDRFNASLGTYHDLLKIIKDKDFLDNEENEDILEDIV | |
| | LTLTLFEDREMIEERLKTYAHLFDDKVMKQLKRRRYTGWGRLSRKLINGIRDKQSGKTILDFLKSDGFANRNFMQLIHDDSLTFKEDIQKAQVSGQGDSLHE | |
| | HIANLAGSPAIKKGILQTVKVVDELVKVMGRHKPENIVIEMARENQTTQKGQKNSRERMKRIEEGIKELGSQILKEHPVENTQLQNEKLYLYYLQNGRDMYV | |
| | DQELDINRLSDYDVDHIVPQSFLKDDSIDNKVLTRSDKARGKSDNVPSEEVVKKMKNYWRQLLNAKLITQRKFDNLTKAERGGLSELDKAGFIKRQLVETRQI | |
| | TKHVAQILDSRMNTKYDENDKLIREVKVITLKSKLVSDFRKDFQFYKVREINNYHHAHDAYLNAVVGTALIKKYPKLESEFVYGDYKVYDVRKMIAKSEQEIGK | |
| | ATAKYFFYSNIMNFFKTEITLANGEIRKRPLIETNGETGEIVWDKGRDFATVRKVLSMPQVNIVKKTEVQTGGFSKESILPKRNSDKLIARKKDWDPKKYGGFD | |
| | SPTVAYSVLVVAKVEKGKSKKLKSVKELLGITIMERSSFEKNPIDFLEAKGYKEVKKDLIIKLPKYSLFELENGRKRMLASAGELQKGNELALPSKYVNFLYLASHY | |
| | EKLKGSPEDNEQKQLFVEQHKHYLDEIIEQISEFSKRVILADANLDKVLSAYNKHRDKPIREQAENIIHLFTLTNLGAPAAFKYFDTTIDRKRYTSTKEVLDATLIH | |
| | QSITGLYETRIDLSQLGGDSGGSSGGSSGSETPGTSESATPESSGGSSGGSSMASNFTQFVLVDNGGTGDVTVAPSNFANGIAEWISSNSRSQAYKVTCSVR | |
| | QSSAQNRKYTIKVEVPKGAWRSYLNMELTIPIFATNSDCELIVKAMQGLLKDGNPIPSAIAANSGIYGGSGGSMASNFTQFVLVDNGGTGDVTVAPSNFAN | |
| | GIAEWISSNSRSQAYKVTCSVRQSSAQNRKYTIKVEVPKGAWRSYLNMELTIPIFATNSDCELIVKAMQGLLKDGNPIPSAIAANSGIYGSSGGGEAAAKTLNI | |
| | EDEHRLHETSKEPDVSLGSTWLSDFPQAWAETGGMGLAVRQAPLIIPLKATSTPVSIKQYPMSQEARLGIKPHIQRLLDQGILVPCQSPWNTPLLPVKKPGT | |
| | NDYRPVQDLREVNKRVEDIHPTVPNPYNLLSGLPPSHQWYTVLDLKDAFFCLRLHPTSQPLFAFEWRDPEMGISGQLTWTRLPQGFKNSPTLFNEALHRDL | |
| | ADFRIQHPDLILLQYVDDLLLAATSELDCQQGTRALLQTLGNLGYRASAKKAQICQKQVKYLGYLLKEGQRWLTEARKETVMGQPTPKTPRQLREFLGKAGF | |
| | CRLFIPGFAEMAAPLYPLTKPGTLFNWGPDQQKAYQEIKQALLTAPALGLPDLTKPFELFVDEKQGYAKGVLTQKLGPWRRPVAYLSKKLDPVAAGWPPCL | |
| | RMVAAIAVLTKDAGKLTMGQPLVILAPHAVEALVKQPPDRWLSNARMTHYQALLLDTDRVQFGPVVALNPATLLPLPEEGLQHNCLDILAEAHGTRPDLT | |
| | DQPLPDADHTWYTDGSSLLQEGQRKAGAAVTTETEVIWAKALPAGTSAQRAELIALTQALKMAEGKKLNVYTDSRYAFATAHIHGEIYRRRGWLTSEGKEI | |
| | KNKDEILALLKALFLPKRLSIIHCPGHQKGHSAEARGNRMADQAARKAAITETPDTSTLLKRTADGSEFESPKKKAKVE | |
| PL12009 | MPAAKRVKLDGGDKKYSIGLDIGTNSVGWAVITDEYKVPSKKFKVLGNTDRHSIKKNLIGALLFDSGETAEATRLKRTARRRYTRRKNRICYLQEIFSNEMAKV | 16,069 |
| | DDSFFHRLEESFLVEEDKKHERHPIFGNIVDEVAYHEKYPTIYHLRKKLVDSTDKADLRLIYLALAHMIKFRGHFLIEGDLNPDNSDVDKLFIQLVQTYNQLFEE | |
| | NPINASGVDAKAILSARLSKSRRLENLIAQLPGEKKNGLFGNLIALSLGLTPNFKSNFDLAEDAKLQLSKDTYDDDLDNLLAQIGDQYADLFLAAKNLSDAILLS | |
| | DILRVNTEITKAPLSASMIKRYDEHHQDLTLLKALVRQQLPEKYKEIFFDQSKNGYAGYIDGGASQEEFYKFIKPILEKMDGTEELLVKLNREDLLRKQRTFDNG | |
| | SIPHQIHLGELHAILRRQEDFYPFLKDNREKIEKILTFRIPYYVGPLARGNSRFAWMTRKSEETITPWNFEEVVDKGASAQSFIERMTNFDKNLPNEKVLPKHSL | |
| | LYEYFTVYNELTKVKYVTEGMRKPAFLSGEQKKAIVDLLFKTNRKVTVKQLKEDYFKKIECFDSVEISGVEDRFNASLGTYHDLLKIIKDKDFLDNEENEDILEDIV | |
| | LTLTLFEDREMIEERLKTYAHLFDDKVMKQLKRRRYTGWGRLSRKLINGIRDKQSGKTILDFLKSDGFANRNFMQLIHDDSLTFKEDIQKAQVSGQGDSLHE | |
| | HIANLAGSPAIKKGILQTVKVVDELVKVMGRHKPENIVIEMARENQTTQKGQKNSRERMKRIEEGIKELGSQILKEHPVENTQLQNEKLYLYYLQNGRDMYV | |
| | DQELDINRLSDYDVDHIVPQSFLKDDSIDNKVLTRSDKARGKSDNVPSEEVVKKMKNYWRQLLNAKLITQRKFDNLTKAERGGLSELDKAGFIKRQLVETRQI | |
| | TKHVAQILDSRMNTKYDENDKLIREVKVITLKSKLVSDFRKDFQFYKVREINNYHHAHDAYLNAVVGTALIKKYPKLESEFVYGDYKVYDVRKMIAKSEQEIGK | |
| | ATAKYFFYSNIMNFFKTEITLANGEIRKRPLIETNGETGEIVWDKGRDFATVRKVLSMPQVNIVKKTEVQTGGFSKESILPKRNSDKLIARKKDWDPKKYGGFD | |
| | SPTVAYSVLVVAKVEKGKSKKLKSVKELLGITIMERSSFEKNPIDFLEAKGYKEVKKDLIIKLPKYSLFELENGRKRMLASAGELQKGNELALPSKYVNFLYLASHY | |
| | EKLKGSPEDNEQKQLFVEQHKHYLDEIIEQISEFSKRVILADANLDKVLSAYNKHRDKPIREQAENIIHLFTLTNLGAPAAFKYFDTTIDRKRYTSTKEVLDATLIH | |
| | QSITGLYETRIDLSQLGGDSGGSSGGSSGSETPGTSESATPESSGGSSGGSSMASNFTQFVLVDNGGTGDVTVAPSNFANGIAEWISSNSRSQAYKVTCSVR | |
| | QSSAQNRKYTIKVEVPKGAWRSYLNMELTIPIFATNSDCELIVKAMQGLLKDGNPIPSAIAANSGIYGGSGGSMASNFTQFVLVDNGGTGDVTVAPSNFAN | |
| | GIAEWISSNSRSQAYKVTCSVRQSSAQNRKYTIKVEVPKGAWRSYLNMELTIPIFATNSDCELIVKAMQGLLKDGNPIPSAIAANSGIYGGGSGGGSGGGSG | |
| | GGSMASNFTQFVLVDNGGTGDVTVAPSNFANGIAEWISSNSRSQAYKVTCSVRQSSAQNRKYTIKVEVPKGAWRSYLNMELTIPIFATNSDCELIVKAMQ | |
| | GLLKDGNPIPSAIAANSGIYGGSGGSMASNFTQFVLVDNGGTGDVTVAPSNFANGIAEWISSNSRSQAYKVTCSVRQSSAQNRKYTIKVEVPKGAWRSYLN | |
| | MELTIPIFATNSDCELIVKAMQGLLKDGNPIPSAIAANSGIYAEAAAKEAAAKEAAAKEAAAKALEAEAAAKEAAAKEAAAKEAAAKATLNIEDEHRLHETSKE | |
| | PDVSLGSTWLSDFPQAWAETGGMGLAVRQAPLIIPLKATSTPVSIKQYPMSQEARLGIKPHIQRLLDQGILVPCQSPWNTPLLPVKKPGTNDYRPVQDLRE | |
| | VNKRVEDIHPTVPNPYNLLSGLPPSHQWYTVLDLKDAFFCLRLHPTSQPLFAFEWRDPEMGISGQLTWTRLPQGFKNSPTLFNEALHRDLADFRIQHPDLIL | |
| | LQYVDDLLLAATSELDCQQGTRALLQTLGNLGYRASAKKAQICQKQVKYLGYLLKEGQRWLTEARKETVMGQPTPKTPRQLREFLGKAGFCRLFIPGFAEM | |
| | AAPLYPLTKPGTLFNWGPDQQKAYQEIKQALLTAPALGLPDLTKPFELFVDEKQGYAKGVLTQKLGPWRRPVAYLSKKLDPVAAGWPPCLRMVAAIAVLTK | |
| | DAGKLTMGQPLVILAPHAVEALVKQPPDRWLSNARMTHYQALLLDTDRVQFGPVVALNPATLLPLPEEGLQHNCLDILAEAHGTRPDLTDQPLPDADHT | |
| | WYTDGSSLLQEGQRKAGAAVTTETEVIWAKALPAGTSAQRAELIALTQALKMAEGKKLNVYTDSRYAFATAHIHGEIYRRRGWLTSEGKEIKNKDEILALLKA | |
| | LFLPKRLSIIHCPGHQKGHSAEARGNRMADQAARKAAITETPDTSTLLKRTADGSEFESPKKKAKVE | |
| PL12010 | MPAAKRVKLDGGDKKYSIGLDIGTNSVGWAVITDEYKVPSKKFKVLGNTDRHSIKKNLIGALLFDSGETAEATRLKRTARRRYTRRKNRICYLQEIFSNEMAKV | 16,070 |
| | DDSFFHRLEESFLVEEDKKHERHPIFGNIVDEVAYHEKYPTIYHLRKKLVDSTDKADLRLIYLALAHMIKFRGHFLIEGDLNPDNSDVDKLFIQLVQTYNQLFEE | |
| | NPINASGVDAKAILSARLSKSRRLENLIAQLPGEKKNGLFGNLIALSLGLTPNFKSNFDLAEDAKLQLSKDTYDDDLDNLLAQIGDQYADLFLAAKNLSDAILLS | |
| | DILRVNTEITKAPLSASMIKRYDEHHQDLTLLKALVRQQLPEKYKEIFFDQSKNGYAGYIDGGASQEEFYKFIKPILEKMDGTEELLVKLNREDLLRKQRTFDNG | |
| | SIPHQIHLGELHAILRRQEDFYPFLKDNREKIEKILTFRIPYYVGPLARGNSRFAWMTRKSEETITPWNFEEVVDKGASAQSFIERMTNFDKNLPNEKVLPKHSL | |
| | LYEYFTVYNELTKVKYVTEGMRKPAFLSGEQKKAIVDLLFKTNRKVTVKQLKEDYFKKIECFDSVEISGVEDRFNASLGTYHDLLKIIKDKDFLDNEENEDILEDIV | |
| | LTLTLFEDREMIEERLKTYAHLFDDKVMKQLKRRRYTGWGRLSRKLINGIRDKQSGKTILDFLKSDGFANRNFMQLIHDDSLTFKEDIQKAQVSGQGDSLHE | |
| | HIANLAGSPAIKKGILQTVKVVDELVKVMGRHKPENIVIEMARENQTTQKGQKNSRERMKRIEEGIKELGSQILKEHPVENTQLQNEKLYLYYLQNGRDMYV | |
| | DQELDINRLSDYDVDHIVPQSFLKDDSIDNKVLTRSDKARGKSDNVPSEEVVKKMKNYWRQLLNAKLITQRKFDNLTKAERGGLSELDKAGFIKRQLVETRQI | |
| | TKHVAQILDSRMNTKYDENDKLIREVKVITLKSKLVSDFRKDFQFYKVREINNYHHAHDAYLNAVVGTALIKKYPKLESEFVYGDYKVYDVRKMIAKSEQEIGK | |
| | ATAKYFFYSNIMNFFKTEITLANGEIRKRPLIETNGETGEIVWDKGRDFATVRKVLSMPQVNIVKKTEVQTGGFSKESILPKRNSDKLIARKKDWDPKKYGGFD | |
| | SPTVAYSVLVVAKVEKGKSKKLKSVKELLGITIMERSSFEKNPIDFLEAKGYKEVKKDLIIKLPKYSLFELENGRKRMLASAGELQKGNELALPSKYVNFLYLASHY | |
| | EKLKGSPEDNEQKQLFVEQHKHYLDEIIEQISEFSKRVILADANLDKVLSAYNKHRDKPIREQAENIIHLFTLTNLGAPAAFKYFDTTIDRKRYTSTKEVLDATLIH | |
| | QSITGLYETRIDLSQLGGDSGGSSGGSSGSETPGTSESATPESSGGSSGGSSMASNFTQFVLVDNGGTGDVTVAPSNFANGIAEWISSNSRSQAYKVTCSVR | |
| | QSSAQNRKYTIKVEVPKGAWRSYLNMELTIPIFATNSDCELIVKAMQGLLKDGNPIPSAIAANSGIYGGSGGSMASNFTQFVLVDNGGTGDVTVAPSNFAN | |
| | GIAEWISSNSRSQAYKVTCSVRQSSAQNRKYTIKVEVPKGAWRSYLNMELTIPIFATNSDCELIVKAMQGLLKDGNPIPSAIAANSGIYGGGSGGGSGGGSG | |
| | GGSMASNFTQFVLVDNGGTGDVTVAPSNFANGIAEWISSNSRSQAYKVTCSVRQSSAQNRKYTIKVEVPKGAWRSYLNMELTIPIFATNSDCELIVKAMQ | |
| | GLLKDGNPIPSAIAANSGIYGGSGGSMASNFTQFVLVDNGGTGDVTVAPSNFANGIAEWISSNSRSQAYKVTCSVRQSSAQNRKYTIKVEVPKGAWRSYLN | |
| | MELTIPIFATNSDCELIVKAMQGLLKDGNPIPSAIAANSGIYSGGSSGGSSGSETPGTSESATPESSGGSSGGSSTLNIEDEHRLHETSKEPDVSLGSTWLSDFP | |
| | QAWAETGGMGLAVRQAPLIIPLKATSTPVSIKQYPMSQEARLGIKPHIQRLLDQGILVPCQSPWNTPLLPVKKPGTNDYRPVQDLREVNKRVEDIHPTVPNP | |
| | YNLLSGLPPSHQWYTVLDLKDAFFCLRLHPTSQPLFAFEWRDPEMGISGQLTWTRLPQGFKNSPTLFNEALHRDLADFRIQHPDLILLQYVDDLLLAATSELD | |
| | CQQGTRALLQTLGNLGYRASAKKAQICQKQVKYLGYLLKEGQRWLTEARKETVMGQPTPKTPRQLREFLGKAGFCRLFIPGFAEMAAPLYPLTKPGTLFNW | |
| | GPDQQKAYQEIKQALLTAPALGLPDLTKPFELFVDEKQGYAKGVLTQKLGPWRRPVAYLSKKLDPVAAGWPPCLRMVAAIAVLTKDAGKLTMGQPLVILAP | |
| | HAVEALVKQPPDRWLSNARMTHYQALLLDTDRVQFGPVVALNPATLLPLPEEGLQHNCLDILAEAHGTRPDLTDQPLPDADHTWYTDGSSLLQEGQRKA | |
| | GAAVTTETEVIWAKALPAGTSAQRAELIALTQALKMAEGKKLNVYTDSRYAFATAHIHGEIYRRRGWLTSEGKEIKNKDEILALLKALFLPKRLSIIHCPGHQKG | |
| | HSAEARGNRMADQAARKAAITETPDTSTLLKRTADGSEFESPKKKAKVE | |
| PL12011 | MPAAKRVKLDGGDKKYSIGLDIGTNSVGWAVITDEYKVPSKKFKVLGNTDRHSIKKNLIGALLFDSGETAEATRLKRTARRRYTRRKNRICYLQEIFSNEMAKV | 16,071 |
| | DDSFFHRLEESFLVEEDKKHERHPIFGNIVDEVAYHEKYPTIYHLRKKLVDSTDKADLRLIYLALAHMIKFRGHFLIEGDLNPDNSDVDKLFIQLVQTYNQLFEE | |
| | NPINASGVDAKAILSARLSKSRRLENLIAQLPGEKKNGLFGNLIALSLGLTPNFKSNFDLAEDAKLQLSKDTYDDDLDNLLAQIGDQYADLFLAAKNLSDAILLS | |
| | DILRVNTEITKAPLSASMIKRYDEHHQDLTLLKALVRQQLPEKYKEIFFDQSKNGYAGYIDGGASQEEFYKFIKPILEKMDGTEELLVKLNREDLLRKQRTFDNG | |
| | SIPHQIHLGELHAILRRQEDFYPFLKDNREKIEKILTFRIPYYVGPLARGNSRFAWMTRKSEETITPWNFEEVVDKGASAQSFIERMTNFDKNLPNEKVLPKHSL | |
| | LYEYFTVYNELTKVKYVTEGMRKPAFLSGEQKKAIVDLLFKTNRKVTVKQLKEDYFKKIECFDSVEISGVEDRFNASLGTYHDLLKIIKDKDFLDNEENEDILEDIV | |
| | LTLTLFEDREMIEERLKTYAHLFDDKVMKQLKRRRYTGWGRLSRKLINGIRDKQSGKTILDFLKSDGFANRNFMQLIHDDSLTFKEDIQKAQVSGQGDSLHE | |
| | HIANLAGSPAIKKGILQTVKVVDELVKVMGRHKPENIVIEMARENQTTQKGQKNSRERMKRIEEGIKELGSQILKEHPVENTQLQNEKLYLYYLQNGRDMYV | |
| | DQELDINRLSDYDVDHIVPQSFLKDDSIDNKVLTRSDKARGKSDNVPSEEVVKKMKNYWRQLLNAKLITQRKFDNLTKAERGGLSELDKAGFIKRQLVETRQI | |
| | TKHVAQILDSRMNTKYDENDKLIREVKVITLKSKLVSDFRKDFQFYKVREINNYHHAHDAYLNAVVGTALIKKYPKLESEFVYGDYKVYDVRKMIAKSEQEIGK | |
| | ATAKYFFYSNIMNFFKTEITLANGEIRKRPLIETNGETGEIVWDKGRDFATVRKVLSMPQVNIVKKTEVQTGGFSKESILPKRNSDKLIARKKDWDPKKYGGFD | |
| | SPTVAYSVLVVAKVEKGKSKKLKSVKELLGITIMERSSFEKNPIDFLEAKGYKEVKKDLIIKLPKYSLFELENGRKRMLASAGELQKGNELALPSKYVNFLYLASHY | |
| | EKLKGSPEDNEQKQLFVEQHKHYLDEIIEQISEFSKRVILADANLDKVLSAYNKHRDKPIREQAENIIHLFTLTNLGAPAAFKYFDTTIDRKRYTSTKEVLDATLIH | |
| | QSITGLYETRIDLSQLGGDSGGSSGGSSGSETPGTSESATPESSGGSSGGSSMASNFTQFVLVDNGGTGDVTVAPSNFANGIAEWISSNSRSQAYKVTCSVR | |
| | QSSAQNRKYTIKVEVPKGAWRSYLNMELTIPIFATNSDCELIVKAMQGLLKDGNPIPSAIAANSGIYGGSGGSMASNFTQFVLVDNGGTGDVTVAPSNFAN | |
| | GIAEWISSNSRSQAYKVTCSVRQSSAQNRKYTIKVEVPKGAWRSYLNMELTIPIFATNSDCELIVKAMQGLLKDGNPIPSAIAANSGIYGGGSGGGSGGGSG | |
| | GGSMASNFTQFVLVDNGGTGDVTVAPSNFANGIAEWISSNSRSQAYKVTCSVRQSSAQNRKYTIKVEVPKGAWRSYLNMELTIPIFATNSDCELIVKAMQ | |
| | GLLKDGNPIPSAIAANSGIYGGSGGSMASNFTQFVLVDNGGTGDVTVAPSNFANGIAEWISSNSRSQAYKVTCSVRQSSAQNRKYTIKVEVPKGAWRSYLN | |
| | MELTIPIFATNSDCELIVKAMQGLLKDGNPIPSAIAANSGIYGSSGSSGSSGSSGSSGSSTLNIEDEHRLHETSKEPDVSLGSTWLSDFPQAWAETGGMGLAV | |
| | RQAPLIIPLKATSTPVSIKQYPMSQEARLGIKPHIQRLLDQGILVPCQSPWNTPLLPVKKPGTNDYRPVQDLREVNKRVEDIHPTVPNPYNLLSGLPPSHQWY | |
| | TVLDLKDAFFCLRLHPTSQPLFAFEWRDPEMGISGQLTWTRLPQGFKNSPTLFNEALHRDLADFRIQHPDLILLQYVDDLLLAATSELDCQQGTRALLQTLGN | |
| | LGYRASAKKAQICQKQVKYLGYLLKEGQRWLTEARKETVMGQPTPKTPRQLREFLGKAGFCRLFIPGFAEMAAPLYPLTKPGTLFNWGPDQQKAYQEIKQA | |
| | LLTAPALGLPDLTKPFELFVDEKQGYAKGVLTQKLGPWRRPVAYLSKKLDPVAAGWPPCLRMVAAIAVLTKDAGKLTMGQPLVILAPHAVEALVKQPPDR | |
| | WLSNARMTHYQALLLDTDRVQFGPVVALNPATLLPLPEEGLQHNCLDILAEAHGTRPDLTDQPLPDADHTWYTDGSSLLQEGQRKAGAAVTTETEVIWAK | |
| | ALPAGTSAQRAELIALTQALKMAEGKKLNVYTDSRYAFATAHIHGEIYRRRGWLTSEGKEIKNKDEILALLKALFLPKRLSIIHCPGHQKGHSAEARGNRMAD | |
| | QAARKAAITETPDTSTLLKRTADGSEFESPKKKAKVE | |
| PL12012 | MPAAKRVKLDGGDKKYSIGLDIGTNSVGWAVITDEYKVPSKKFKVLGNTDRHSIKKNLIGALLFDSGETAEATRLKRTARRRYTRRKNRICYLQEIFSNEMAKV | 16,072 |
| | DDSFFHRLEESFLVEEDKKHERHPIFGNIVDEVAYHEKYPTIYHLRKKLVDSTDKADLRLIYLALAHMIKFRGHFLIEGDLNPDNSDVDKLFIQLVQTYNQLFEE | |
| | NPINASGVDAKAILSARLSKSRRLENLIAQLPGEKKNGLFGNLIALSLGLTPNFKSNFDLAEDAKLQLSKDTYDDDLDNLLAQIGDQYADLFLAAKNLSDAILLS | |
| | DILRVNTEITKAPLSASMIKRYDEHHQDLTLLKALVRQQLPEKYKEIFFDQSKNGYAGYIDGGASQEEFYKFIKPILEKMDGTEELLVKLNREDLLRKQRTFDNG | |
| | SIPHQIHLGELHAILRRQEDFYPFLKDNREKIEKILTFRIPYYVGPLARGNSRFAWMTRKSEETITPWNFEEVVDKGASAQSFIERMTNFDKNLPNEKVLPKHSL | |
| | LYEYFTVYNELTKVKYVTEGMRKPAFLSGEQKKAIVDLLFKTNRKVTVKQLKEDYFKKIECFDSVEISGVEDRFNASLGTYHDLLKIIKDKDFLDNEENEDILEDIV | |
| | LTLTLFEDREMIEERLKTYAHLFDDKVMKQLKRRRYTGWGRLSRKLINGIRDKQSGKTILDFLKSDGFANRNFMQLIHDDSLTFKEDIQKAQVSGQGDSLHE | |
| | HIANLAGSPAIKKGILQTVKVVDELVKVMGRHKPENIVIEMARENQTTQKGQKNSRERMKRIEEGIKELGSQILKEHPVENTQLQNEKLYLYYLQNGRDMYV | |
| | DQELDINRLSDYDVDHIVPQSFLKDDSIDNKVLTRSDKARGKSDNVPSEEVVKKMKNYWRQLLNAKLITQRKFDNLTKAERGGLSELDKAGFIKRQLVETRQI | |
| | TKHVAQILDSRMNTKYDENDKLIREVKVITLKSKLVSDFRKDFQFYKVREINNYHHAHDAYLNAVVGTALIKKYPKLESEFVYGDYKVYDVRKMIAKSEQEIGK | |
| | ATAKYFFYSNIMNFFKTEITLANGEIRKRPLIETNGETGEIVWDKGRDFATVRKVLSMPQVNIVKKTEVQTGGFSKESILPKRNSDKLIARKKDWDPKKYGGFD | |
| | SPTVAYSVLVVAKVEKGKSKKLKSVKELLGITIMERSSFEKNPIDFLEAKGYKEVKKDLIIKLPKYSLFELENGRKRMLASAGELQKGNELALPSKYVNFLYLASHY | |
| | EKLKGSPEDNEQKQLFVEQHKHYLDEIIEQISEFSKRVILADANLDKVLSAYNKHRDKPIREQAENIIHLFTLTNLGAPAAFKYFDTTIDRKRYTSTKEVLDATLIH | |
| | QSITGLYETRIDLSQLGGDSGGSSGGSSGSETPGTSESATPESSGGSSGGSSMASNFTQFVLVDNGGTGDVTVAPSNFANGIAEWISSNSRSQAYKVTCSVR | |
| | QSSAQNRKYTIKVEVPKGAWRSYLNMELTIPIFATNSDCELIVKAMQGLLKDGNPIPSAIAANSGIYGGSGGSMASNFTQFVLVDNGGTGDVTVAPSNFAN | |
| | GIAEWISSNSRSQAYKVTCSVRQSSAQNRKYTIKVEVPKGAWRSYLNMELTIPIFATNSDCELIVKAMQGLLKDGNPIPSAIAANSGIYGGGSGGGSGGGSG | |
| | GGSMASNFTQFVLVDNGGTGDVTVAPSNFANGIAEWISSNSRSQAYKVTCSVRQSSAQNRKYTIKVEVPKGAWRSYLNMELTIPIFATNSDCELIVKAMQ | |
| | GLLKDGNPIPSAIAANSGIYGGSGGSMASNFTQFVLVDNGGTGDVTVAPSNFANGIAEWISSNSRSQAYKVTCSVRQSSAQNRKYTIKVEVPKGAWRSYLN | |
| | MELTIPIFATNSDCELIVKAMQGLLKDGNPIPSAIAANSGIYGSSGGGEAAAKTLNIEDEHRLHETSKEPDVSLGSTWLSDFPQAWAETGGMGLAVRQAPLII | |
| | PLKATSTPVSIKQYPMSQEARLGIKPHIQRLLDQGILVPCQSPWNTPLLPVKKPGTNDYRPVQDLREVNKRVEDIHPTVPNPYNLLSGLPPSHQWYTVLDLK | |
| | DAFFCLRLHPTSQPLFAFEWRDPEMGISGQLTWTRLPQGFKNSPTLFNEALHRDLADFRIQHPDLILLQYVDDLLLAATSELDCQQGTRALLQTLGNLGYRA | |
| | SAKKAQICQKQVKYLGYLLKEGQRWLTEARKETVMGQPTPKTPRQLREFLGKAGFCRLFIPGFAEMAAPLYPLTKPGTLFNWGPDQQKAYQEIKQALLTAP | |
| | ALGLPDLTKPFELFVDEKQGYAKGVLTQKLGPWRRPVAYLSKKLDPVAAGWPPCLRMVAAIAVLTKDAGKLTMGQPLVILAPHAVEALVKQPPDRWLSNA | |
| | RMTHYQALLLDTDRVQFGPVVALNPATLLPLPEEGLQHNCLDILAEAHGTRPDLTDQPLPDADHTWYTDGSSLLQEGQRKAGAAVTTETEVIWAKALPAG | |
| | TSAQRAELIALTQALKMAEGKKLNVYTDSRYAFATAHIHGEIYRRRGWLTSEGKEIKNKDEILALLKALFLPKRLSIIHCPGHQKGHSAEARGNRMADQAARK | |
| | AAITETPDTSTLLKRTADGSEFESPKKKAKVE | |
| PL12013 | MPAAKRVKLDGGDKKYSIGLDIGTNSVGWAVITDEYKVPSKKFKVLGNTDRHSIKKNLIGALLFDSGETAEATRLKRTARRRYTRRKNRICYLQEIFSNEMAKV | 16,073 |
| | DDSFFHRLEESFLVEEDKKHERHPIFGNIVDEVAYHEKYPTIYHLRKKLVDSTDKADLRLIYLALAHMIKFRGHFLIEGDLNPDNSDVDKLFIQLVQTYNQLFEE | |
| | NPINASGVDAKAILSARLSKSRRLENLIAQLPGEKKNGLFGNLIALSLGLTPNFKSNFDLAEDAKLQLSKDTYDDDLDNLLAQIGDQYADLFLAAKNLSDAILLS | |
| | DILRVNTEITKAPLSASMIKRYDEHHQDLTLLKALVRQQLPEKYKEIFFDQSKNGYAGYIDGGASQEEFYKFIKPILEKMDGTEELLVKLNREDLLRKQRTFDNG | |
| | SIPHQIHLGELHAILRRQEDFYPFLKDNREKIEKILTFRIPYYVGPLARGNSRFAWMTRKSEETITPWNFEEVVDKGASAQSFIERMTNFDKNLPNEKVLPKHSL | |
| | LYEYFTVYNELTKVKYVTEGMRKPAFLSGEQKKAIVDLLFKTNRKVTVKQLKEDYFKKIECFDSVEISGVEDRFNASLGTYHDLLKIIKDKDFLDNEENEDILEDIV | |
| | LTLTLFEDREMIEERLKTYAHLFDDKVMKQLKRRRYTGWGRLSRKLINGIRDKQSGKTILDFLKSDGFANRNFMQLIHDDSLTFKEDIQKAQVSGQGDSLHE | |
| | HIANLAGSPAIKKGILQTVKVVDELVKVMGRHKPENIVIEMARENQTTQKGQKNSRERMKRIEEGIKELGSQILKEHPVENTQLQNEKLYLYYLQNGRDMYV | |
| | DQELDINRLSDYDVDHIVPQSFLKDDSIDNKVLTRSDKARGKSDNVPSEEVVKKMKNYWRQLLNAKLITQRKFDNLTKAERGGLSELDKAGFIKRQLVETRQI | |
| | TKHVAQILDSRMNTKYDENDKLIREVKVITLKSKLVSDFRKDFQFYKVREINNYHHAHDAYLNAVVGTALIKKYPKLESEFVYGDYKVYDVRKMIAKSEQEIGK | |
| | ATAKYFFYSNIMNFFKTEITLANGEIRKRPLIETNGETGEIVWDKGRDFATVRKVLSMPQVNIVKKTEVQTGGFSKESILPKRNSDKLIARKKDWDPKKYGGFD | |
| | SPTVAYSVLVVAKVEKGKSKKLKSVKELLGITIMERSSFEKNPIDFLEAKGYKEVKKDLIIKLPKYSLFELENGRKRMLASAGELQKGNELALPSKYVNFLYLASHY | |
| | EKLKGSPEDNEQKQLFVEQHKHYLDEIIEQISEFSKRVILADANLDKVLSAYNKHRDKPIREQAENIIHLFTLTNLGAPAAFKYFDTTIDRKRYTSTKEVLDATLIH | |
| | QSITGLYETRIDLSQLGGDGSSGSSGSSGSSGSSGSSMASNFTQFVLVDNGGTGDVTVAPSNFANGIAEWISSNSRSQAYKVTCSVRQSSAQNRKYTIKVEV | |
| | PKGAWRSYLNMELTIPIFATNSDCELIVKAMQGLLKDGNPIPSAIAANSGIYAEAAAKEAAAKEAAAKEAAAKALEAEAAAKEAAAKEAAAKEAAAKATLNIE | |
| | DEHRLHETSKEPDVSLGSTWLSDFPQAWAETGGMGLAVRQAPLIIPLKATSTPVSIKQYPMSQEARLGIKPHIQRLLDQGILVPCQSPWNTPLLPVKKPGTN | |
| | DYRPVQDLREVNKRVEDIHPTVPNPYNLLSGLPPSHQWYTVLDLKDAFFCLRLHPTSQPLFAFEWRDPEMGISGQLTWTRLPQGFKNSPTLFNEALHRDLA | |
| | DFRIQHPDLILLQYVDDLLLAATSELDCQQGTRALLQTLGNLGYRASAKKAQICQKQVKYLGYLLKEGQRWLTEARKETVMGQPTPKTPRQLREFLGKAGFC | |
| | RLFIPGFAEMAAPLYPLTKPGTLFNWGPDQQKAYQEIKQALLTAPALGLPDLTKPFELFVDEKQGYAKGVLTQKLGPWRRPVAYLSKKLDPVAAGWPPCLR | |
| | MVAAIAVLTKDAGKLTMGQPLVILAPHAVEALVKQPPDRWLSNARMTHYQALLLDTDRVQFGPVVALNPATLLPLPEEGLQHNCLDILAEAHGTRPDLTD | |
| | QPLPDADHTWYTDGSSLLQEGQRKAGAAVTTETEVIWAKALPAGTSAQRAELIALTQALKMAEGKKLNVYTDSRYAFATAHIHGEIYRRRGWLTSEGKEIK | |
| | NKDEILALLKALFLPKRLSIIHCPGHQKGHSAEARGNRMADQAARKAAITETPDTSTLLKRTADGSEFESPKKKAKVE | |
| PL12014 | MPAAKRVKLDGGDKKYSIGLDIGTNSVGWAVITDEYKVPSKKFKVLGNTDRHSIKKNLIGALLFDSGETAEATRLKRTARRRYTRRKNRICYLQEIFSNEMAKV | 16,074 |
| | DDSFFHRLEESFLVEEDKKHERHPIFGNIVDEVAYHEKYPTIYHLRKKLVDSTDKADLRLIYLALAHMIKFRGHFLIEGDLNPDNSDVDKLFIQLVQTYNQLFEE | |
| | NPINASGVDAKAILSARLSKSRRLENLIAQLPGEKKNGLFGNLIALSLGLTPNFKSNFDLAEDAKLQLSKDTYDDDLDNLLAQIGDQYADLFLAAKNLSDAILLS | |
| | DILRVNTEITKAPLSASMIKRYDEHHQDLTLLKALVRQQLPEKYKEIFFDQSKNGYAGYIDGGASQEEFYKFIKPILEKMDGTEELLVKLNREDLLRKQRTFDNG | |
| | SIPHQIHLGELHAILRRQEDFYPFLKDNREKIEKILTFRIPYYVGPLARGNSRFAWMTRKSEETITPWNFEEVVDKGASAQSFIERMTNFDKNLPNEKVLPKHSL | |
| | LYEYFTVYNELTKVKYVTEGMRKPAFLSGEQKKAIVDLLFKTNRKVTVKQLKEDYFKKIECFDSVEISGVEDRFNASLGTYHDLLKIIKDKDFLDNEENEDILEDIV | |
| | LTLTLFEDREMIEERLKTYAHLFDDKVMKQLKRRRYTGWGRLSRKLINGIRDKQSGKTILDFLKSDGFANRNFMQLIHDDSLTFKEDIQKAQVSGQGDSLHE | |
| | HIANLAGSPAIKKGILQTVKVVDELVKVMGRHKPENIVIEMARENQTTQKGQKNSRERMKRIEEGIKELGSQILKEHPVENTQLQNEKLYLYYLQNGRDMYV | |
| | DQELDINRLSDYDVDHIVPQSFLKDDSIDNKVLTRSDKARGKSDNVPSEEVVKKMKNYWRQLLNAKLITQRKFDNLTKAERGGLSELDKAGFIKRQLVETRQI | |
| | TKHVAQILDSRMNTKYDENDKLIREVKVITLKSKLVSDFRKDFQFYKVREINNYHHAHDAYLNAVVGTALIKKYPKLESEFVYGDYKVYDVRKMIAKSEQEIGK | |
| | ATAKYFFYSNIMNFFKTEITLANGEIRKRPLIETNGETGEIVWDKGRDFATVRKVLSMPQVNIVKKTEVQTGGFSKESILPKRNSDKLIARKKDWDPKKYGGFD | |
| | SPTVAYSVLVVAKVEKGKSKKLKSVKELLGITIMERSSFEKNPIDFLEAKGYKEVKKDLIIKLPKYSLFELENGRKRMLASAGELQKGNELALPSKYVNFLYLASHY | |
| | EKLKGSPEDNEQKQLFVEQHKHYLDEIIEQISEFSKRVILADANLDKVLSAYNKHRDKPIREQAENIIHLFTLTNLGAPAAFKYFDTTIDRKRYTSTKEVLDATLIH | |
| | QSITGLYETRIDLSQLGGDGSSGSSGSSGSSGSSGSSMASNFTQFVLVDNGGTGDVTVAPSNFANGIAEWISSNSRSQAYKVTCSVRQSSAQNRKYTIKVEV | |
| | PKGAWRSYLNMELTIPIFATNSDCELIVKAMQGLLKDGNPIPSAIAANSGIYSGGSSGGSSGSETPGTSESATPESSGGSSGGSSTLNIEDEHRLHETSKEPDVS | |
| | LGSTWLSDFPQAWAETGGMGLAVRQAPLIIPLKATSTPVSIKQYPMSQEARLGIKPHIQRLLDQGILVPCQSPWNTPLLPVKKPGTNDYRPVQDLREVNKR | |
| | VEDIHPTVPNPYNLLSGLPPSHQWYTVLDLKDAFFCLRLHPTSQPLFAFEWRDPEMGISGQLTWTRLPQGFKNSPTLFNEALHRDLADFRIQHPDLILLQYV | |
| | DDLLLAATSELDCQQGTRALLQTLGNLGYRASAKKAQICQKQVKYLGYLLKEGQRWLTEARKETVMGQPTPKTPRQLREFLGKAGFCRLFIPGFAEMAAPLY | |
| | PLTKPGTLFNWGPDQQKAYQEIKQALLTAPALGLPDLTKPFELFVDEKQGYAKGVLTQKLGPWRRPVAYLSKKLDPVAAGWPPCLRMVAAIAVLTKDAGKL | |
| | TMGQPLVILAPHAVEALVKQPPDRWLSNARMTHYQALLLDTDRVQFGPVVALNPATLLPLPEEGLQHNCLDILAEAHGTRPDLTDQPLPDADHTWYTDG | |
| | SSLLQEGQRKAGAAVTTETEVIWAKALPAGTSAQRAELIALTQALKMAEGKKLNVYTDSRYAFATAHIHGEIYRRRGWLTSEGKEIKNKDEILALLKALFLPKR | |
| | LSIIHCPGHQKGHSAEARGNRMADQAARKAAITETPDTSTLLKRTADGSEFESPKKKAKVE | |
| PL12015 | MPAAKRVKLDGGDKKYSIGLDIGTNSVGWAVITDEYKVPSKKFKVLGNTDRHSIKKNLIGALLFDSGETAEATRLKRTARRRYTRRKNRICYLQEIFSNEMAKV | 16,075 |
| | DDSFFHRLEESFLVEEDKKHERHPIFGNIVDEVAYHEKYPTIYHLRKKLVDSTDKADLRLIYLALAHMIKFRGHFLIEGDLNPDNSDVDKLFIQLVQTYNQLFEE | |
| | NPINASGVDAKAILSARLSKSRRLENLIAQLPGEKKNGLFGNLIALSLGLTPNFKSNFDLAEDAKLQLSKDTYDDDLDNLLAQIGDQYADLFLAAKNLSDAILLS | |
| | DILRVNTEITKAPLSASMIKRYDEHHQDLTLLKALVRQQLPEKYKEIFFDQSKNGYAGYIDGGASQEEFYKFIKPILEKMDGTEELLVKLNREDLLRKQRTFDNG | |
| | SIPHQIHLGELHAILRRQEDFYPFLKDNREKIEKILTFRIPYYVGPLARGNSRFAWMTRKSEETITPWNFEEVVDKGASAQSFIERMTNFDKNLPNEKVLPKHSL | |
| | LYEYFTVYNELTKVKYVTEGMRKPAFLSGEQKKAIVDLLFKTNRKVTVKQLKEDYFKKIECFDSVEISGVEDRFNASLGTYHDLLKIIKDKDFLDNEENEDILEDIV | |
| | LTLTLFEDREMIEERLKTYAHLFDDKVMKQLKRRRYTGWGRLSRKLINGIRDKQSGKTILDFLKSDGFANRNFMQLIHDDSLTFKEDIQKAQVSGQGDSLHE | |
| | HIANLAGSPAIKKGILQTVKVVDELVKVMGRHKPENIVIEMARENQTTQKGQKNSRERMKRIEEGIKELGSQILKEHPVENTQLQNEKLYLYYLQNGRDMYV | |
| | DQELDINRLSDYDVDHIVPQSFLKDDSIDNKVLTRSDKARGKSDNVPSEEVVKKMKNYWRQLLNAKLITQRKFDNLTKAERGGLSELDKAGFIKRQLVETRQI | |
| | TKHVAQILDSRMNTKYDENDKLIREVKVITLKSKLVSDFRKDFQFYKVREINNYHHAHDAYLNAVVGTALIKKYPKLESEFVYGDYKVYDVRKMIAKSEQEIGK | |
| | ATAKYFFYSNIMNFFKTEITLANGEIRKRPLIETNGETGEIVWDKGRDFATVRKVLSMPQVNIVKKTEVQTGGFSKESILPKRNSDKLIARKKDWDPKKYGGFD | |
| | SPTVAYSVLVVAKVEKGKSKKLKSVKELLGITIMERSSFEKNPIDFLEAKGYKEVKKDLIIKLPKYSLFELENGRKRMLASAGELQKGNELALPSKYVNFLYLASHY | |
| | EKLKGSPEDNEQKQLFVEQHKHYLDEIIEQISEFSKRVILADANLDKVLSAYNKHRDKPIREQAENIIHLFTLTNLGAPAAFKYFDTTIDRKRYTSTKEVLDATLIH | |
| | QSITGLYETRIDLSQLGGDGSSGSSGSSGSSGSSGSSMASNFTQFVLVDNGGTGDVTVAPSNFANGIAEWISSNSRSQAYKVTCSVRQSSAQNRKYTIKVEV | |
| | PKGAWRSYLNMELTIPIFATNSDCELIVKAMQGLLKDGNPIPSAIAANSGIYGSSGSSGSSGSSGSSGSSTLNIEDEHRLHETSKEPDVSLGSTWLSDFPQAW | |
| | AETGGMGLAVRQAPLIIPLKATSTPVSIKQYPMSQEARLGIKPHIQRLLDQGILVPCQSPWNTPLLPVKKPGTNDYRPVQDLREVNKRVEDIHPTVPNPYNLL | |
| | SGLPPSHQWYTVLDLKDAFFCLRLHPTSQPLFAFEWRDPEMGISGQLTWTRLPQGFKNSPTLFNEALHRDLADFRIQHPDLILLQYVDDLLLAATSELDCQQ | |
| | GTRALLQTLGNLGYRASAKKAQICQKQVKYLGYLLKEGQRWLTEARKETVMGQPTPKTPRQLREFLGKAGFCRLFIPGFAEMAAPLYPLTKPGTLFNWGPD | |
| | QQKAYQEIKQALLTAPALGLPDLTKPFELFVDEKQGYAKGVLTQKLGPWRRPVAYLSKKLDPVAAGWPPCLRMVAAIAVLTKDAGKLTMGQPLVILAPHAV | |
| | EALVKQPPDRWLSNARMTHYQALLLDTDRVQFGPVVALNPATLLPLPEEGLQHNCLDILAEAHGTRPDLTDQPLPDADHTWYTDGSSLLQEGQRKAGAA | |
| | VTTETEVIWAKALPAGTSAQRAELIALTQALKMAEGKKLNVYTDSRYAFATAHIHGEIYRRRGWLTSEGKEIKNKDEILALLKALFLPKRLSIIHCPGHQKGHSA | |
| | EARGNRMADQAARKAAITETPDTSTLLKRTADGSEFESPKKKAKVE | |
| PL12016 | MPAAKRVKLDGGDKKYSIGLDIGTNSVGWAVITDEYKVPSKKFKVLGNTDRHSIKKNLIGALLFDSGETAEATRLKRTARRRYTRRKNRICYLQEIFSNEMAKV | 16,076 |
| | DDSFFHRLEESFLVEEDKKHERHPIFGNIVDEVAYHEKYPTIYHLRKKLVDSTDKADLRLIYLALAHMIKFRGHFLIEGDLNPDNSDVDKLFIQLVQTYNQLFEE | |
| | NPINASGVDAKAILSARLSKSRRLENLIAQLPGEKKNGLFGNLIALSLGLTPNFKSNFDLAEDAKLQLSKDTYDDDLDNLLAQIGDQYADLFLAAKNLSDAILLS | |
| | DILRVNTEITKAPLSASMIKRYDEHHQDLTLLKALVRQQLPEKYKEIFFDQSKNGYAGYIDGGASQEEFYKFIKPILEKMDGTEELLVKLNREDLLRKQRTFDNG | |
| | SIPHQIHLGELHAILRRQEDFYPFLKDNREKIEKILTFRIPYYVGPLARGNSRFAWMTRKSEETITPWNFEEVVDKGASAQSFIERMTNFDKNLPNEKVLPKHSL | |
| | LYEYFTVYNELTKVKYVTEGMRKPAFLSGEQKKAIVDLLFKTNRKVTVKQLKEDYFKKIECFDSVEISGVEDRFNASLGTYHDLLKIIKDKDFLDNEENEDILEDIV | |
| | LTLTLFEDREMIEERLKTYAHLFDDKVMKQLKRRRYTGWGRLSRKLINGIRDKQSGKTILDFLKSDGFANRNFMQLIHDDSLTFKEDIQKAQVSGQGDSLHE | |
| | HIANLAGSPAIKKGILQTVKVVDELVKVMGRHKPENIVIEMARENQTTQKGQKNSRERMKRIEEGIKELGSQILKEHPVENTQLQNEKLYLYYLQNGRDMYV | |
| | DQELDINRLSDYDVDHIVPQSFLKDDSIDNKVLTRSDKARGKSDNVPSEEVVKKMKNYWRQLLNAKLITQRKFDNLTKAERGGLSELDKAGFIKRQLVETRQI | |
| | TKHVAQILDSRMNTKYDENDKLIREVKVITLKSKLVSDFRKDFQFYKVREINNYHHAHDAYLNAVVGTALIKKYPKLESEFVYGDYKVYDVRKMIAKSEQEIGK | |
| | ATAKYFFYSNIMNFFKTEITLANGEIRKRPLIETNGETGEIVWDKGRDFATVRKVLSMPQVNIVKKTEVQTGGFSKESILPKRNSDKLIARKKDWDPKKYGGFD | |
| | SPTVAYSVLVVAKVEKGKSKKLKSVKELLGITIMERSSFEKNPIDFLEAKGYKEVKKDLIIKLPKYSLFELENGRKRMLASAGELQKGNELALPSKYVNFLYLASHY | |
| | EKLKGSPEDNEQKQLFVEQHKHYLDEIIEQISEFSKRVILADANLDKVLSAYNKHRDKPIREQAENIIHLFTLTNLGAPAAFKYFDTTIDRKRYTSTKEVLDATLIH | |
| | QSITGLYETRIDLSQLGGDGSSGSSGSSGSSGSSGSSMASNFTQFVLVDNGGTGDVTVAPSNFANGIAEWISSNSRSQAYKVTCSVRQSSAQNRKYTIKVEV | |
| | PKGAWRSYLNMELTIPIFATNSDCELIVKAMQGLLKDGNPIPSAIAANSGIYGSSGGGEAAAKTLNIEDEHRLHETSKEPDVSLGSTWLSDFPQAWAETGGM | |
| | GLAVRQAPLIIPLKATSTPVSIKQYPMSQEARLGIKPHIQRLLDQGILVPCQSPWNTPLLPVKKPGTNDYRPVQDLREVNKRVEDIHPTVPNPYNLLSGLPPSH | |
| | QWYTVLDLKDAFFCLRLHPTSQPLFAFEWRDPEMGISGQLTWTRLPQGFKNSPTLFNEALHRDLADFRIQHPDLILLQYVDDLLLAATSELDCQQGTRALLQ | |
| | TLGNLGYRASAKKAQICQKQVKYLGYLLKEGQRWLTEARKETVMGQPTPKTPRQLREFLGKAGFCRLFIPGFAEMAAPLYPLTKPGTLFNWGPDQQKAYQ | |
| | EIKQALLTAPALGLPDLTKPFELFVDEKQGYAKGVLTQKLGPWRRPVAYLSKKLDPVAAGWPPCLRMVAAIAVLTKDAGKLTMGQPLVILAPHAVEALVKQ | |
| | PPDRWLSNARMTHYQALLLDTDRVQFGPVVALNPATLLPLPEEGLQHNCLDILAEAHGTRPDLTDQPLPDADHTWYTDGSSLLQEGQRKAGAAVTTETEV | |
| | IWAKALPAGTSAQRAELIALTQALKMAEGKKLNVYTDSRYAFATAHIHGEIYRRRGWLTSEGKEIKNKDEILALLKALFLPKRLSIIHCPGHQKGHSAEARGNR | |
| | MADQAARKAAITETPDTSTLLKRTADGSEFESPKKKAKVE | |
| PL12017 | MPAAKRVKLDGGDKKYSIGLDIGTNSVGWAVITDEYKVPSKKFKVLGNTDRHSIKKNLIGALLFDSGETAEATRLKRTARRRYTRRKNRICYLQEIFSNEMAKV | 16,077 |
| | DDSFFHRLEESFLVEEDKKHERHPIFGNIVDEVAYHEKYPTIYHLRKKLVDSTDKADLRLIYLALAHMIKFRGHFLIEGDLNPDNSDVDKLFIQLVQTYNQLFEE | |
| | NPINASGVDAKAILSARLSKSRRLENLIAQLPGEKKNGLFGNLIALSLGLTPNFKSNFDLAEDAKLQLSKDTYDDDLDNLLAQIGDQYADLFLAAKNLSDAILLS | |
| | DILRVNTEITKAPLSASMIKRYDEHHQDLTLLKALVRQQLPEKYKEIFFDQSKNGYAGYIDGGASQEEFYKFIKPILEKMDGTEELLVKLNREDLLRKQRTFDNG | |
| | SIPHQIHLGELHAILRRQEDFYPFLKDNREKIEKILTFRIPYYVGPLARGNSRFAWMTRKSEETITPWNFEEVVDKGASAQSFIERMTNFDKNLPNEKVLPKHSL | |
| | LYEYFTVYNELTKVKYVTEGMRKPAFLSGEQKKAIVDLLFKTNRKVTVKQLKEDYFKKIECFDSVEISGVEDRFNASLGTYHDLLKIIKDKDFLDNEENEDILEDIV | |
| | LTLTLFEDREMIEERLKTYAHLFDDKVMKQLKRRRYTGWGRLSRKLINGIRDKQSGKTILDFLKSDGFANRNFMQLIHDDSLTFKEDIQKAQVSGQGDSLHE | |
| | HIANLAGSPAIKKGILQTVKVVDELVKVMGRHKPENIVIEMARENQTTQKGQKNSRERMKRIEEGIKELGSQILKEHPVENTQLQNEKLYLYYLQNGRDMYV | |
| | DQELDINRLSDYDVDHIVPQSFLKDDSIDNKVLTRSDKARGKSDNVPSEEVVKKMKNYWRQLLNAKLITQRKFDNLTKAERGGLSELDKAGFIKRQLVETRQI | |
| | TKHVAQILDSRMNTKYDENDKLIREVKVITLKSKLVSDFRKDFQFYKVREINNYHHAHDAYLNAVVGTALIKKYPKLESEFVYGDYKVYDVRKMIAKSEQEIGK | |
| | ATAKYFFYSNIMNFFKTEITLANGEIRKRPLIETNGETGEIVWDKGRDFATVRKVLSMPQVNIVKKTEVQTGGFSKESILPKRNSDKLIARKKDWDPKKYGGFD | |
| | SPTVAYSVLVVAKVEKGKSKKLKSVKELLGITIMERSSFEKNPIDFLEAKGYKEVKKDLIIKLPKYSLFELENGRKRMLASAGELQKGNELALPSKYVNFLYLASHY | |
| | EKLKGSPEDNEQKQLFVEQHKHYLDEIIEQISEFSKRVILADANLDKVLSAYNKHRDKPIREQAENIIHLFTLTNLGAPAAFKYFDTTIDRKRYTSTKEVLDATLIH | |
| | QSITGLYETRIDLSQLGGDGSSGSSGSSGSSGSSGSSMASNFTQFVLVDNGGTGDVTVAPSNFANGIAEWISSNSRSQAYKVTCSVRQSSAQNRKYTIKVEV | |
| | PKGAWRSYLNMELTIPIFATNSDCELIVKAMQGLLKDGNPIPSAIAANSGIYGGSGGSMASNFTQFVLVDNGGTGDVTVAPSNFANGIAEWISSNSRSQAY | |
| | KVTCSVRQSSAQNRKYTIKVEVPKGAWRSYLNMELTIPIFATNSDCELIVKAMQGLLKDGNPIPSAIAANSGIYAEAAAKEAAAKEAAAKEAAAKALEAEAAA | |
| | KEAAAKEAAAKEAAAKATLNIEDEHRLHETSKEPDVSLGSTWLSDFPQAWAETGGMGLAVRQAPLIIPLKATSTPVSIKQYPMSQEARLGIKPHIQRLLDQGI | |
| | LVPCQSPWNTPLLPVKKPGTNDYRPVQDLREVNKRVEDIHPTVPNPYNLLSGLPPSHQWYTVLDLKDAFFCLRLHPTSQPLFAFEWRDPEMGISGQLTWT | |
| | RLPQGFKNSPTLFNEALHRDLADFRIQHPDLILLQYVDDLLLAATSELDCQQGTRALLQTLGNLGYRASAKKAQICQKQVKYLGYLLKEGQRWLTEARKETV | |
| | MGQPTPKTPRQLREFLGKAGFCRLFIPGFAEMAAPLYPLTKPGTLFNWGPDQQKAYQEIKQALLTAPALGLPDLTKPFELFVDEKQGYAKGVLTQKLGPWR | |
| | RPVAYLSKKLDPVAAGWPPCLRMVAAIAVLTKDAGKLTMGQPLVILAPHAVEALVKQPPDRWLSNARMTHYQALLLDTDRVQFGPVVALNPATLLPLPEE | |
| | GLQHNCLDILAEAHGTRPDLTDQPLPDADHTWYTDGSSLLQEGQRKAGAAVTTETEVIWAKALPAGTSAQRAELIALTQALKMAEGKKLNVYTDSRYAFAT | |
| | AHIHGEIYRRRGWLTSEGKEIKNKDEILALLKALFLPKRLSIIHCPGHQKGHSAEARGNRMADQAARKAAITETPDTSTLLKRTADGSEFESPKKKAKVE | |
| PL12018 | MPAAKRVKLDGGDKKYSIGLDIGTNSVGWAVITDEYKVPSKKFKVLGNTDRHSIKKNLIGALLFDSGETAEATRLKRTARRRYTRRKNRICYLQEIFSNEMAKV | 16,078 |
| | DDSFFHRLEESFLVEEDKKHERHPIFGNIVDEVAYHEKYPTIYHLRKKLVDSTDKADLRLIYLALAHMIKFRGHFLIEGDLNPDNSDVDKLFIQLVQTYNQLFEE | |
| | NPINASGVDAKAILSARLSKSRRLENLIAQLPGEKKNGLFGNLIALSLGLTPNFKSNFDLAEDAKLQLSKDTYDDDLDNLLAQIGDQYADLFLAAKNLSDAILLS | |
| | DILRVNTEITKAPLSASMIKRYDEHHQDLTLLKALVRQQLPEKYKEIFFDQSKNGYAGYIDGGASQEEFYKFIKPILEKMDGTEELLVKLNREDLLRKQRTFDNG | |
| | SIPHQIHLGELHAILRRQEDFYPFLKDNREKIEKILTFRIPYYVGPLARGNSRFAWMTRKSEETITPWNFEEVVDKGASAQSFIERMTNFDKNLPNEKVLPKHSL | |
| | LYEYFTVYNELTKVKYVTEGMRKPAFLSGEQKKAIVDLLFKTNRKVTVKQLKEDYFKKIECFDSVEISGVEDRFNASLGTYHDLLKIIKDKDFLDNEENEDILEDIV | |
| | LTLTLFEDREMIEERLKTYAHLFDDKVMKQLKRRRYTGWGRLSRKLINGIRDKQSGKTILDFLKSDGFANRNFMQLIHDDSLTFKEDIQKAQVSGQGDSLHE | |
| | HIANLAGSPAIKKGILQTVKVVDELVKVMGRHKPENIVIEMARENQTTQKGQKNSRERMKRIEEGIKELGSQILKEHPVENTQLQNEKLYLYYLQNGRDMYV | |
| | DQELDINRLSDYDVDHIVPQSFLKDDSIDNKVLTRSDKARGKSDNVPSEEVVKKMKNYWRQLLNAKLITQRKFDNLTKAERGGLSELDKAGFIKRQLVETRQI | |
| | TKHVAQILDSRMNTKYDENDKLIREVKVITLKSKLVSDFRKDFQFYKVREINNYHHAHDAYLNAVVGTALIKKYPKLESEFVYGDYKVYDVRKMIAKSEQEIGK | |
| | ATAKYFFYSNIMNFFKTEITLANGEIRKRPLIETNGETGEIVWDKGRDFATVRKVLSMPQVNIVKKTEVQTGGFSKESILPKRNSDKLIARKKDWDPKKYGGFD | |
| | SPTVAYSVLVVAKVEKGKSKKLKSVKELLGITIMERSSFEKNPIDFLEAKGYKEVKKDLIIKLPKYSLFELENGRKRMLASAGELQKGNELALPSKYVNFLYLASHY | |
| | EKLKGSPEDNEQKQLFVEQHKHYLDEIIEQISEFSKRVILADANLDKVLSAYNKHRDKPIREQAENIIHLFTLTNLGAPAAFKYFDTTIDRKRYTSTKEVLDATLIH | |
| | QSITGLYETRIDLSQLGGDGSSGSSGSSGSSGSSGSSMASNFTQFVLVDNGGTGDVTVAPSNFANGIAEWISSNSRSQAYKVTCSVRQSSAQNRKYTIKVEV | |
| | PKGAWRSYLNMELTIPIFATNSDCELIVKAMQGLLKDGNPIPSAIAANSGIYGGSGGSMASNFTQFVLVDNGGTGDVTVAPSNFANGIAEWISSNSRSQAY | |
| | KVTCSVRQSSAQNRKYTIKVEVPKGAWRSYLNMELTIPIFATNSDCELIVKAMQGLLKDGNPIPSAIAANSGIYSGGSSGGSSGSETPGTSESATPESSGGSSG | |
| | GSSTLNIEDEHRLHETSKEPDVSLGSTWLSDFPQAWAETGGMGLAVRQAPLIIPLKATSTPVSIKQYPMSQEARLGIKPHIQRLLDQGILVPCQSPWNTPLLP | |
| | VKKPGTNDYRPVQDLREVNKRVEDIHPTVPNPYNLLSGLPPSHQWYTVLDLKDAFFCLRLHPTSQPLFAFEWRDPEMGISGQLTWTRLPQGFKNSPTLFNE | |
| | ALHRDLADFRIQHPDLILLQYVDDLLLAATSELDCQQGTRALLQTLGNLGYRASAKKAQICQKQVKYLGYLLKEGQRWLTEARKETVMGQPTPKTPRQLREF | |
| | LGKAGFCRLFIPGFAEMAAPLYPLTKPGTLFNWGPDQQKAYQEIKQALLTAPALGLPDLTKPFELFVDEKQGYAKGVLTQKLGPWRRPVAYLSKKLDPVAAG | |
| | WPPCLRMVAAIAVLTKDAGKLTMGQPLVILAPHAVEALVKQPPDRWLSNARMTHYQALLLDTDRVQFGPVVALNPATLLPLPEEGLQHNCLDILAEAHGT | |
| | RPDLTDQPLPDADHTWYTDGSSLLQEGQRKAGAAVTTETEVIWAKALPAGTSAQRAELIALTQALKMAEGKKLNVYTDSRYAFATAHIHGEIYRRRGWLTS | |
| | EGKEIKNKDEILALLKALFLPKRLSIIHCPGHQKGHSAEARGNRMADQAARKAAITETPDTSTLLKRTADGSEFESPKKKAKVE | |
| PL12019 | MPAAKRVKLDGGDKKYSIGLDIGTNSVGWAVITDEYKVPSKKFKVLGNTDRHSIKKNLIGALLFDSGETAEATRLKRTARRRYTRRKNRICYLQEIFSNEMAKV | 16,079 |
| | DDSFFHRLEESFLVEEDKKHERHPIFGNIVDEVAYHEKYPTIYHLRKKLVDSTDKADLRLIYLALAHMIKFRGHFLIEGDLNPDNSDVDKLFIQLVQTYNQLFEE | |
| | NPINASGVDAKAILSARLSKSRRLENLIAQLPGEKKNGLFGNLIALSLGLTPNFKSNFDLAEDAKLQLSKDTYDDDLDNLLAQIGDQYADLFLAAKNLSDAILLS | |
| | DILRVNTEITKAPLSASMIKRYDEHHQDLTLLKALVRQQLPEKYKEIFFDQSKNGYAGYIDGGASQEEFYKFIKPILEKMDGTEELLVKLNREDLLRKQRTFDNG | |
| | SIPHQIHLGELHAILRRQEDFYPFLKDNREKIEKILTFRIPYYVGPLARGNSRFAWMTRKSEETITPWNFEEVVDKGASAQSFIERMTNFDKNLPNEKVLPKHSL | |
| | LYEYFTVYNELTKVKYVTEGMRKPAFLSGEQKKAIVDLLFKTNRKVTVKQLKEDYFKKIECFDSVEISGVEDRFNASLGTYHDLLKIIKDKDFLDNEENEDILEDIV | |
| | LTLTLFEDREMIEERLKTYAHLFDDKVMKQLKRRRYTGWGRLSRKLINGIRDKQSGKTILDFLKSDGFANRNFMQLIHDDSLTFKEDIQKAQVSGQGDSLHE | |
| | HIANLAGSPAIKKGILQTVKVVDELVKVMGRHKPENIVIEMARENQTTQKGQKNSRERMKRIEEGIKELGSQILKEHPVENTQLQNEKLYLYYLQNGRDMYV | |
| | DQELDINRLSDYDVDHIVPQSFLKDDSIDNKVLTRSDKARGKSDNVPSEEVVKKMKNYWRQLLNAKLITQRKFDNLTKAERGGLSELDKAGFIKRQLVETRQI | |
| | TKHVAQILDSRMNTKYDENDKLIREVKVITLKSKLVSDFRKDFQFYKVREINNYHHAHDAYLNAVVGTALIKKYPKLESEFVYGDYKVYDVRKMIAKSEQEIGK | |
| | ATAKYFFYSNIMNFFKTEITLANGEIRKRPLIETNGETGEIVWDKGRDFATVRKVLSMPQVNIVKKTEVQTGGFSKESILPKRNSDKLIARKKDWDPKKYGGFD | |
| | SPTVAYSVLVVAKVEKGKSKKLKSVKELLGITIMERSSFEKNPIDFLEAKGYKEVKKDLIIKLPKYSLFELENGRKRMLASAGELQKGNELALPSKYVNFLYLASHY | |
| | EKLKGSPEDNEQKQLFVEQHKHYLDEIIEQISEFSKRVILADANLDKVLSAYNKHRDKPIREQAENIIHLFTLTNLGAPAAFKYFDTTIDRKRYTSTKEVLDATLIH | |
| | QSITGLYETRIDLSQLGGDGSSGSSGSSGSSGSSGSSMASNFTQFVLVDNGGTGDVTVAPSNFANGIAEWISSNSRSQAYKVTCSVRQSSAQNRKYTIKVEV | |
| | PKGAWRSYLNMELTIPIFATNSDCELIVKAMQGLLKDGNPIPSAIAANSGIYGGSGGSMASNFTQFVLVDNGGTGDVTVAPSNFANGIAEWISSNSRSQAY | |
| | KVTCSVRQSSAQNRKYTIKVEVPKGAWRSYLNMELTIPIFATNSDCELIVKAMQGLLKDGNPIPSAIAANSGIYGSSGSSGSSGSSGSSGSSTLNIEDEHRLHET | |
| | SKEPDVSLGSTWLSDFPQAWAETGGMGLAVRQAPLIIPLKATSTPVSIKQYPMSQEARLGIKPHIQRLLDQGILVPCQSPWNTPLLPVKKPGTNDYRPVQDL | |
| | REVNKRVEDIHPTVPNPYNLLSGLPPSHQWYTVLDLKDAFFCLRLHPTSQPLFAFEWRDPEMGISGQLTWTRLPQGFKNSPTLFNEALHRDLADFRIQHPDL | |
| | ILLQYVDDLLLAATSELDCQQGTRALLQTLGNLGYRASAKKAQICQKQVKYLGYLLKEGQRWLTEARKETVMGQPTPKTPRQLREFLGKAGFCRLFIPGFAE | |
| | MAAPLYPLTKPGTLFNWGPDQQKAYQEIKQALLTAPALGLPDLTKPFELFVDEKQGYAKGVLTQKLGPWRRPVAYLSKKLDPVAAGWPPCLRMVAAIAVL | |
| | TKDAGKLTMGQPLVILAPHAVEALVKQPPDRWLSNARMTHYQALLLDTDRVQFGPVVALNPATLLPLPEEGLQHNCLDILAEAHGTRPDLTDQPLPDADH | |
| | TWYTDGSSLLQEGQRKAGAAVTTETEVIWAKALPAGTSAQRAELIALTQALKMAEGKKLNVYTDSRYAFATAHIHGEIYRRRGWLTSEGKEIKNKDEILALLK | |
| | ALFLPKRLSIIHCPGHQKGHSAEARGNRMADQAARKAAITETPDTSTLLKRTADGSEFESPKKKAKVE | |
| PL12020 | MPAAKRVKLDGGDKKYSIGLDIGTNSVGWAVITDEYKVPSKKFKVLGNTDRHSIKKNLIGALLFDSGETAEATRLKRTARRRYTRRKNRICYLQEIFSNEMAKV | 16,080 |
| | DDSFFHRLEESFLVEEDKKHERHPIFGNIVDEVAYHEKYPTIYHLRKKLVDSTDKADLRLIYLALAHMIKFRGHFLIEGDLNPDNSDVDKLFIQLVQTYNQLFEE | |
| | NPINASGVDAKAILSARLSKSRRLENLIAQLPGEKKNGLFGNLIALSLGLTPNFKSNFDLAEDAKLQLSKDTYDDDLDNLLAQIGDQYADLFLAAKNLSDAILLS | |
| | DILRVNTEITKAPLSASMIKRYDEHHQDLTLLKALVRQQLPEKYKEIFFDQSKNGYAGYIDGGASQEEFYKFIKPILEKMDGTEELLVKLNREDLLRKQRTFDNG | |
| | SIPHQIHLGELHAILRRQEDFYPFLKDNREKIEKILTFRIPYYVGPLARGNSRFAWMTRKSEETITPWNFEEVVDKGASAQSFIERMTNFDKNLPNEKVLPKHSL | |
| | LYEYFTVYNELTKVKYVTEGMRKPAFLSGEQKKAIVDLLFKTNRKVTVKQLKEDYFKKIECFDSVEISGVEDRFNASLGTYHDLLKIIKDKDFLDNEENEDILEDIV | |
| | LTLTLFEDREMIEERLKTYAHLFDDKVMKQLKRRRYTGWGRLSRKLINGIRDKQSGKTILDFLKSDGFANRNFMQLIHDDSLTFKEDIQKAQVSGQGDSLHE | |
| | HIANLAGSPAIKKGILQTVKVVDELVKVMGRHKPENIVIEMARENQTTQKGQKNSRERMKRIEEGIKELGSQILKEHPVENTQLQNEKLYLYYLQNGRDMYV | |
| | DQELDINRLSDYDVDHIVPQSFLKDDSIDNKVLTRSDKARGKSDNVPSEEVVKKMKNYWRQLLNAKLITQRKFDNLTKAERGGLSELDKAGFIKRQLVETRQI | |
| | TKHVAQILDSRMNTKYDENDKLIREVKVITLKSKLVSDFRKDFQFYKVREINNYHHAHDAYLNAVVGTALIKKYPKLESEFVYGDYKVYDVRKMIAKSEQEIGK | |
| | ATAKYFFYSNIMNFFKTEITLANGEIRKRPLIETNGETGEIVWDKGRDFATVRKVLSMPQVNIVKKTEVQTGGFSKESILPKRNSDKLIARKKDWDPKKYGGFD | |
| | SPTVAYSVLVVAKVEKGKSKKLKSVKELLGITIMERSSFEKNPIDFLEAKGYKEVKKDLIIKLPKYSLFELENGRKRMLASAGELQKGNELALPSKYVNFLYLASHY | |
| | EKLKGSPEDNEQKQLFVEQHKHYLDEIIEQISEFSKRVILADANLDKVLSAYNKHRDKPIREQAENIIHLFTLTNLGAPAAFKYFDTTIDRKRYTSTKEVLDATLIH | |
| | QSITGLYETRIDLSQLGGDGSSGSSGSSGSSGSSGSSMASNFTQFVLVDNGGTGDVTVAPSNFANGIAEWISSNSRSQAYKVTCSVRQSSAQNRKYTIKVEV | |
| | PKGAWRSYLNMELTIPIFATNSDCELIVKAMQGLLKDGNPIPSAIAANSGIYGGSGGSMASNFTQFVLVDNGGTGDVTVAPSNFANGIAEWISSNSRSQAY | |
| | KVTCSVRQSSAQNRKYTIKVEVPKGAWRSYLNMELTIPIFATNSDCELIVKAMQGLLKDGNPIPSAIAANSGIYGSSGGGEAAAKTLNIEDEHRLHETSKEPDV | |
| | SLGSTWLSDFPQAWAETGGMGLAVRQAPLIIPLKATSTPVSIKQYPMSQEARLGIKPHIQRLLDQGILVPCQSPWNTPLLPVKKPGTNDYRPVQDLREVNK | |
| | RVEDIHPTVPNPYNLLSGLPPSHQWYTVLDLKDAFFCLRLHPTSQPLFAFEWRDPEMGISGQLTWTRLPQGFKNSPTLFNEALHRDLADFRIQHPDLILLQY | |
| | VDDLLLAATSELDCQQGTRALLQTLGNLGYRASAKKAQICQKQVKYLGYLLKEGQRWLTEARKETVMGQPTPKTPRQLREFLGKAGFCRLFIPGFAEMAAP | |
| | LYPLTKPGTLFNWGPDQQKAYQEIKQALLTAPALGLPDLTKPFELFVDEKQGYAKGVLTQKLGPWRRPVAYLSKKLDPVAAGWPPCLRMVAAIAVLTKDAG | |
| | KLTMGQPLVILAPHAVEALVKQPPDRWLSNARMTHYQALLLDTDRVQFGPVVALNPATLLPLPEEGLQHNCLDILAEAHGTRPDLTDQPLPDADHTWYTD | |
| | GSSLLQEGQRKAGAAVTTETEVIWAKALPAGTSAQRAELIALTQALKMAEGKKLNVYTDSRYAFATAHIHGEIYRRRGWLTSEGKEIKNKDEILALLKALFLPK | |
| | RLSIIHCPGHQKGHSAEARGNRMADQAARKAAITETPDTSTLLKRTADGSEFESPKKKAKVE | |
| PL12021 | MPAAKRVKLDGGDKKYSIGLDIGTNSVGWAVITDEYKVPSKKFKVLGNTDRHSIKKNLIGALLFDSGETAEATRLKRTARRRYTRRKNRICYLQEIFSNEMAKV | 16,081 |
| | DDSFFHRLEESFLVEEDKKHERHPIFGNIVDEVAYHEKYPTIYHLRKKLVDSTDKADLRLIYLALAHMIKFRGHFLIEGDLNPDNSDVDKLFIQLVQTYNQLFEE | |
| | NPINASGVDAKAILSARLSKSRRLENLIAQLPGEKKNGLFGNLIALSLGLTPNFKSNFDLAEDAKLQLSKDTYDDDLDNLLAQIGDQYADLFLAAKNLSDAILLS | |
| | DILRVNTEITKAPLSASMIKRYDEHHQDLTLLKALVRQQLPEKYKEIFFDQSKNGYAGYIDGGASQEEFYKFIKPILEKMDGTEELLVKLNREDLLRKQRTFDNG | |
| | SIPHQIHLGELHAILRRQEDFYPFLKDNREKIEKILTFRIPYYVGPLARGNSRFAWMTRKSEETITPWNFEEVVDKGASAQSFIERMTNFDKNLPNEKVLPKHSL | |
| | LYEYFTVYNELTKVKYVTEGMRKPAFLSGEQKKAIVDLLFKTNRKVTVKQLKEDYFKKIECFDSVEISGVEDRFNASLGTYHDLLKIIKDKDFLDNEENEDILEDIV | |
| | LTLTLFEDREMIEERLKTYAHLFDDKVMKQLKRRRYTGWGRLSRKLINGIRDKQSGKTILDFLKSDGFANRNFMQLIHDDSLTFKEDIQKAQVSGQGDSLHE | |
| | HIANLAGSPAIKKGILQTVKVVDELVKVMGRHKPENIVIEMARENQTTQKGQKNSRERMKRIEEGIKELGSQILKEHPVENTQLQNEKLYLYYLQNGRDMYV | |
| | DQELDINRLSDYDVDHIVPQSFLKDDSIDNKVLTRSDKARGKSDNVPSEEVVKKMKNYWRQLLNAKLITQRKFDNLTKAERGGLSELDKAGFIKRQLVETRQI | |
| | TKHVAQILDSRMNTKYDENDKLIREVKVITLKSKLVSDFRKDFQFYKVREINNYHHAHDAYLNAVVGTALIKKYPKLESEFVYGDYKVYDVRKMIAKSEQEIGK | |
| | ATAKYFFYSNIMNFFKTEITLANGEIRKRPLIETNGETGEIVWDKGRDFATVRKVLSMPQVNIVKKTEVQTGGFSKESILPKRNSDKLIARKKDWDPKKYGGFD | |
| | SPTVAYSVLVVAKVEKGKSKKLKSVKELLGITIMERSSFEKNPIDFLEAKGYKEVKKDLIIKLPKYSLFELENGRKRMLASAGELQKGNELALPSKYVNFLYLASHY | |
| | EKLKGSPEDNEQKQLFVEQHKHYLDEIIEQISEFSKRVILADANLDKVLSAYNKHRDKPIREQAENIIHLFTLTNLGAPAAFKYFDTTIDRKRYTSTKEVLDATLIH | |
| | QSITGLYETRIDLSQLGGDGSSGSSGSSGSSGSSGSSMASNFTQFVLVDNGGTGDVTVAPSNFANGIAEWISSNSRSQAYKVTCSVRQSSAQNRKYTIKVEV | |
| | PKGAWRSYLNMELTIPIFATNSDCELIVKAMQGLLKDGNPIPSAIAANSGIYGGSGGSMASNFTQFVLVDNGGTGDVTVAPSNFANGIAEWISSNSRSQAY | |
| | KVTCSVRQSSAQNRKYTIKVEVPKGAWRSYLNMELTIPIFATNSDCELIVKAMQGLLKDGNPIPSAIAANSGIYGGGSGGGSGGGSGGGSMASNFTQFVLV | |
| | DNGGTGDVTVAPSNFANGIAEWISSNSRSQAYKVTCSVRQSSAQNRKYTIKVEVPKGAWRSYLNMELTIPIFATNSDCELIVKAMQGLLKDGNPIPSAIAAN | |
| | SGIYGGSGGSMASNFTQFVLVDNGGTGDVTVAPSNFANGIAEWISSNSRSQAYKVTCSVRQSSAQNRKYTIKVEVPKGAWRSYLNMELTIPIFATNSDCELI | |
| | VKAMQGLLKDGNPIPSAIAANSGIYAEAAAKEAAAKEAAAKEAAAKALEAEAAAKEAAAKEAAAKEAAAKATLNIEDEHRLHETSKEPDVSLGSTWLSDFPQ | |
| | AWAETGGMGLAVRQAPLIIPLKATSTPVSIKQYPMSQEARLGIKPHIQRLLDQGILVPCQSPWNTPLLPVKKPGTNDYRPVQDLREVNKRVEDIHPTVPNPY | |
| | NLLSGLPPSHQWYTVLDLKDAFFCLRLHPTSQPLFAFEWRDPEMGISGQLTWTRLPQGFKNSPTLFNEALHRDLADFRIQHPDLILLQYVDDLLLAATSELDC | |
| | QQGTRALLQTLGNLGYRASAKKAQICQKQVKYLGYLLKEGQRWLTEARKETVMGQPTPKTPRQLREFLGKAGFCRLFIPGFAEMAAPLYPLTKPGTLFNWG | |
| | PDQQKAYQEIKQALLTAPALGLPDLTKPFELFVDEKQGYAKGVLTQKLGPWRRPVAYLSKKLDPVAAGWPPCLRMVAAIAVLTKDAGKLTMGQPLVILAPH | |
| | AVEALVKQPPDRWLSNARMTHYQALLLDTDRVQFGPVVALNPATLLPLPEEGLQHNCLDILAEAHGTRPDLTDQPLPDADHTWYTDGSSLLQEGQRKAG | |
| | AAVTTETEVIWAKALPAGTSAQRAELIALTQALKMAEGKKLNVYTDSRYAFATAHIHGEIYRRRGWLTSEGKEIKNKDEILALLKALFLPKRLSIIHCPGHQKGH | |
| | SAEARGNRMADQAARKAAITETPDTSTLLKRTADGSEFESPKKKAKVE | |
| PL12022 | MPAAKRVKLDGGDKKYSIGLDIGTNSVGWAVITDEYKVPSKKFKVLGNTDRHSIKKNLIGALLFDSGETAEATRLKRTARRRYTRRKNRICYLQEIFSNEMAKV | 16,082 |
| | DDSFFHRLEESFLVEEDKKHERHPIFGNIVDEVAYHEKYPTIYHLRKKLVDSTDKADLRLIYLALAHMIKFRGHFLIEGDLNPDNSDVDKLFIQLVQTYNQLFEE | |
| | NPINASGVDAKAILSARLSKSRRLENLIAQLPGEKKNGLFGNLIALSLGLTPNFKSNFDLAEDAKLQLSKDTYDDDLDNLLAQIGDQYADLFLAAKNLSDAILLS | |
| | DILRVNTEITKAPLSASMIKRYDEHHQDLTLLKALVRQQLPEKYKEIFFDQSKNGYAGYIDGGASQEEFYKFIKPILEKMDGTEELLVKLNREDLLRKQRTFDNG | |
| | SIPHQIHLGELHAILRRQEDFYPFLKDNREKIEKILTFRIPYYVGPLARGNSRFAWMTRKSEETITPWNFEEVVDKGASAQSFIERMTNFDKNLPNEKVLPKHSL | |
| | LYEYFTVYNELTKVKYVTEGMRKPAFLSGEQKKAIVDLLFKTNRKVTVKQLKEDYFKKIECFDSVEISGVEDRFNASLGTYHDLLKIIKDKDFLDNEENEDILEDIV | |
| | LTLTLFEDREMIEERLKTYAHLFDDKVMKQLKRRRYTGWGRLSRKLINGIRDKQSGKTILDFLKSDGFANRNFMQLIHDDSLTFKEDIQKAQVSGQGDSLHE | |
| | HIANLAGSPAIKKGILQTVKVVDELVKVMGRHKPENIVIEMARENQTTQKGQKNSRERMKRIEEGIKELGSQILKEHPVENTQLQNEKLYLYYLQNGRDMYV | |
| | DQELDINRLSDYDVDHIVPQSFLKDDSIDNKVLTRSDKARGKSDNVPSEEVVKKMKNYWRQLLNAKLITQRKFDNLTKAERGGLSELDKAGFIKRQLVETRQI | |
| | TKHVAQILDSRMNTKYDENDKLIREVKVITLKSKLVSDFRKDFQFYKVREINNYHHAHDAYLNAVVGTALIKKYPKLESEFVYGDYKVYDVRKMIAKSEQEIGK | |
| | ATAKYFFYSNIMNFFKTEITLANGEIRKRPLIETNGETGEIVWDKGRDFATVRKVLSMPQVNIVKKTEVQTGGFSKESILPKRNSDKLIARKKDWDPKKYGGFD | |
| | SPTVAYSVLVVAKVEKGKSKKLKSVKELLGITIMERSSFEKNPIDFLEAKGYKEVKKDLIIKLPKYSLFELENGRKRMLASAGELQKGNELALPSKYVNFLYLASHY | |
| | EKLKGSPEDNEQKQLFVEQHKHYLDEIIEQISEFSKRVILADANLDKVLSAYNKHRDKPIREQAENIIHLFTLTNLGAPAAFKYFDTTIDRKRYTSTKEVLDATLIH | |
| | QSITGLYETRIDLSQLGGDGSSGSSGSSGSSGSSGSSMASNFTQFVLVDNGGTGDVTVAPSNFANGIAEWISSNSRSQAYKVTCSVRQSSAQNRKYTIKVEV | |
| | PKGAWRSYLNMELTIPIFATNSDCELIVKAMQGLLKDGNPIPSAIAANSGIYGGSGGSMASNFTQFVLVDNGGTGDVTVAPSNFANGIAEWISSNSRSQAY | |
| | KVTCSVRQSSAQNRKYTIKVEVPKGAWRSYLNMELTIPIFATNSDCELIVKAMQGLLKDGNPIPSAIAANSGIYGGGSGGGSGGGSGGGSMASNFTQFVLV | |
| | DNGGTGDVTVAPSNFANGIAEWISSNSRSQAYKVTCSVRQSSAQNRKYTIKVEVPKGAWRSYLNMELTIPIFATNSDCELIVKAMQGLLKDGNPIPSAIAAN | |
| | SGIYGGSGGSMASNFTQFVLVDNGGTGDVTVAPSNFANGIAEWISSNSRSQAYKVTCSVRQSSAQNRKYTIKVEVPKGAWRSYLNMELTIPIFATNSDCELI | |
| | VKAMQGLLKDGNPIPSAIAANSGIYSGGSSGGSSGSETPGTSESATPESSGGSSGGSSTLNIEDEHRLHETSKEPDVSLGSTWLSDFPQAWAETGGMGLAVR | |
| | QAPLIIPLKATSTPVSIKQYPMSQEARLGIKPHIQRLLDQGILVPCQSPWNTPLLPVKKPGTNDYRPVQDLREVNKRVEDIHPTVPNPYNLLSGLPPSHQWYT | |
| | VLDLKDAFFCLRLHPTSQPLFAFEWRDPEMGISGQLTWTRLPQGFKNSPTLFNEALHRDLADFRIQHPDLILLQYVDDLLLAATSELDCQQGTRALLQTLGNL | |
| | GYRASAKKAQICQKQVKYLGYLLKEGQRWLTEARKETVMGQPTPKTPRQLREFLGKAGFCRLFIPGFAEMAAPLYPLTKPGTLFNWGPDQQKAYQEIKQAL | |
| | LTAPALGLPDLTKPFELFVDEKQGYAKGVLTQKLGPWRRPVAYLSKKLDPVAAGWPPCLRMVAAIAVLTKDAGKLTMGQPLVILAPHAVEALVKQPPDRW | |
| | LSNARMTHYQALLLDTDRVQFGPVVALNPATLLPLPEEGLQHNCLDILAEAHGTRPDLTDQPLPDADHTWYTDGSSLLQEGQRKAGAAVTTETEVIWAKA | |
| | LPAGTSAQRAELIALTQALKMAEGKKLNVYTDSRYAFATAHIHGEIYRRRGWLTSEGKEIKNKDEILALLKALFLPKRLSIIHCPGHQKGHSAEARGNRMADQ | |
| | AARKAAITETPDTSTLLKRTADGSEFESPKKKAKVE | |
| PL12023 | MPAAKRVKLDGGDKKYSIGLDIGTNSVGWAVITDEYKVPSKKFKVLGNTDRHSIKKNLIGALLFDSGETAEATRLKRTARRRYTRRKNRICYLQEIFSNEMAKV | 16,083 |
| | DDSFFHRLEESFLVEEDKKHERHPIFGNIVDEVAYHEKYPTIYHLRKKLVDSTDKADLRLIYLALAHMIKFRGHFLIEGDLNPDNSDVDKLFIQLVQTYNQLFEE | |
| | NPINASGVDAKAILSARLSKSRRLENLIAQLPGEKKNGLFGNLIALSLGLTPNFKSNFDLAEDAKLQLSKDTYDDDLDNLLAQIGDQYADLFLAAKNLSDAILLS | |
| | DILRVNTEITKAPLSASMIKRYDEHHQDLTLLKALVRQQLPEKYKEIFFDQSKNGYAGYIDGGASQEEFYKFIKPILEKMDGTEELLVKLNREDLLRKQRTFDNG | |
| | SIPHQIHLGELHAILRRQEDFYPFLKDNREKIEKILTFRIPYYVGPLARGNSRFAWMTRKSEETITPWNFEEVVDKGASAQSFIERMTNFDKNLPNEKVLPKHSL | |
| | LYEYFTVYNELTKVKYVTEGMRKPAFLSGEQKKAIVDLLFKTNRKVTVKQLKEDYFKKIECFDSVEISGVEDRFNASLGTYHDLLKIIKDKDFLDNEENEDILEDIV | |
| | LTLTLFEDREMIEERLKTYAHLFDDKVMKQLKRRRYTGWGRLSRKLINGIRDKQSGKTILDFLKSDGFANRNFMQLIHDDSLTFKEDIQKAQVSGQGDSLHE | |
| | HIANLAGSPAIKKGILQTVKVVDELVKVMGRHKPENIVIEMARENQTTQKGQKNSRERMKRIEEGIKELGSQILKEHPVENTQLQNEKLYLYYLQNGRDMYV | |
| | DQELDINRLSDYDVDHIVPQSFLKDDSIDNKVLTRSDKARGKSDNVPSEEVVKKMKNYWRQLLNAKLITQRKFDNLTKAERGGLSELDKAGFIKRQLVETRQI | |
| | TKHVAQILDSRMNTKYDENDKLIREVKVITLKSKLVSDFRKDFQFYKVREINNYHHAHDAYLNAVVGTALIKKYPKLESEFVYGDYKVYDVRKMIAKSEQEIGK | |
| | ATAKYFFYSNIMNFFKTEITLANGEIRKRPLIETNGETGEIVWDKGRDFATVRKVLSMPQVNIVKKTEVQTGGFSKESILPKRNSDKLIARKKDWDPKKYGGFD | |
| | SPTVAYSVLVVAKVEKGKSKKLKSVKELLGITIMERSSFEKNPIDFLEAKGYKEVKKDLIIKLPKYSLFELENGRKRMLASAGELQKGNELALPSKYVNFLYLASHY | |
| | EKLKGSPEDNEQKQLFVEQHKHYLDEIIEQISEFSKRVILADANLDKVLSAYNKHRDKPIREQAENIIHLFTLTNLGAPAAFKYFDTTIDRKRYTSTKEVLDATLIH | |
| | QSITGLYETRIDLSQLGGDGSSGSSGSSGSSGSSGSSMASNFTQFVLVDNGGTGDVTVAPSNFANGIAEWISSNSRSQAYKVTCSVRQSSAQNRKYTIKVEV | |
| | PKGAWRSYLNMELTIPIFATNSDCELIVKAMQGLLKDGNPIPSAIAANSGIYGGSGGSMASNFTQFVLVDNGGTGDVTVAPSNFANGIAEWISSNSRSQAY | |
| | KVTCSVRQSSAQNRKYTIKVEVPKGAWRSYLNMELTIPIFATNSDCELIVKAMQGLLKDGNPIPSAIAANSGIYGGGSGGGSGGGSGGGSMASNFTQFVLV | |
| | DNGGTGDVTVAPSNFANGIAEWISSNSRSQAYKVTCSVRQSSAQNRKYTIKVEVPKGAWRSYLNMELTIPIFATNSDCELIVKAMQGLLKDGNPIPSAIAAN | |
| | SGIYGGSGGSMASNFTQFVLVDNGGTGDVTVAPSNFANGIAEWISSNSRSQAYKVTCSVRQSSAQNRKYTIKVEVPKGAWRSYLNMELTIPIFATNSDCELI | |
| | VKAMQGLLKDGNPIPSAIAANSGIYGSSGSSGSSGSSGSSGSSTLNIEDEHRLHETSKEPDVSLGSTWLSDFPQAWAETGGMGLAVRQAPLIIPLKATSTPVSI | |
| | KQYPMSQEARLGIKPHIQRLLDQGILVPCQSPWNTPLLPVKKPGTNDYRPVQDLREVNKRVEDIHPTVPNPYNLLSGLPPSHQWYTVLDLKDAFFCLRLHPT | |
| | SQPLFAFEWRDPEMGISGQLTWTRLPQGFKNSPTLFNEALHRDLADFRIQHPDLILLQYVDDLLLAATSELDCQQGTRALLQTLGNLGYRASAKKAQICQKQ | |
| | VKYLGYLLKEGQRWLTEARKETVMGQPTPKTPRQLREFLGKAGFCRLFIPGFAEMAAPLYPLTKPGTLFNWGPDQQKAYQEIKQALLTAPALGLPDLTKPFE | |
| | LFVDEKQGYAKGVLTQKLGPWRRPVAYLSKKLDPVAAGWPPCLRMVAAIAVLTKDAGKLTMGQPLVILAPHAVEALVKQPPDRWLSNARMTHYQALLLD | |
| | TDRVQFGPVVALNPATLLPLPEEGLQHNCLDILAEAHGTRPDLTDQPLPDADHTWYTDGSSLLQEGQRKAGAAVTTETEVIWAKALPAGTSAQRAELIALT | |
| | QALKMAEGKKLNVYTDSRYAFATAHIHGEIYRRRGWLTSEGKEIKNKDEILALLKALFLPKRLSIIHCPGHQKGHSAEARGNRMADQAARKAAITETPDTSTLL | |
| | KRTADGSEFESPKKKAKVE | |
| PL12024 | MPAAKRVKLDGGDKKYSIGLDIGTNSVGWAVITDEYKVPSKKFKVLGNTDRHSIKKNLIGALLFDSGETAEATRLKRTARRRYTRRKNRICYLQEIFSNEMAKV | 16,084 |
| | DDSFFHRLEESFLVEEDKKHERHPIFGNIVDEVAYHEKYPTIYHLRKKLVDSTDKADLRLIYLALAHMIKFRGHFLIEGDLNPDNSDVDKLFIQLVQTYNQLFEE | |
| | NPINASGVDAKAILSARLSKSRRLENLIAQLPGEKKNGLFGNLIALSLGLTPNFKSNFDLAEDAKLQLSKDTYDDDLDNLLAQIGDQYADLFLAAKNLSDAILLS | |
| | DILRVNTEITKAPLSASMIKRYDEHHQDLTLLKALVRQQLPEKYKEIFFDQSKNGYAGYIDGGASQEEFYKFIKPILEKMDGTEELLVKLNREDLLRKQRTFDNG | |
| | SIPHQIHLGELHAILRRQEDFYPFLKDNREKIEKILTFRIPYYVGPLARGNSRFAWMTRKSEETITPWNFEEVVDKGASAQSFIERMTNFDKNLPNEKVLPKHSL | |
| | LYEYFTVYNELTKVKYVTEGMRKPAFLSGEQKKAIVDLLFKTNRKVTVKQLKEDYFKKIECFDSVEISGVEDRFNASLGTYHDLLKIIKDKDFLDNEENEDILEDIV | |
| | LTLTLFEDREMIEERLKTYAHLFDDKVMKQLKRRRYTGWGRLSRKLINGIRDKQSGKTILDFLKSDGFANRNFMQLIHDDSLTFKEDIQKAQVSGQGDSLHE | |
| | HIANLAGSPAIKKGILQTVKVVDELVKVMGRHKPENIVIEMARENQTTQKGQKNSRERMKRIEEGIKELGSQILKEHPVENTQLQNEKLYLYYLQNGRDMYV | |
| | DQELDINRLSDYDVDHIVPQSFLKDDSIDNKVLTRSDKARGKSDNVPSEEVVKKMKNYWRQLLNAKLITQRKFDNLTKAERGGLSELDKAGFIKRQLVETRQI | |
| | TKHVAQILDSRMNTKYDENDKLIREVKVITLKSKLVSDFRKDFQFYKVREINNYHHAHDAYLNAVVGTALIKKYPKLESEFVYGDYKVYDVRKMIAKSEQEIGK | |
| | ATAKYFFYSNIMNFFKTEITLANGEIRKRPLIETNGETGEIVWDKGRDFATVRKVLSMPQVNIVKKTEVQTGGFSKESILPKRNSDKLIARKKDWDPKKYGGFD | |
| | SPTVAYSVLVVAKVEKGKSKKLKSVKELLGITIMERSSFEKNPIDFLEAKGYKEVKKDLIIKLPKYSLFELENGRKRMLASAGELQKGNELALPSKYVNFLYLASHY | |
| | EKLKGSPEDNEQKQLFVEQHKHYLDEIIEQISEFSKRVILADANLDKVLSAYNKHRDKPIREQAENIIHLFTLTNLGAPAAFKYFDTTIDRKRYTSTKEVLDATLIH | |
| | QSITGLYETRIDLSQLGGDGSSGSSGSSGSSGSSGSSMASNFTQFVLVDNGGTGDVTVAPSNFANGIAEWISSNSRSQAYKVTCSVRQSSAQNRKYTIKVEV | |
| | PKGAWRSYLNMELTIPIFATNSDCELIVKAMQGLLKDGNPIPSAIAANSGIYGGSGGSMASNFTQFVLVDNGGTGDVTVAPSNFANGIAEWISSNSRSQAY | |
| | KVTCSVRQSSAQNRKYTIKVEVPKGAWRSYLNMELTIPIFATNSDCELIVKAMQGLLKDGNPIPSAIAANSGIYGGGSGGGSGGGSGGGSMASNFTQFVLV | |
| | DNGGTGDVTVAPSNFANGIAEWISSNSRSQAYKVTCSVRQSSAQNRKYTIKVEVPKGAWRSYLNMELTIPIFATNSDCELIVKAMQGLLKDGNPIPSAIAAN | |
| | SGIYGGSGGSMASNFTQFVLVDNGGTGDVTVAPSNFANGIAEWISSNSRSQAYKVTCSVRQSSAQNRKYTIKVEVPKGAWRSYLNMELTIPIFATNSDCELI | |
| | VKAMQGLLKDGNPIPSAIAANSGIYGSSGGGEAAAKTLNIEDEHRLHETSKEPDVSLGSTWLSDFPQAWAETGGMGLAVRQAPLIIPLKATSTPVSIKQYPM | |
| | SQEARLGIKPHIQRLLDQGILVPCQSPWNTPLLPVKKPGTNDYRPVQDLREVNKRVEDIHPTVPNPYNLLSGLPPSHQWYTVLDLKDAFFCLRLHPTSQPLFA | |
| | FEWRDPEMGISGQLTWTRLPQGFKNSPTLFNEALHRDLADFRIQHPDLILLQYVDDLLLAATSELDCQQGTRALLQTLGNLGYRASAKKAQICQKQVKYLGY | |
| | LLKEGQRWLTEARKETVMGQPTPKTPRQLREFLGKAGFCRLFIPGFAEMAAPLYPLTKPGTLFNWGPDQQKAYQEIKQALLTAPALGLPDLTKPFELFVDEK | |
| | QGYAKGVLTQKLGPWRRPVAYLSKKLDPVAAGWPPCLRMVAAIAVLTKDAGKLTMGQPLVILAPHAVEALVKQPPDRWLSNARMTHYQALLLDTDRVQ | |
| | FGPVVALNPATLLPLPEEGLQHNCLDILAEAHGTRPDLTDQPLPDADHTWYTDGSSLLQEGQRKAGAAVTTETEVIWAKALPAGTSAQRAELIALTQALKM | |
| | AEGKKLNVYTDSRYAFATAHIHGEIYRRRGWLTSEGKEIKNKDEILALLKALFLPKRLSIIHCPGHQKGHSAEARGNRMADQAARKAAITETPDTSTLLKRTAD | |
| | GSEFESPKKKAKVE | |
| PL12025 | MPAAKRVKLDGGDKKYSIGLDIGTNSVGWAVITDEYKVPSKKFKVLGNTDRHSIKKNLIGALLFDSGETAEATRLKRTARRRYTRRKNRICYLQEIFSNEMAKV | 16,085 |
| | DDSFFHRLEESFLVEEDKKHERHPIFGNIVDEVAYHEKYPTIYHLRKKLVDSTDKADLRLIYLALAHMIKFRGHFLIEGDLNPDNSDVDKLFIQLVQTYNQLFEE | |
| | NPINASGVDAKAILSARLSKSRRLENLIAQLPGEKKNGLFGNLIALSLGLTPNFKSNFDLAEDAKLQLSKDTYDDDLDNLLAQIGDQYADLFLAAKNLSDAILLS | |
| | DILRVNTEITKAPLSASMIKRYDEHHQDLTLLKALVRQQLPEKYKEIFFDQSKNGYAGYIDGGASQEEFYKFIKPILEKMDGTEELLVKLNREDLLRKQRTFDNG | |
| | SIPHQIHLGELHAILRRQEDFYPFLKDNREKIEKILTFRIPYYVGPLARGNSRFAWMTRKSEETITPWNFEEVVDKGASAQSFIERMTNFDKNLPNEKVLPKHSL | |
| | LYEYFTVYNELTKVKYVTEGMRKPAFLSGEQKKAIVDLLFKTNRKVTVKQLKEDYFKKIECFDSVEISGVEDRFNASLGTYHDLLKIIKDKDFLDNEENEDILEDIV | |
| | LTLTLFEDREMIEERLKTYAHLFDDKVMKQLKRRRYTGWGRLSRKLINGIRDKQSGKTILDFLKSDGFANRNFMQLIHDDSLTFKEDIQKAQVSGQGDSLHE | |
| | HIANLAGSPAIKKGILQTVKVVDELVKVMGRHKPENIVIEMARENQTTQKGQKNSRERMKRIEEGIKELGSQILKEHPVENTQLQNEKLYLYYLQNGRDMYV | |
| | DQELDINRLSDYDVDHIVPQSFLKDDSIDNKVLTRSDKARGKSDNVPSEEVVKKMKNYWRQLLNAKLITQRKFDNLTKAERGGLSELDKAGFIKRQLVETRQI | |
| | TKHVAQILDSRMNTKYDENDKLIREVKVITLKSKLVSDFRKDFQFYKVREINNYHHAHDAYLNAVVGTALIKKYPKLESEFVYGDYKVYDVRKMIAKSEQEIGK | |
| | ATAKYFFYSNIMNFFKTEITLANGEIRKRPLIETNGETGEIVWDKGRDFATVRKVLSMPQVNIVKKTEVQTGGFSKESILPKRNSDKLIARKKDWDPKKYGGFD | |
| | SPTVAYSVLVVAKVEKGKSKKLKSVKELLGITIMERSSFEKNPIDFLEAKGYKEVKKDLIIKLPKYSLFELENGRKRMLASAGELQKGNELALPSKYVNFLYLASHY | |
| | EKLKGSPEDNEQKQLFVEQHKHYLDEIIEQISEFSKRVILADANLDKVLSAYNKHRDKPIREQAENIIHLFTLTNLGAPAAFKYFDTTIDRKRYTSTKEVLDATLIH | |
| | QSITGLYETRIDLSQLGGDGSSGGGEAAAKMASNFTQFVLVDNGGTGDVTVAPSNFANGIAEWISSNSRSQAYKVTCSVRQSSAQNRKYTIKVEVPKGAW | |
| | RSYLNMELTIPIFATNSDCELIVKAMQGLLKDGNPIPSAIAANSGIYAEAAAKEAAAKEAAAKEAAAKALEAEAAAKEAAAKEAAAKEAAAKATLNIEDEHRL | |
| | HETSKEPDVSLGSTWLSDFPQAWAETGGMGLAVRQAPLIIPLKATSTPVSIKQYPMSQEARLGIKPHIQRLLDQGILVPCQSPWNTPLLPVKKPGTNDYRPV | |
| | QDLREVNKRVEDIHPTVPNPYNLLSGLPPSHQWYTVLDLKDAFFCLRLHPTSQPLFAFEWRDPEMGISGQLTWTRLPQGFKNSPTLFNEALHRDLADFRIQ | |
| | HPDLILLQYVDDLLLAATSELDCQQGTRALLQTLGNLGYRASAKKAQICQKQVKYLGYLLKEGQRWLTEARKETVMGQPTPKTPRQLREFLGKAGFCRLFIP | |
| | GFAEMAAPLYPLTKPGTLFNWGPDQQKAYQEIKQALLTAPALGLPDLTKPFELFVDEKQGYAKGVLTQKLGPWRRPVAYLSKKLDPVAAGWPPCLRMVAA | |
| | IAVLTKDAGKLTMGQPLVILAPHAVEALVKQPPDRWLSNARMTHYQALLLDTDRVQFGPVVALNPATLLPLPEEGLQHNCLDILAEAHGTRPDLTDQPLPD | |
| | ADHTWYTDGSSLLQEGQRKAGAAVTTETEVIWAKALPAGTSAQRAELIALTQALKMAEGKKLNVYTDSRYAFATAHIHGEIYRRRGWLTSEGKEIKNKDEIL | |
| | ALLKALFLPKRLSIIHCPGHQKGHSAEARGNRMADQAARKAAITETPDTSTLLKRTADGSEFESPKKKAKVE | |
| PL12026 | MPAAKRVKLDGGDKKYSIGLDIGTNSVGWAVITDEYKVPSKKFKVLGNTDRHSIKKNLIGALLFDSGETAEATRLKRTARRRYTRRKNRICYLQEIFSNEMAKV | 16,086 |
| | DDSFFHRLEESFLVEEDKKHERHPIFGNIVDEVAYHEKYPTIYHLRKKLVDSTDKADLRLIYLALAHMIKFRGHFLIEGDLNPDNSDVDKLFIQLVQTYNQLFEE | |
| | NPINASGVDAKAILSARLSKSRRLENLIAQLPGEKKNGLFGNLIALSLGLTPNFKSNFDLAEDAKLQLSKDTYDDDLDNLLAQIGDQYADLFLAAKNLSDAILLS | |
| | DILRVNTEITKAPLSASMIKRYDEHHQDLTLLKALVRQQLPEKYKEIFFDQSKNGYAGYIDGGASQEEFYKFIKPILEKMDGTEELLVKLNREDLLRKQRTFDNG | |
| | SIPHQIHLGELHAILRRQEDFYPFLKDNREKIEKILTFRIPYYVGPLARGNSRFAWMTRKSEETITPWNFEEVVDKGASAQSFIERMTNFDKNLPNEKVLPKHSL | |
| | LYEYFTVYNELTKVKYVTEGMRKPAFLSGEQKKAIVDLLFKTNRKVTVKQLKEDYFKKIECFDSVEISGVEDRFNASLGTYHDLLKIIKDKDFLDNEENEDILEDIV | |
| | LTLTLFEDREMIEERLKTYAHLFDDKVMKQLKRRRYTGWGRLSRKLINGIRDKQSGKTILDFLKSDGFANRNFMQLIHDDSLTFKEDIQKAQVSGQGDSLHE | |
| | HIANLAGSPAIKKGILQTVKVVDELVKVMGRHKPENIVIEMARENQTTQKGQKNSRERMKRIEEGIKELGSQILKEHPVENTQLQNEKLYLYYLQNGRDMYV | |
| | DQELDINRLSDYDVDHIVPQSFLKDDSIDNKVLTRSDKARGKSDNVPSEEVVKKMKNYWRQLLNAKLITQRKFDNLTKAERGGLSELDKAGFIKRQLVETRQI | |
| | TKHVAQILDSRMNTKYDENDKLIREVKVITLKSKLVSDFRKDFQFYKVREINNYHHAHDAYLNAVVGTALIKKYPKLESEFVYGDYKVYDVRKMIAKSEQEIGK | |
| | ATAKYFFYSNIMNFFKTEITLANGEIRKRPLIETNGETGEIVWDKGRDFATVRKVLSMPQVNIVKKTEVQTGGFSKESILPKRNSDKLIARKKDWDPKKYGGFD | |
| | SPTVAYSVLVVAKVEKGKSKKLKSVKELLGITIMERSSFEKNPIDFLEAKGYKEVKKDLIIKLPKYSLFELENGRKRMLASAGELQKGNELALPSKYVNFLYLASHY | |
| | EKLKGSPEDNEQKQLFVEQHKHYLDEIIEQISEFSKRVILADANLDKVLSAYNKHRDKPIREQAENIIHLFTLTNLGAPAAFKYFDTTIDRKRYTSTKEVLDATLIH | |
| | QSITGLYETRIDLSQLGGDGSSGGGEAAAKMASNFTQFVLVDNGGTGDVTVAPSNFANGIAEWISSNSRSQAYKVTCSVRQSSAQNRKYTIKVEVPKGAW | |
| | RSYLNMELTIPIFATNSDCELIVKAMQGLLKDGNPIPSAIAANSGIYSGGSSGGSSGSETPGTSESATPESSGGSSGGSSTLNIEDEHRLHETSKEPDVSLGSTW | |
| | LSDFPQAWAETGGMGLAVRQAPLIIPLKATSTPVSIKQYPMSQEARLGIKPHIQRLLDQGILVPCQSPWNTPLLPVKKPGTNDYRPVQDLREVNKRVEDIHP | |
| | TVPNPYNLLSGLPPSHQWYTVLDLKDAFFCLRLHPTSQPLFAFEWRDPEMGISGQLTWTRLPQGFKNSPTLFNEALHRDLADFRIQHPDLILLQYVDDLLLA | |
| | ATSELDCQQGTRALLQTLGNLGYRASAKKAQICQKQVKYLGYLLKEGQRWLTEARKETVMGQPTPKTPRQLREFLGKAGFCRLFIPGFAEMAAPLYPLTKP | |
| | GTLFNWGPDQQKAYQEIKQALLTAPALGLPDLTKPFELFVDEKQGYAKGVLTQKLGPWRRPVAYLSKKLDPVAAGWPPCLRMVAAIAVLTKDAGKLTMG | |
| | QPLVILAPHAVEALVKQPPDRWLSNARMTHYQALLLDTDRVQFGPVVALNPATLLPLPEEGLQHNCLDILAEAHGTRPDLTDQPLPDADHTWYTDGSSLL | |
| | QEGQRKAGAAVTTETEVIWAKALPAGTSAQRAELIALTQALKMAEGKKLNVYTDSRYAFATAHIHGEIYRRRGWLTSEGKEIKNKDEILALLKALFLPKRLSIIH | |
| | CPGHQKGHSAEARGNRMADQAARKAAITETPDTSTLLKRTADGSEFESPKKKAKVE | |
| PL12027 | MPAAKRVKLDGGDKKYSIGLDIGTNSVGWAVITDEYKVPSKKFKVLGNTDRHSIKKNLIGALLFDSGETAEATRLKRTARRRYTRRKNRICYLQEIFSNEMAKV | 16,087 |
| | DDSFFHRLEESFLVEEDKKHERHPIFGNIVDEVAYHEKYPTIYHLRKKLVDSTDKADLRLIYLALAHMIKFRGHFLIEGDLNPDNSDVDKLFIQLVQTYNQLFEE | |
| | NPINASGVDAKAILSARLSKSRRLENLIAQLPGEKKNGLFGNLIALSLGLTPNFKSNFDLAEDAKLQLSKDTYDDDLDNLLAQIGDQYADLFLAAKNLSDAILLS | |
| | DILRVNTEITKAPLSASMIKRYDEHHQDLTLLKALVRQQLPEKYKEIFFDQSKNGYAGYIDGGASQEEFYKFIKPILEKMDGTEELLVKLNREDLLRKQRTFDNG | |
| | SIPHQIHLGELHAILRRQEDFYPFLKDNREKIEKILTFRIPYYVGPLARGNSRFAWMTRKSEETITPWNFEEVVDKGASAQSFIERMTNFDKNLPNEKVLPKHSL | |
| | LYEYFTVYNELTKVKYVTEGMRKPAFLSGEQKKAIVDLLFKTNRKVTVKQLKEDYFKKIECFDSVEISGVEDRFNASLGTYHDLLKIIKDKDFLDNEENEDILEDIV | |
| | LTLTLFEDREMIEERLKTYAHLFDDKVMKQLKRRRYTGWGRLSRKLINGIRDKQSGKTILDFLKSDGFANRNFMQLIHDDSLTFKEDIQKAQVSGQGDSLHE | |
| | HIANLAGSPAIKKGILQTVKVVDELVKVMGRHKPENIVIEMARENQTTQKGQKNSRERMKRIEEGIKELGSQILKEHPVENTQLQNEKLYLYYLQNGRDMYV | |
| | DQELDINRLSDYDVDHIVPQSFLKDDSIDNKVLTRSDKARGKSDNVPSEEVVKKMKNYWRQLLNAKLITQRKFDNLTKAERGGLSELDKAGFIKRQLVETRQI | |
| | TKHVAQILDSRMNTKYDENDKLIREVKVITLKSKLVSDFRKDFQFYKVREINNYHHAHDAYLNAVVGTALIKKYPKLESEFVYGDYKVYDVRKMIAKSEQEIGK | |
| | ATAKYFFYSNIMNFFKTEITLANGEIRKRPLIETNGETGEIVWDKGRDFATVRKVLSMPQVNIVKKTEVQTGGFSKESILPKRNSDKLIARKKDWDPKKYGGFD | |
| | SPTVAYSVLVVAKVEKGKSKKLKSVKELLGITIMERSSFEKNPIDFLEAKGYKEVKKDLIIKLPKYSLFELENGRKRMLASAGELQKGNELALPSKYVNFLYLASHY | |
| | EKLKGSPEDNEQKQLFVEQHKHYLDEIIEQISEFSKRVILADANLDKVLSAYNKHRDKPIREQAENIIHLFTLTNLGAPAAFKYFDTTIDRKRYTSTKEVLDATLIH | |
| | QSITGLYETRIDLSQLGGDGSSGGGEAAAKMASNFTQFVLVDNGGTGDVTVAPSNFANGIAEWISSNSRSQAYKVTCSVRQSSAQNRKYTIKVEVPKGAW | |
| | RSYLNMELTIPIFATNSDCELIVKAMQGLLKDGNPIPSAIAANSGIYGSSGSSGSSGSSGSSGSSTLNIEDEHRLHETSKEPDVSLGSTWLSDFPQAWAETGGM | |
| | GLAVRQAPLIIPLKATSTPVSIKQYPMSQEARLGIKPHIQRLLDQGILVPCQSPWNTPLLPVKKPGTNDYRPVQDLREVNKRVEDIHPTVPNPYNLLSGLPPSH | |
| | QWYTVLDLKDAFFCLRLHPTSQPLFAFEWRDPEMGISGQLTWTRLPQGFKNSPTLFNEALHRDLADFRIQHPDLILLQYVDDLLLAATSELDCQQGTRALLQ | |
| | TLGNLGYRASAKKAQICQKQVKYLGYLLKEGQRWLTEARKETVMGQPTPKTPRQLREFLGKAGFCRLFIPGFAEMAAPLYPLTKPGTLFNWGPDQQKAYQ | |
| | EIKQALLTAPALGLPDLTKPFELFVDEKQGYAKGVLTQKLGPWRRPVAYLSKKLDPVAAGWPPCLRMVAAIAVLTKDAGKLTMGQPLVILAPHAVEALVKQ | |
| | PPDRWLSNARMTHYQALLLDTDRVQFGPVVALNPATLLPLPEEGLQHNCLDILAEAHGTRPDLTDQPLPDADHTWYTDGSSLLQEGQRKAGAAVTTETEV | |
| | IWAKALPAGTSAQRAELIALTQALKMAEGKKLNVYTDSRYAFATAHIHGEIYRRRGWLTSEGKEIKNKDEILALLKALFLPKRLSIIHCPGHQKGHSAEARGNR | |
| | MADQAARKAAITETPDTSTLLKRTADGSEFESPKKKAKVE | |
| PL12028 | MPAAKRVKLDGGDKKYSIGLDIGTNSVGWAVITDEYKVPSKKFKVLGNTDRHSIKKNLIGALLFDSGETAEATRLKRTARRRYTRRKNRICYLQEIFSNEMAKV | 16,088 |
| | DDSFFHRLEESFLVEEDKKHERHPIFGNIVDEVAYHEKYPTIYHLRKKLVDSTDKADLRLIYLALAHMIKFRGHFLIEGDLNPDNSDVDKLFIQLVQTYNQLFEE | |
| | NPINASGVDAKAILSARLSKSRRLENLIAQLPGEKKNGLFGNLIALSLGLTPNFKSNFDLAEDAKLQLSKDTYDDDLDNLLAQIGDQYADLFLAAKNLSDAILLS | |
| | DILRVNTEITKAPLSASMIKRYDEHHQDLTLLKALVRQQLPEKYKEIFFDQSKNGYAGYIDGGASQEEFYKFIKPILEKMDGTEELLVKLNREDLLRKQRTFDNG | |
| | SIPHQIHLGELHAILRRQEDFYPFLKDNREKIEKILTFRIPYYVGPLARGNSRFAWMTRKSEETITPWNFEEVVDKGASAQSFIERMTNFDKNLPNEKVLPKHSL | |
| | LYEYFTVYNELTKVKYVTEGMRKPAFLSGEQKKAIVDLLFKTNRKVTVKQLKEDYFKKIECFDSVEISGVEDRFNASLGTYHDLLKIIKDKDFLDNEENEDILEDIV | |
| | LTLTLFEDREMIEERLKTYAHLFDDKVMKQLKRRRYTGWGRLSRKLINGIRDKQSGKTILDFLKSDGFANRNFMQLIHDDSLTFKEDIQKAQVSGQGDSLHE | |
| | HIANLAGSPAIKKGILQTVKVVDELVKVMGRHKPENIVIEMARENQTTQKGQKNSRERMKRIEEGIKELGSQILKEHPVENTQLQNEKLYLYYLQNGRDMYV | |
| | DQELDINRLSDYDVDHIVPQSFLKDDSIDNKVLTRSDKARGKSDNVPSEEVVKKMKNYWRQLLNAKLITQRKFDNLTKAERGGLSELDKAGFIKRQLVETRQI | |
| | TKHVAQILDSRMNTKYDENDKLIREVKVITLKSKLVSDFRKDFQFYKVREINNYHHAHDAYLNAVVGTALIKKYPKLESEFVYGDYKVYDVRKMIAKSEQEIGK | |
| | ATAKYFFYSNIMNFFKTEITLANGEIRKRPLIETNGETGEIVWDKGRDFATVRKVLSMPQVNIVKKTEVQTGGFSKESILPKRNSDKLIARKKDWDPKKYGGFD | |
| | SPTVAYSVLVVAKVEKGKSKKLKSVKELLGITIMERSSFEKNPIDFLEAKGYKEVKKDLIIKLPKYSLFELENGRKRMLASAGELQKGNELALPSKYVNFLYLASHY | |
| | EKLKGSPEDNEQKQLFVEQHKHYLDEIIEQISEFSKRVILADANLDKVLSAYNKHRDKPIREQAENIIHLFTLTNLGAPAAFKYFDTTIDRKRYTSTKEVLDATLIH | |
| | QSITGLYETRIDLSQLGGDGSSGGGEAAAKMASNFTQFVLVDNGGTGDVTVAPSNFANGIAEWISSNSRSQAYKVTCSVRQSSAQNRKYTIKVEVPKGAW | |
| | RSYLNMELTIPIFATNSDCELIVKAMQGLLKDGNPIPSAIAANSGIYGSSGGGEAAAKTLNIEDEHRLHETSKEPDVSLGSTWLSDFPQAWAETGGMGLAVR | |
| | QAPLIIPLKATSTPVSIKQYPMSQEARLGIKPHIQRLLDQGILVPCQSPWNTPLLPVKKPGTNDYRPVQDLREVNKRVEDIHPTVPNPYNLLSGLPPSHQWYT | |
| | VLDLKDAFFCLRLHPTSQPLFAFEWRDPEMGISGQLTWTRLPQGFKNSPTLFNEALHRDLADFRIQHPDLILLQYVDDLLLAATSELDCQQGTRALLQTLGNL | |
| | GYRASAKKAQICQKQVKYLGYLLKEGQRWLTEARKETVMGQPTPKTPRQLREFLGKAGFCRLFIPGFAEMAAPLYPLTKPGTLFNWGPDQQKAYQEIKQAL | |
| | LTAPALGLPDLTKPFELFVDEKQGYAKGVLTQKLGPWRRPVAYLSKKLDPVAAGWPPCLRMVAAIAVLTKDAGKLTMGQPLVILAPHAVEALVKQPPDRW | |
| | LSNARMTHYQALLLDTDRVQFGPVVALNPATLLPLPEEGLQHNCLDILAEAHGTRPDLTDQPLPDADHTWYTDGSSLLQEGQRKAGAAVTTETEVIWAKA | |
| | LPAGTSAQRAELIALTQALKMAEGKKLNVYTDSRYAFATAHIHGEIYRRRGWLTSEGKEIKNKDEILALLKALFLPKRLSIIHCPGHQKGHSAEARGNRMADQ | |
| | AARKAAITETPDTSTLLKRTADGSEFESPKKKAKVE | |
| PL12029 | MPAAKRVKLDGGDKKYSIGLDIGTNSVGWAVITDEYKVPSKKFKVLGNTDRHSIKKNLIGALLFDSGETAEATRLKRTARRRYTRRKNRICYLQEIFSNEMAKV | 16,089 |
| | DDSFFHRLEESFLVEEDKKHERHPIFGNIVDEVAYHEKYPTIYHLRKKLVDSTDKADLRLIYLALAHMIKFRGHFLIEGDLNPDNSDVDKLFIQLVQTYNQLFEE | |
| | NPINASGVDAKAILSARLSKSRRLENLIAQLPGEKKNGLFGNLIALSLGLTPNFKSNFDLAEDAKLQLSKDTYDDDLDNLLAQIGDQYADLFLAAKNLSDAILLS | |
| | DILRVNTEITKAPLSASMIKRYDEHHQDLTLLKALVRQQLPEKYKEIFFDQSKNGYAGYIDGGASQEEFYKFIKPILEKMDGTEELLVKLNREDLLRKQRTFDNG | |
| | SIPHQIHLGELHAILRRQEDFYPFLKDNREKIEKILTFRIPYYVGPLARGNSRFAWMTRKSEETITPWNFEEVVDKGASAQSFIERMTNFDKNLPNEKVLPKHSL | |
| | LYEYFTVYNELTKVKYVTEGMRKPAFLSGEQKKAIVDLLFKTNRKVTVKQLKEDYFKKIECFDSVEISGVEDRFNASLGTYHDLLKIIKDKDFLDNEENEDILEDIV | |
| | LTLTLFEDREMIEERLKTYAHLFDDKVMKQLKRRRYTGWGRLSRKLINGIRDKQSGKTILDFLKSDGFANRNFMQLIHDDSLTFKEDIQKAQVSGQGDSLHE | |
| | HIANLAGSPAIKKGILQTVKVVDELVKVMGRHKPENIVIEMARENQTTQKGQKNSRERMKRIEEGIKELGSQILKEHPVENTQLQNEKLYLYYLQNGRDMYV | |
| | DQELDINRLSDYDVDHIVPQSFLKDDSIDNKVLTRSDKARGKSDNVPSEEVVKKMKNYWRQLLNAKLITQRKFDNLTKAERGGLSELDKAGFIKRQLVETRQI | |
| | TKHVAQILDSRMNTKYDENDKLIREVKVITLKSKLVSDFRKDFQFYKVREINNYHHAHDAYLNAVVGTALIKKYPKLESEFVYGDYKVYDVRKMIAKSEQEIGK | |
| | ATAKYFFYSNIMNFFKTEITLANGEIRKRPLIETNGETGEIVWDKGRDFATVRKVLSMPQVNIVKKTEVQTGGFSKESILPKRNSDKLIARKKDWDPKKYGGFD | |
| | SPTVAYSVLVVAKVEKGKSKKLKSVKELLGITIMERSSFEKNPIDFLEAKGYKEVKKDLIIKLPKYSLFELENGRKRMLASAGELQKGNELALPSKYVNFLYLASHY | |
| | EKLKGSPEDNEQKQLFVEQHKHYLDEIIEQISEFSKRVILADANLDKVLSAYNKHRDKPIREQAENIIHLFTLTNLGAPAAFKYFDTTIDRKRYTSTKEVLDATLIH | |
| | QSITGLYETRIDLSQLGGDGSSGGGEAAAKMASNFTQFVLVDNGGTGDVTVAPSNFANGIAEWISSNSRSQAYKVTCSVRQSSAQNRKYTIKVEVPKGAW | |
| | RSYLNMELTIPIFATNSDCELIVKAMQGLLKDGNPIPSAIAANSGIYGGSGGSMASNFTQFVLVDNGGTGDVTVAPSNFANGIAEWISSNSRSQAYKVTCSV | |
| | RQSSAQNRKYTIKVEVPKGAWRSYLNMELTIPIFATNSDCELIVKAMQGLLKDGNPIPSAIAANSGIYAEAAAKEAAAKEAAAKEAAAKALEAEAAAKEAAAK | |
| | EAAAKEAAAKATLNIEDEHRLHETSKEPDVSLGSTWLSDFPQAWAETGGMGLAVRQAPLIIPLKATSTPVSIKQYPMSQEARLGIKPHIQRLLDQGILVPCQS | |
| | PWNTPLLPVKKPGTNDYRPVQDLREVNKRVEDIHPTVPNPYNLLSGLPPSHQWYTVLDLKDAFFCLRLHPTSQPLFAFEWRDPEMGISGQLTWTRLPQGF | |
| | KNSPTLFNEALHRDLADFRIQHPDLILLQYVDDLLLAATSELDCQQGTRALLQTLGNLGYRASAKKAQICQKQVKYLGYLLKEGQRWLTEARKETVMGQPTP | |
| | KTPRQLREFLGKAGFCRLFIPGFAEMAAPLYPLTKPGTLFNWGPDQQKAYQEIKQALLTAPALGLPDLTKPFELFVDEKQGYAKGVLTQKLGPWRRPVAYLS | |
| | KKLDPVAAGWPPCLRMVAAIAVLTKDAGKLTMGQPLVILAPHAVEALVKQPPDRWLSNARMTHYQALLLDTDRVQFGPVVALNPATLLPLPEEGLQHNC | |
| | LDILAEAHGTRPDLTDQPLPDADHTWYTDGSSLLQEGQRKAGAAVTTETEVIWAKALPAGTSAQRAELIALTQALKMAEGKKLNVYTDSRYAFATAHIHGEI | |
| | YRRRGWLTSEGKEIKNKDEILALLKALFLPKRLSIIHCPGHQKGHSAEARGNRMADQAARKAAITETPDTSTLLKRTADGSEFESPKKKAKVE | |
| PL12030 | MPAAKRVKLDGGDKKYSIGLDIGTNSVGWAVITDEYKVPSKKFKVLGNTDRHSIKKNLIGALLFDSGETAEATRLKRTARRRYTRRKNRICYLQEIFSNEMAKV | 16,090 |
| | DDSFFHRLEESFLVEEDKKHERHPIFGNIVDEVAYHEKYPTIYHLRKKLVDSTDKADLRLIYLALAHMIKFRGHFLIEGDLNPDNSDVDKLFIQLVQTYNQLFEE | |
| | NPINASGVDAKAILSARLSKSRRLENLIAQLPGEKKNGLFGNLIALSLGLTPNFKSNFDLAEDAKLQLSKDTYDDDLDNLLAQIGDQYADLFLAAKNLSDAILLS | |
| | DILRVNTEITKAPLSASMIKRYDEHHQDLTLLKALVRQQLPEKYKEIFFDQSKNGYAGYIDGGASQEEFYKFIKPILEKMDGTEELLVKLNREDLLRKQRTFDNG | |
| | SIPHQIHLGELHAILRRQEDFYPFLKDNREKIEKILTFRIPYYVGPLARGNSRFAWMTRKSEETITPWNFEEVVDKGASAQSFIERMTNFDKNLPNEKVLPKHSL | |
| | LYEYFTVYNELTKVKYVTEGMRKPAFLSGEQKKAIVDLLFKTNRKVTVKQLKEDYFKKIECFDSVEISGVEDRFNASLGTYHDLLKIIKDKDFLDNEENEDILEDIV | |
| | LTLTLFEDREMIEERLKTYAHLFDDKVMKQLKRRRYTGWGRLSRKLINGIRDKQSGKTILDFLKSDGFANRNFMQLIHDDSLTFKEDIQKAQVSGQGDSLHE | |
| | HIANLAGSPAIKKGILQTVKVVDELVKVMGRHKPENIVIEMARENQTTQKGQKNSRERMKRIEEGIKELGSQILKEHPVENTQLQNEKLYLYYLQNGRDMYV | |
| | DQELDINRLSDYDVDHIVPQSFLKDDSIDNKVLTRSDKARGKSDNVPSEEVVKKMKNYWRQLLNAKLITQRKFDNLTKAERGGLSELDKAGFIKRQLVETRQI | |
| | TKHVAQILDSRMNTKYDENDKLIREVKVITLKSKLVSDFRKDFQFYKVREINNYHHAHDAYLNAVVGTALIKKYPKLESEFVYGDYKVYDVRKMIAKSEQEIGK | |
| | ATAKYFFYSNIMNFFKTEITLANGEIRKRPLIETNGETGEIVWDKGRDFATVRKVLSMPQVNIVKKTEVQTGGFSKESILPKRNSDKLIARKKDWDPKKYGGFD | |
| | SPTVAYSVLVVAKVEKGKSKKLKSVKELLGITIMERSSFEKNPIDFLEAKGYKEVKKDLIIKLPKYSLFELENGRKRMLASAGELQKGNELALPSKYVNFLYLASHY | |
| | EKLKGSPEDNEQKQLFVEQHKHYLDEIIEQISEFSKRVILADANLDKVLSAYNKHRDKPIREQAENIIHLFTLTNLGAPAAFKYFDTTIDRKRYTSTKEVLDATLIH | |
| | QSITGLYETRIDLSQLGGDGSSGGGEAAAKMASNFTQFVLVDNGGTGDVTVAPSNFANGIAEWISSNSRSQAYKVTCSVRQSSAQNRKYTIKVEVPKGAW | |
| | RSYLNMELTIPIFATNSDCELIVKAMQGLLKDGNPIPSAIAANSGIYGGSGGSMASNFTQFVLVDNGGTGDVTVAPSNFANGIAEWISSNSRSQAYKVTCSV | |
| | RQSSAQNRKYTIKVEVPKGAWRSYLNMELTIPIFATNSDCELIVKAMQGLLKDGNPIPSAIAANSGIYSGGSSGGSSGSETPGTSESATPESSGGSSGGSSTLNI | |
| | EDEHRLHETSKEPDVSLGSTWLSDFPQAWAETGGMGLAVRQAPLIIPLKATSTPVSIKQYPMSQEARLGIKPHIQRLLDQGILVPCQSPWNTPLLPVKKPGT | |
| | NDYRPVQDLREVNKRVEDIHPTVPNPYNLLSGLPPSHQWYTVLDLKDAFFCLRLHPTSQPLFAFEWRDPEMGISGQLTWTRLPQGFKNSPTLFNEALHRDL | |
| | ADFRIQHPDLILLQYVDDLLLAATSELDCQQGTRALLQTLGNLGYRASAKKAQICQKQVKYLGYLLKEGQRWLTEARKETVMGQPTPKTPRQLREFLGKAGF | |
| | CRLFIPGFAEMAAPLYPLTKPGTLFNWGPDQQKAYQEIKQALLTAPALGLPDLTKPFELFVDEKQGYAKGVLTQKLGPWRRPVAYLSKKLDPVAAGWPPCL | |
| | RMVAAIAVLTKDAGKLTMGQPLVILAPHAVEALVKQPPDRWLSNARMTHYQALLLDTDRVQFGPVVALNPATLLPLPEEGLQHNCLDILAEAHGTRPDLT | |
| | DQPLPDADHTWYTDGSSLLQEGQRKAGAAVTTETEVIWAKALPAGTSAQRAELIALTQALKMAEGKKLNVYTDSRYAFATAHIHGEIYRRRGWLTSEGKEI | |
| | KNKDEILALLKALFLPKRLSIIHCPGHQKGHSAEARGNRMADQAARKAAITETPDTSTLLKRTADGSEFESPKKKAKVE | |
| PL12031 | MPAAKRVKLDGGDKKYSIGLDIGTNSVGWAVITDEYKVPSKKFKVLGNTDRHSIKKNLIGALLFDSGETAEATRLKRTARRRYTRRKNRICYLQEIFSNEMAKV | 16,091 |
| | DDSFFHRLEESFLVEEDKKHERHPIFGNIVDEVAYHEKYPTIYHLRKKLVDSTDKADLRLIYLALAHMIKFRGHFLIEGDLNPDNSDVDKLFIQLVQTYNQLFEE | |
| | NPINASGVDAKAILSARLSKSRRLENLIAQLPGEKKNGLFGNLIALSLGLTPNFKSNFDLAEDAKLQLSKDTYDDDLDNLLAQIGDQYADLFLAAKNLSDAILLS | |
| | DILRVNTEITKAPLSASMIKRYDEHHQDLTLLKALVRQQLPEKYKEIFFDQSKNGYAGYIDGGASQEEFYKFIKPILEKMDGTEELLVKLNREDLLRKQRTFDNG | |
| | SIPHQIHLGELHAILRRQEDFYPFLKDNREKIEKILTFRIPYYVGPLARGNSRFAWMTRKSEETITPWNFEEVVDKGASAQSFIERMTNFDKNLPNEKVLPKHSL | |
| | LYEYFTVYNELTKVKYVTEGMRKPAFLSGEQKKAIVDLLFKTNRKVTVKQLKEDYFKKIECFDSVEISGVEDRFNASLGTYHDLLKIIKDKDFLDNEENEDILEDIV | |
| | LTLTLFEDREMIEERLKTYAHLFDDKVMKQLKRRRYTGWGRLSRKLINGIRDKQSGKTILDFLKSDGFANRNFMQLIHDDSLTFKEDIQKAQVSGQGDSLHE | |
| | HIANLAGSPAIKKGILQTVKVVDELVKVMGRHKPENIVIEMARENQTTQKGQKNSRERMKRIEEGIKELGSQILKEHPVENTQLQNEKLYLYYLQNGRDMYV | |
| | DQELDINRLSDYDVDHIVPQSFLKDDSIDNKVLTRSDKARGKSDNVPSEEVVKKMKNYWRQLLNAKLITQRKFDNLTKAERGGLSELDKAGFIKRQLVETRQI | |
| | TKHVAQILDSRMNTKYDENDKLIREVKVITLKSKLVSDFRKDFQFYKVREINNYHHAHDAYLNAVVGTALIKKYPKLESEFVYGDYKVYDVRKMIAKSEQEIGK | |
| | ATAKYFFYSNIMNFFKTEITLANGEIRKRPLIETNGETGEIVWDKGRDFATVRKVLSMPQVNIVKKTEVQTGGFSKESILPKRNSDKLIARKKDWDPKKYGGFD | |
| | SPTVAYSVLVVAKVEKGKSKKLKSVKELLGITIMERSSFEKNPIDFLEAKGYKEVKKDLIIKLPKYSLFELENGRKRMLASAGELQKGNELALPSKYVNFLYLASHY | |
| | EKLKGSPEDNEQKQLFVEQHKHYLDEIIEQISEFSKRVILADANLDKVLSAYNKHRDKPIREQAENIIHLFTLTNLGAPAAFKYFDTTIDRKRYTSTKEVLDATLIH | |
| | QSITGLYETRIDLSQLGGDGSSGGGEAAAKMASNFTQFVLVDNGGTGDVTVAPSNFANGIAEWISSNSRSQAYKVTCSVRQSSAQNRKYTIKVEVPKGAW | |
| | RSYLNMELTIPIFATNSDCELIVKAMQGLLKDGNPIPSAIAANSGIYGGSGGSMASNFTQFVLVDNGGTGDVTVAPSNFANGIAEWISSNSRSQAYKVTCSV | |
| | RQSSAQNRKYTIKVEVPKGAWRSYLNMELTIPIFATNSDCELIVKAMQGLLKDGNPIPSAIAANSGIYGSSGSSGSSGSSGSSGSSTLNIEDEHRLHETSKEPDV | |
| | SLGSTWLSDFPQAWAETGGMGLAVRQAPLIIPLKATSTPVSIKQYPMSQEARLGIKPHIQRLLDQGILVPCQSPWNTPLLPVKKPGTNDYRPVQDLREVNK | |
| | RVEDIHPTVPNPYNLLSGLPPSHQWYTVLDLKDAFFCLRLHPTSQPLFAFEWRDPEMGISGQLTWTRLPQGFKNSPTLFNEALHRDLADFRIQHPDLILLQY | |
| | VDDLLLAATSELDCQQGTRALLQTLGNLGYRASAKKAQICQKQVKYLGYLLKEGQRWLTEARKETVMGQPTPKTPRQLREFLGKAGFCRLFIPGFAEMAAP | |
| | LYPLTKPGTLFNWGPDQQKAYQEIKQALLTAPALGLPDLTKPFELFVDEKQGYAKGVLTQKLGPWRRPVAYLSKKLDPVAAGWPPCLRMVAAIAVLTKDAG | |
| | KLTMGQPLVILAPHAVEALVKQPPDRWLSNARMTHYQALLLDTDRVQFGPVVALNPATLLPLPEEGLQHNCLDILAEAHGTRPDLTDQPLPDADHTWYTD | |
| | GSSLLQEGQRKAGAAVTTETEVIWAKALPAGTSAQRAELIALTQALKMAEGKKLNVYTDSRYAFATAHIHGEIYRRRGWLTSEGKEIKNKDEILALLKALFLPK | |
| | RLSIIHCPGHQKGHSAEARGNRMADQAARKAAITETPDTSTLLKRTADGSEFESPKKKAKVE | |
| PL12032 | MPAAKRVKLDGGDKKYSIGLDIGTNSVGWAVITDEYKVPSKKFKVLGNTDRHSIKKNLIGALLFDSGETAEATRLKRTARRRYTRRKNRICYLQEIFSNEMAKV | 16,092 |
| | DDSFFHRLEESFLVEEDKKHERHPIFGNIVDEVAYHEKYPTIYHLRKKLVDSTDKADLRLIYLALAHMIKFRGHFLIEGDLNPDNSDVDKLFIQLVQTYNQLFEE | |
| | NPINASGVDAKAILSARLSKSRRLENLIAQLPGEKKNGLFGNLIALSLGLTPNFKSNFDLAEDAKLQLSKDTYDDDLDNLLAQIGDQYADLFLAAKNLSDAILLS | |
| | DILRVNTEITKAPLSASMIKRYDEHHQDLTLLKALVRQQLPEKYKEIFFDQSKNGYAGYIDGGASQEEFYKFIKPILEKMDGTEELLVKLNREDLLRKQRTFDNG | |
| | SIPHQIHLGELHAILRRQEDFYPFLKDNREKIEKILTFRIPYYVGPLARGNSRFAWMTRKSEETITPWNFEEVVDKGASAQSFIERMTNFDKNLPNEKVLPKHSL | |
| | LYEYFTVYNELTKVKYVTEGMRKPAFLSGEQKKAIVDLLFKTNRKVTVKQLKEDYFKKIECFDSVEISGVEDRFNASLGTYHDLLKIIKDKDFLDNEENEDILEDIV | |
| | LTLTLFEDREMIEERLKTYAHLFDDKVMKQLKRRRYTGWGRLSRKLINGIRDKQSGKTILDFLKSDGFANRNFMQLIHDDSLTFKEDIQKAQVSGQGDSLHE | |
| | HIANLAGSPAIKKGILQTVKVVDELVKVMGRHKPENIVIEMARENQTTQKGQKNSRERMKRIEEGIKELGSQILKEHPVENTQLQNEKLYLYYLQNGRDMYV | |
| | DQELDINRLSDYDVDHIVPQSFLKDDSIDNKVLTRSDKARGKSDNVPSEEVVKKMKNYWRQLLNAKLITQRKFDNLTKAERGGLSELDKAGFIKRQLVETRQI | |
| | TKHVAQILDSRMNTKYDENDKLIREVKVITLKSKLVSDFRKDFQFYKVREINNYHHAHDAYLNAVVGTALIKKYPKLESEFVYGDYKVYDVRKMIAKSEQEIGK | |
| | ATAKYFFYSNIMNFFKTEITLANGEIRKRPLIETNGETGEIVWDKGRDFATVRKVLSMPQVNIVKKTEVQTGGFSKESILPKRNSDKLIARKKDWDPKKYGGFD | |
| | SPTVAYSVLVVAKVEKGKSKKLKSVKELLGITIMERSSFEKNPIDFLEAKGYKEVKKDLIIKLPKYSLFELENGRKRMLASAGELQKGNELALPSKYVNFLYLASHY | |
| | EKLKGSPEDNEQKQLFVEQHKHYLDEIIEQISEFSKRVILADANLDKVLSAYNKHRDKPIREQAENIIHLFTLTNLGAPAAFKYFDTTIDRKRYTSTKEVLDATLIH | |
| | QSITGLYETRIDLSQLGGDGSSGGGEAAAKMASNFTQFVLVDNGGTGDVTVAPSNFANGIAEWISSNSRSQAYKVTCSVRQSSAQNRKYTIKVEVPKGAW | |
| | RSYLNMELTIPIFATNSDCELIVKAMQGLLKDGNPIPSAIAANSGIYGGSGGSMASNFTQFVLVDNGGTGDVTVAPSNFANGIAEWISSNSRSQAYKVTCSV | |
| | RQSSAQNRKYTIKVEVPKGAWRSYLNMELTIPIFATNSDCELIVKAMQGLLKDGNPIPSAIAANSGIYGSSGGGEAAAKTLNIEDEHRLHETSKEPDVSLGST | |
| | WLSDFPQAWAETGGMGLAVRQAPLIIPLKATSTPVSIKQYPMSQEARLGIKPHIQRLLDQGILVPCQSPWNTPLLPVKKPGTNDYRPVQDLREVNKRVEDI | |
| | HPTVPNPYNLLSGLPPSHQWYTVLDLKDAFFCLRLHPTSQPLFAFEWRDPEMGISGQLTWTRLPQGFKNSPTLFNEALHRDLADFRIQHPDLILLQYVDDLL | |
| | LAATSELDCQQGTRALLQTLGNLGYRASAKKAQICQKQVKYLGYLLKEGQRWLTEARKETVMGQPTPKTPRQLREFLGKAGFCRLFIPGFAEMAAPLYPLTK | |
| | PGTLFNWGPDQQKAYQEIKQALLTAPALGLPDLTKPFELFVDEKQGYAKGVLTQKLGPWRRPVAYLSKKLDPVAAGWPPCLRMVAAIAVLTKDAGKLTM | |
| | GQPLVILAPHAVEALVKQPPDRWLSNARMTHYQALLLDTDRVQFGPVVALNPATLLPLPEEGLQHNCLDILAEAHGTRPDLTDQPLPDADHTWYTDGSSL | |
| | LQEGQRKAGAAVTTETEVIWAKALPAGTSAQRAELIALTQALKMAEGKKLNVYTDSRYAFATAHIHGEIYRRRGWLTSEGKEIKNKDEILALLKALFLPKRLSII | |
| | HCPGHQKGHSAEARGNRMADQAARKAAITETPDTSTLLKRTADGSEFESPKKKAKVE | |
| PL12033 | MPAAKRVKLDGGDKKYSIGLDIGTNSVGWAVITDEYKVPSKKFKVLGNTDRHSIKKNLIGALLFDSGETAEATRLKRTARRRYTRRKNRICYLQEIFSNEMAKV | 16,093 |
| | DDSFFHRLEESFLVEEDKKHERHPIFGNIVDEVAYHEKYPTIYHLRKKLVDSTDKADLRLIYLALAHMIKFRGHFLIEGDLNPDNSDVDKLFIQLVQTYNQLFEE | |
| | NPINASGVDAKAILSARLSKSRRLENLIAQLPGEKKNGLFGNLIALSLGLTPNFKSNFDLAEDAKLQLSKDTYDDDLDNLLAQIGDQYADLFLAAKNLSDAILLS | |
| | DILRVNTEITKAPLSASMIKRYDEHHQDLTLLKALVRQQLPEKYKEIFFDQSKNGYAGYIDGGASQEEFYKFIKPILEKMDGTEELLVKLNREDLLRKQRTFDNG | |
| | SIPHQIHLGELHAILRRQEDFYPFLKDNREKIEKILTFRIPYYVGPLARGNSRFAWMTRKSEETITPWNFEEVVDKGASAQSFIERMTNFDKNLPNEKVLPKHSL | |
| | LYEYFTVYNELTKVKYVTEGMRKPAFLSGEQKKAIVDLLFKTNRKVTVKQLKEDYFKKIECFDSVEISGVEDRFNASLGTYHDLLKIIKDKDFLDNEENEDILEDIV | |
| | LTLTLFEDREMIEERLKTYAHLFDDKVMKQLKRRRYTGWGRLSRKLINGIRDKQSGKTILDFLKSDGFANRNFMQLIHDDSLTFKEDIQKAQVSGQGDSLHE | |
| | HIANLAGSPAIKKGILQTVKVVDELVKVMGRHKPENIVIEMARENQTTQKGQKNSRERMKRIEEGIKELGSQILKEHPVENTQLQNEKLYLYYLQNGRDMYV | |
| | DQELDINRLSDYDVDHIVPQSFLKDDSIDNKVLTRSDKARGKSDNVPSEEVVKKMKNYWRQLLNAKLITQRKFDNLTKAERGGLSELDKAGFIKRQLVETRQI | |
| | TKHVAQILDSRMNTKYDENDKLIREVKVITLKSKLVSDFRKDFQFYKVREINNYHHAHDAYLNAVVGTALIKKYPKLESEFVYGDYKVYDVRKMIAKSEQEIGK | |
| | ATAKYFFYSNIMNFFKTEITLANGEIRKRPLIETNGETGEIVWDKGRDFATVRKVLSMPQVNIVKKTEVQTGGFSKESILPKRNSDKLIARKKDWDPKKYGGFD | |
| | SPTVAYSVLVVAKVEKGKSKKLKSVKELLGITIMERSSFEKNPIDFLEAKGYKEVKKDLIIKLPKYSLFELENGRKRMLASAGELQKGNELALPSKYVNFLYLASHY | |
| | EKLKGSPEDNEQKQLFVEQHKHYLDEIIEQISEFSKRVILADANLDKVLSAYNKHRDKPIREQAENIIHLFTLTNLGAPAAFKYFDTTIDRKRYTSTKEVLDATLIH | |
| | QSITGLYETRIDLSQLGGDGSSGGGEAAAKMASNFTQFVLVDNGGTGDVTVAPSNFANGIAEWISSNSRSQAYKVTCSVRQSSAQNRKYTIKVEVPKGAW | |
| | RSYLNMELTIPIFATNSDCELIVKAMQGLLKDGNPIPSAIAANSGIYGGSGGSMASNFTQFVLVDNGGTGDVTVAPSNFANGIAEWISSNSRSQAYKVTCSV | |
| | RQSSAQNRKYTIKVEVPKGAWRSYLNMELTIPIFATNSDCELIVKAMQGLLKDGNPIPSAIAANSGIYGGGSGGGSGGGSGGGSMASNFTQFVLVDNGGT | |
| | GDVTVAPSNFANGIAEWISSNSRSQAYKVTCSVRQSSAQNRKYTIKVEVPKGAWRSYLNMELTIPIFATNSDCELIVKAMQGLLKDGNPIPSAIAANSGIYGG | |
| | SGGSMASNFTQFVLVDNGGTGDVTVAPSNFANGIAEWISSNSRSQAYKVTCSVRQSSAQNRKYTIKVEVPKGAWRSYLNMELTIPIFATNSDCELIVKAMQ | |
| | GLLKDGNPIPSAIAANSGIYAEAAAKEAAAKEAAAKEAAAKALEAEAAAKEAAAKEAAAKEAAAKATLNIEDEHRLHETSKEPDVSLGSTWLSDFPQAWAET | |
| | GGMGLAVRQAPLIIPLKATSTPVSIKQYPMSQEARLGIKPHIQRLLDQGILVPCQSPWNTPLLPVKKPGTNDYRPVQDLREVNKRVEDIHPTVPNPYNLLSGL | |
| | PPSHQWYTVLDLKDAFFCLRLHPTSQPLFAFEWRDPEMGISGQLTWTRLPQGFKNSPTLFNEALHRDLADFRIQHPDLILLQYVDDLLLAATSELDCQQGTR | |
| | ALLQTLGNLGYRASAKKAQICQKQVKYLGYLLKEGQRWLTEARKETVMGQPTPKTPRQLREFLGKAGFCRLFIPGFAEMAAPLYPLTKPGTLFNWGPDQQK | |
| | AYQEIKQALLTAPALGLPDLTKPFELFVDEKQGYAKGVLTQKLGPWRRPVAYLSKKLDPVAAGWPPCLRMVAAIAVLTKDAGKLTMGQPLVILAPHAVEAL | |
| | VKQPPDRWLSNARMTHYQALLLDTDRVQFGPVVALNPATLLPLPEEGLQHNCLDILAEAHGTRPDLTDQPLPDADHTWYTDGSSLLQEGQRKAGAAVTT | |
| | ETEVIWAKALPAGTSAQRAELIALTQALKMAEGKKLNVYTDSRYAFATAHIHGEIYRRRGWLTSEGKEIKNKDEILALLKALFLPKRLSIIHCPGHQKGHSAEAR | |
| | GNRMADQAARKAAITETPDTSTLLKRTADGSEFESPKKKAKVE | |
| PL12034 | MPAAKRVKLDGGDKKYSIGLDIGTNSVGWAVITDEYKVPSKKFKVLGNTDRHSIKKNLIGALLFDSGETAEATRLKRTARRRYTRRKNRICYLQEIFSNEMAKV | 16,094 |
| | DDSFFHRLEESFLVEEDKKHERHPIFGNIVDEVAYHEKYPTIYHLRKKLVDSTDKADLRLIYLALAHMIKFRGHFLIEGDLNPDNSDVDKLFIQLVQTYNQLFEE | |
| | NPINASGVDAKAILSARLSKSRRLENLIAQLPGEKKNGLFGNLIALSLGLTPNFKSNFDLAEDAKLQLSKDTYDDDLDNLLAQIGDQYADLFLAAKNLSDAILLS | |
| | DILRVNTEITKAPLSASMIKRYDEHHQDLTLLKALVRQQLPEKYKEIFFDQSKNGYAGYIDGGASQEEFYKFIKPILEKMDGTEELLVKLNREDLLRKQRTFDNG | |
| | SIPHQIHLGELHAILRRQEDFYPFLKDNREKIEKILTFRIPYYVGPLARGNSRFAWMTRKSEETITPWNFEEVVDKGASAQSFIERMTNFDKNLPNEKVLPKHSL | |
| | LYEYFTVYNELTKVKYVTEGMRKPAFLSGEQKKAIVDLLFKTNRKVTVKQLKEDYFKKIECFDSVEISGVEDRFNASLGTYHDLLKIIKDKDFLDNEENEDILEDIV | |
| | LTLTLFEDREMIEERLKTYAHLFDDKVMKQLKRRRYTGWGRLSRKLINGIRDKQSGKTILDFLKSDGFANRNFMQLIHDDSLTFKEDIQKAQVSGQGDSLHE | |
| | HIANLAGSPAIKKGILQTVKVVDELVKVMGRHKPENIVIEMARENQTTQKGQKNSRERMKRIEEGIKELGSQILKEHPVENTQLQNEKLYLYYLQNGRDMYV | |
| | DQELDINRLSDYDVDHIVPQSFLKDDSIDNKVLTRSDKARGKSDNVPSEEVVKKMKNYWRQLLNAKLITQRKFDNLTKAERGGLSELDKAGFIKRQLVETRQI | |
| | TKHVAQILDSRMNTKYDENDKLIREVKVITLKSKLVSDFRKDFQFYKVREINNYHHAHDAYLNAVVGTALIKKYPKLESEFVYGDYKVYDVRKMIAKSEQEIGK | |
| | ATAKYFFYSNIMNFFKTEITLANGEIRKRPLIETNGETGEIVWDKGRDFATVRKVLSMPQVNIVKKTEVQTGGFSKESILPKRNSDKLIARKKDWDPKKYGGFD | |
| | SPTVAYSVLVVAKVEKGKSKKLKSVKELLGITIMERSSFEKNPIDFLEAKGYKEVKKDLIIKLPKYSLFELENGRKRMLASAGELQKGNELALPSKYVNFLYLASHY | |
| | EKLKGSPEDNEQKQLFVEQHKHYLDEIIEQISEFSKRVILADANLDKVLSAYNKHRDKPIREQAENIIHLFTLTNLGAPAAFKYFDTTIDRKRYTSTKEVLDATLIH | |
| | QSITGLYETRIDLSQLGGDGSSGGGEAAAKMASNFTQFVLVDNGGTGDVTVAPSNFANGIAEWISSNSRSQAYKVTCSVRQSSAQNRKYTIKVEVPKGAW | |
| | RSYLNMELTIPIFATNSDCELIVKAMQGLLKDGNPIPSAIAANSGIYGGSGGSMASNFTQFVLVDNGGTGDVTVAPSNFANGIAEWISSNSRSQAYKVTCSV | |
| | RQSSAQNRKYTIKVEVPKGAWRSYLNMELTIPIFATNSDCELIVKAMQGLLKDGNPIPSAIAANSGIYGGGSGGGSGGGSGGGSMASNFTQFVLVDNGGT | |
| | GDVTVAPSNFANGIAEWISSNSRSQAYKVTCSVRQSSAQNRKYTIKVEVPKGAWRSYLNMELTIPIFATNSDCELIVKAMQGLLKDGNPIPSAIAANSGIYGG | |
| | SGGSMASNFTQFVLVDNGGTGDVTVAPSNFANGIAEWISSNSRSQAYKVTCSVRQSSAQNRKYTIKVEVPKGAWRSYLNMELTIPIFATNSDCELIVKAMQ | |
| | GLLKDGNPIPSAIAANSGIYSGGSSGGSSGSETPGTSESATPESSGGSSGGSSTLNIEDEHRLHETSKEPDVSLGSTWLSDFPQAWAETGGMGLAVRQAPLIIP | |
| | LKATSTPVSIKQYPMSQEARLGIKPHIQRLLDQGILVPCQSPWNTPLLPVKKPGTNDYRPVQDLREVNKRVEDIHPTVPNPYNLLSGLPPSHQWYTVLDLKD | |
| | AFFCLRLHPTSQPLFAFEWRDPEMGISGQLTWTRLPQGFKNSPTLFNEALHRDLADFRIQHPDLILLQYVDDLLLAATSELDCQQGTRALLQTLGNLGYRAS | |
| | AKKAQICQKQVKYLGYLLKEGQRWLTEARKETVMGQPTPKTPRQLREFLGKAGFCRLFIPGFAEMAAPLYPLTKPGTLFNWGPDQQKAYQEIKQALLTAPA | |
| | LGLPDLTKPFELFVDEKQGYAKGVLTQKLGPWRRPVAYLSKKLDPVAAGWPPCLRMVAAIAVLTKDAGKLTMGQPLVILAPHAVEALVKQPPDRWLSNAR | |
| | MTHYQALLLDTDRVQFGPVVALNPATLLPLPEEGLQHNCLDILAEAHGTRPDLTDQPLPDADHTWYTDGSSLLQEGQRKAGAAVTTETEVIWAKALPAGT | |
| | SAQRAELIALTQALKMAEGKKLNVYTDSRYAFATAHIHGEIYRRRGWLTSEGKEIKNKDEILALLKALFLPKRLSIIHCPGHQKGHSAEARGNRMADQAARKA | |
| | AITETPDTSTLLKRTADGSEFESPKKKAKVE | |
| PL12035 | MPAAKRVKLDGGDKKYSIGLDIGTNSVGWAVITDEYKVPSKKFKVLGNTDRHSIKKNLIGALLFDSGETAEATRLKRTARRRYTRRKNRICYLQEIFSNEMAKV | 16,095 |
| | DDSFFHRLEESFLVEEDKKHERHPIFGNIVDEVAYHEKYPTIYHLRKKLVDSTDKADLRLIYLALAHMIKFRGHFLIEGDLNPDNSDVDKLFIQLVQTYNQLFEE | |
| | NPINASGVDAKAILSARLSKSRRLENLIAQLPGEKKNGLFGNLIALSLGLTPNFKSNFDLAEDAKLQLSKDTYDDDLDNLLAQIGDQYADLFLAAKNLSDAILLS | |
| | DILRVNTEITKAPLSASMIKRYDEHHQDLTLLKALVRQQLPEKYKEIFFDQSKNGYAGYIDGGASQEEFYKFIKPILEKMDGTEELLVKLNREDLLRKQRTFDNG | |
| | SIPHQIHLGELHAILRRQEDFYPFLKDNREKIEKILTFRIPYYVGPLARGNSRFAWMTRKSEETITPWNFEEVVDKGASAQSFIERMTNFDKNLPNEKVLPKHSL | |
| | LYEYFTVYNELTKVKYVTEGMRKPAFLSGEQKKAIVDLLFKTNRKVTVKQLKEDYFKKIECFDSVEISGVEDRFNASLGTYHDLLKIIKDKDFLDNEENEDILEDIV | |
| | LTLTLFEDREMIEERLKTYAHLFDDKVMKQLKRRRYTGWGRLSRKLINGIRDKQSGKTILDFLKSDGFANRNFMQLIHDDSLTFKEDIQKAQVSGQGDSLHE | |
| | HIANLAGSPAIKKGILQTVKVVDELVKVMGRHKPENIVIEMARENQTTQKGQKNSRERMKRIEEGIKELGSQILKEHPVENTQLQNEKLYLYYLQNGRDMYV | |
| | DQELDINRLSDYDVDHIVPQSFLKDDSIDNKVLTRSDKARGKSDNVPSEEVVKKMKNYWRQLLNAKLITQRKFDNLTKAERGGLSELDKAGFIKRQLVETRQI | |
| | TKHVAQILDSRMNTKYDENDKLIREVKVITLKSKLVSDFRKDFQFYKVREINNYHHAHDAYLNAVVGTALIKKYPKLESEFVYGDYKVYDVRKMIAKSEQEIGK | |
| | ATAKYFFYSNIMNFFKTEITLANGEIRKRPLIETNGETGEIVWDKGRDFATVRKVLSMPQVNIVKKTEVQTGGFSKESILPKRNSDKLIARKKDWDPKKYGGFD | |
| | SPTVAYSVLVVAKVEKGKSKKLKSVKELLGITIMERSSFEKNPIDFLEAKGYKEVKKDLIIKLPKYSLFELENGRKRMLASAGELQKGNELALPSKYVNFLYLASHY | |
| | EKLKGSPEDNEQKQLFVEQHKHYLDEIIEQISEFSKRVILADANLDKVLSAYNKHRDKPIREQAENIIHLFTLTNLGAPAAFKYFDTTIDRKRYTSTKEVLDATLIH | |
| | QSITGLYETRIDLSQLGGDGSSGGGEAAAKMASNFTQFVLVDNGGTGDVTVAPSNFANGIAEWISSNSRSQAYKVTCSVRQSSAQNRKYTIKVEVPKGAW | |
| | RSYLNMELTIPIFATNSDCELIVKAMQGLLKDGNPIPSAIAANSGIYGGSGGSMASNFTQFVLVDNGGTGDVTVAPSNFANGIAEWISSNSRSQAYKVTCSV | |
| | RQSSAQNRKYTIKVEVPKGAWRSYLNMELTIPIFATNSDCELIVKAMQGLLKDGNPIPSAIAANSGIYGGGSGGGSGGGSGGGSMASNFTQFVLVDNGGT | |
| | GDVTVAPSNFANGIAEWISSNSRSQAYKVTCSVRQSSAQNRKYTIKVEVPKGAWRSYLNMELTIPIFATNSDCELIVKAMQGLLKDGNPIPSAIAANSGIYGG | |
| | SGGSMASNFTQFVLVDNGGTGDVTVAPSNFANGIAEWISSNSRSQAYKVTCSVRQSSAQNRKYTIKVEVPKGAWRSYLNMELTIPIFATNSDCELIVKAMQ | |
| | GLLKDGNPIPSAIAANSGIYGSSGSSGSSGSSGSSGSSTLNIEDEHRLHETSKEPDVSLGSTWLSDFPQAWAETGGMGLAVRQAPLIIPLKATSTPVSIKQYPM | |
| | SQEARLGIKPHIQRLLDQGILVPCQSPWNTPLLPVKKPGTNDYRPVQDLREVNKRVEDIHPTVPNPYNLLSGLPPSHQWYTVLDLKDAFFCLRLHPTSQPLFA | |
| | FEWRDPEMGISGQLTWTRLPQGFKNSPTLFNEALHRDLADFRIQHPDLILLQYVDDLLLAATSELDCQQGTRALLQTLGNLGYRASAKKAQICQKQVKYLGY | |
| | LLKEGQRWLTEARKETVMGQPTPKTPRQLREFLGKAGFCRLFIPGFAEMAAPLYPLTKPGTLFNWGPDQQKAYQEIKQALLTAPALGLPDLTKPFELFVDEK | |
| | QGYAKGVLTQKLGPWRRPVAYLSKKLDPVAAGWPPCLRMVAAIAVLTKDAGKLTMGQPLVILAPHAVEALVKQPPDRWLSNARMTHYQALLLDTDRVQ | |
| | FGPVVALNPATLLPLPEEGLQHNCLDILAEAHGTRPDLTDQPLPDADHTWYTDGSSLLQEGQRKAGAAVTTETEVIWAKALPAGTSAQRAELIALTQALKM | |
| | AEGKKLNVYTDSRYAFATAHIHGEIYRRRGWLTSEGKEIKNKDEILALLKALFLPKRLSIIHCPGHQKGHSAEARGNRMADQAARKAAITETPDTSTLLKRTAD | |
| | GSEFESPKKKAKVE | |
| PL12036 | MPAAKRVKLDGGDKKYSIGLDIGTNSVGWAVITDEYKVPSKKFKVLGNTDRHSIKKNLIGALLFDSGETAEATRLKRTARRRYTRRKNRICYLQEIFSNEMAKV | 16,096 |
| | DDSFFHRLEESFLVEEDKKHERHPIFGNIVDEVAYHEKYPTIYHLRKKLVDSTDKADLRLIYLALAHMIKFRGHFLIEGDLNPDNSDVDKLFIQLVQTYNQLFEE | |
| | NPINASGVDAKAILSARLSKSRRLENLIAQLPGEKKNGLFGNLIALSLGLTPNFKSNFDLAEDAKLQLSKDTYDDDLDNLLAQIGDQYADLFLAAKNLSDAILLS | |
| | DILRVNTEITKAPLSASMIKRYDEHHQDLTLLKALVRQQLPEKYKEIFFDQSKNGYAGYIDGGASQEEFYKFIKPILEKMDGTEELLVKLNREDLLRKQRTFDNG | |
| | SIPHQIHLGELHAILRRQEDFYPFLKDNREKIEKILTFRIPYYVGPLARGNSRFAWMTRKSEETITPWNFEEVVDKGASAQSFIERMTNFDKNLPNEKVLPKHSL | |
| | LYEYFTVYNELTKVKYVTEGMRKPAFLSGEQKKAIVDLLFKTNRKVTVKQLKEDYFKKIECFDSVEISGVEDRFNASLGTYHDLLKIIKDKDFLDNEENEDILEDIV | |
| | LTLTLFEDREMIEERLKTYAHLFDDKVMKQLKRRRYTGWGRLSRKLINGIRDKQSGKTILDFLKSDGFANRNFMQLIHDDSLTFKEDIQKAQVSGQGDSLHE | |
| | HIANLAGSPAIKKGILQTVKVVDELVKVMGRHKPENIVIEMARENQTTQKGQKNSRERMKRIEEGIKELGSQILKEHPVENTQLQNEKLYLYYLQNGRDMYV | |
| | DQELDINRLSDYDVDHIVPQSFLKDDSIDNKVLTRSDKARGKSDNVPSEEVVKKMKNYWRQLLNAKLITQRKFDNLTKAERGGLSELDKAGFIKRQLVETRQI | |
| | TKHVAQILDSRMNTKYDENDKLIREVKVITLKSKLVSDFRKDFQFYKVREINNYHHAHDAYLNAVVGTALIKKYPKLESEFVYGDYKVYDVRKMIAKSEQEIGK | |
| | ATAKYFFYSNIMNFFKTEITLANGEIRKRPLIETNGETGEIVWDKGRDFATVRKVLSMPQVNIVKKTEVQTGGFSKESILPKRNSDKLIARKKDWDPKKYGGFD | |
| | SPTVAYSVLVVAKVEKGKSKKLKSVKELLGITIMERSSFEKNPIDFLEAKGYKEVKKDLIIKLPKYSLFELENGRKRMLASAGELQKGNELALPSKYVNFLYLASHY | |
| | EKLKGSPEDNEQKQLFVEQHKHYLDEIIEQISEFSKRVILADANLDKVLSAYNKHRDKPIREQAENIIHLFTLTNLGAPAAFKYFDTTIDRKRYTSTKEVLDATLIH | |
| | QSITGLYETRIDLSQLGGDGSSGGGEAAAKMASNFTQFVLVDNGGTGDVTVAPSNFANGIAEWISSNSRSQAYKVTCSVRQSSAQNRKYTIKVEVPKGAW | |
| | RSYLNMELTIPIFATNSDCELIVKAMQGLLKDGNPIPSAIAANSGIYGGSGGSMASNFTQFVLVDNGGTGDVTVAPSNFANGIAEWISSNSRSQAYKVTCSV | |
| | RQSSAQNRKYTIKVEVPKGAWRSYLNMELTIPIFATNSDCELIVKAMQGLLKDGNPIPSAIAANSGIYGGGSGGGSGGGSGGGSMASNFTQFVLVDNGGT | |
| | GDVTVAPSNFANGIAEWISSNSRSQAYKVTCSVRQSSAQNRKYTIKVEVPKGAWRSYLNMELTIPIFATNSDCELIVKAMQGLLKDGNPIPSAIAANSGIYGG | |
| | SGGSMASNFTQFVLVDNGGTGDVTVAPSNFANGIAEWISSNSRSQAYKVTCSVRQSSAQNRKYTIKVEVPKGAWRSYLNMELTIPIFATNSDCELIVKAMQ | |
| | GLLKDGNPIPSAIAANSGIYGSSGGGEAAAKTLNIEDEHRLHETSKEPDVSLGSTWLSDFPQAWAETGGMGLAVRQAPLIIPLKATSTPVSIKQYPMSQEARL | |
| | GIKPHIQRLLDQGILVPCQSPWNTPLLPVKKPGTNDYRPVQDLREVNKRVEDIHPTVPNPYNLLSGLPPSHQWYTVLDLKDAFFCLRLHPTSQPLFAFEWRD | |
| | PEMGISGQLTWTRLPQGFKNSPTLFNEALHRDLADFRIQHPDLILLQYVDDLLLAATSELDCQQGTRALLQTLGNLGYRASAKKAQICQKQVKYLGYLLKEG | |
| | QRWLTEARKETVMGQPTPKTPRQLREFLGKAGFCRLFIPGFAEMAAPLYPLTKPGTLFNWGPDQQKAYQEIKQALLTAPALGLPDLTKPFELFVDEKQGYA | |
| | KGVLTQKLGPWRRPVAYLSKKLDPVAAGWPPCLRMVAAIAVLTKDAGKLTMGQPLVILAPHAVEALVKQPPDRWLSNARMTHYQALLLDTDRVQFGPV | |
| | VALNPATLLPLPEEGLQHNCLDILAEAHGTRPDLTDQPLPDADHTWYTDGSSLLQEGQRKAGAAVTTETEVIWAKALPAGTSAQRAELIALTQALKMAEGK | |
| | KLNVYTDSRYAFATAHIHGEIYRRRGWLTSEGKEIKNKDEILALLKALFLPKRLSIIHCPGHQKGHSAEARGNRMADQAARKAAITETPDTSTLLKRTADGSEFE | |
| | SPKKKAKVE | |

TABLE S2
Exemplary gene modifying sequences for Configuration 2 (i.e., RT-linker-(RBP)n-linker-Cas9)

| | | SEQ ID |
|---|---|---|
| Identifier | Full Amino Acid Sequence | NO: |
| PL12037 | MPAAKRVKLDGGTLNIEDEHRLHETSKEPDVSLGSTWLSDFPQAWAETGGMGLAVRQAPLIIPLKATSTPVSIKQYPMSQEARLGIKPHIQRLLDQGILVPCQ | 16,100 |
| | SPWNTPLLPVKKPGTNDYRPVQDLREVNKRVEDIHPTVPNPYNLLSGLPPSHQWYTVLDLKDAFFCLRLHPTSQPLFAFEWRDPEMGISGQLTWTRLPQGF | |
| | KNSPTLFNEALHRDLADFRIQHPDLILLQYVDDLLLAATSELDCQQGTRALLQTLGNLGYRASAKKAQICQKQVKYLGYLLKEGQRWLTEARKETVMGQPTPK | |
| | TPRQLREFLGKAGFCRLFIPGFAEMAAPLYPLTKPGTLFNWGPDQQKAYQEIKQALLTAPALGLPDLTKPFELFVDEKQGYAKGVLTQKLGPWRRPVAYLSKK | |
| | LDPVAAGWPPCLRMVAAIAVLTKDAGKLTMGQPLVILAPHAVEALVKQPPDRWLSNARMTHYQALLLDTDRVQFGPVVALNPATLLPLPEEGLQHNCLDI | |
| | LAEAHGTRPDLTDQPLPDADHTWYTDGSSLLQEGQRKAGAAVTTETEVIWAKALPAGTSAQRAELIALTQALKMAEGKKLNVYTDSRYAFATAHIHGEIYRR | |
| | RGWLTSEGKEIKNKDEILALLKALFLPKRLSIIHCPGHQKGHSAEARGNRMADQAARKAAITETPDTSTLLAEAAAKEAAAKEAAAKEAAAKALEAEAAAKEA | |
| | AAKEAAAKEAAAKAMASNFTQFVLVDNGGTGDVTVAPSNFANGIAEWISSNSRSQAYKVTCSVRQSSAQNRKYTIKVEVPKGAWRSYLNMELTIPIFATNS | |
| | DCELIVKAMQGLLKDGNPIPSAIAANSGIYAEAAAKEAAAKEAAAKEAAAKALEAEAAAKEAAAKEAAAKEAAAKADKKYSIGLDIGTNSVGWAVITDEYKVP | |
| | SKKFKVLGNTDRHSIKKNLIGALLFDSGETAEATRLKRTARRRYTRRKNRICYLQEIFSNEMAKVDDSFFHRLEESFLVEEDKKHERHPIFGNIVDEVAYHEKYPTI | |
| | YHLRKKLVDSTDKADLRLIYLALAHMIKFRGHFLIEGDLNPDNSDVDKLFIQLVQTYNQLFEENPINASGVDAKAILSARLSKSRRLENLIAQLPGEKKNGLFGNL | |
| | IALSLGLTPNFKSNFDLAEDAKLQLSKDTYDDDLDNLLAQIGDQYADLFLAAKNLSDAILLSDILRVNTEITKAPLSASMIKRYDEHHQDLTLLKALVRQQLPEKY | |
| | KEIFFDQSKNGYAGYIDGGASQEEFYKFIKPILEKMDGTEELLVKLNREDLLRKQRTFDNGSIPHQIHLGELHAILRRQEDFYPFLKDNREKIEKILTFRIPYYVGPL | |
| | ARGNSRFAWMTRKSEETITPWNFEEVVDKGASAQSFIERMTNFDKNLPNEKVLPKHSLLYEYFTVYNELTKVKYVTEGMRKPAFLSGEQKKAIVDLLFKTNRK | |
| | VTVKQLKEDYFKKIECFDSVEISGVEDRFNASLGTYHDLLKIIKDKDFLDNEENEDILEDIVLTLTLFEDREMIEERLKTYAHLFDDKVMKQLKRRRYTGWGRLSR | |
| | KLINGIRDKQSGKTILDFLKSDGFANRNFMQLIHDDSLTFKEDIQKAQVSGQGDSLHEHIANLAGSPAIKKGILQTVKVVDELVKVMGRHKPENIVIEMAREN | |
| | QTTQKGQKNSRERMKRIEEGIKELGSQILKEHPVENTQLQNEKLYLYYLQNGRDMYVDQELDINRLSDYDVDHIVPQSFLKDDSIDNKVLTRSDKARGKSDN | |
| | VPSEEVVKKMKNYWRQLLNAKLITQRKFDNLTKAERGGLSELDKAGFIKRQLVETRQITKHVAQILDSRMNTKYDENDKLIREVKVITLKSKLVSDFRKDFQFY | |
| | KVREINNYHHAHDAYLNAVVGTALIKKYPKLESEFVYGDYKVYDVRKMIAKSEQEIGKATAKYFFYSNIMNFFKTEITLANGEIRKRPLIETNGETGEIVWDKGR | |
| | DFATVRKVLSMPQVNIVKKTEVQTGGFSKESILPKRNSDKLIARKKDWDPKKYGGFDSPTVAYSVLVVAKVEKGKSKKLKSVKELLGITIMERSSFEKNPIDFLE | |
| | AKGYKEVKKDLIIKLPKYSLFELENGRKRMLASAGELQKGNELALPSKYVNFLYLASHYEKLKGSPEDNEQKQLFVEQHKHYLDEIIEQISEFSKRVILADANLDK | |
| | VLSAYNKHRDKPIREQAENIIHLFTLTNLGAPAAFKYFDTTIDRKRYTSTKEVLDATLIHQSITGLYETRIDLSQLGGDKRTADGSEFESPKKKAKVE | |
| PL12038 | MPAAKRVKLDGGTLNIEDEHRLHETSKEPDVSLGSTWLSDFPQAWAETGGMGLAVRQAPLIIPLKATSTPVSIKQYPMSQEARLGIKPHIQRLLDQGILVPCQ | 16,101 |
| | SPWNTPLLPVKKPGTNDYRPVQDLREVNKRVEDIHPTVPNPYNLLSGLPPSHQWYTVLDLKDAFFCLRLHPTSQPLFAFEWRDPEMGISGQLTWTRLPQGF | |
| | KNSPTLFNEALHRDLADFRIQHPDLILLQYVDDLLLAATSELDCQQGTRALLQTLGNLGYRASAKKAQICQKQVKYLGYLLKEGQRWLTEARKETVMGQPTPK | |
| | TPRQLREFLGKAGFCRLFIPGFAEMAAPLYPLTKPGTLFNWGPDQQKAYQEIKQALLTAPALGLPDLTKPFELFVDEKQGYAKGVLTQKLGPWRRPVAYLSKK | |
| | LDPVAAGWPPCLRMVAAIAVLTKDAGKLTMGQPLVILAPHAVEALVKQPPDRWLSNARMTHYQALLLDTDRVQFGPVVALNPATLLPLPEEGLQHNCLDI | |
| | LAEAHGTRPDLTDQPLPDADHTWYTDGSSLLQEGQRKAGAAVTTETEVIWAKALPAGTSAQRAELIALTQALKMAEGKKLNVYTDSRYAFATAHIHGEIYRR | |
| | RGWLTSEGKEIKNKDEILALLKALFLPKRLSIIHCPGHQKGHSAEARGNRMADQAARKAAITETPDTSTLLAEAAAKEAAAKEAAAKEAAAKALEAEAAAKEA | |
| | AAKEAAAKEAAAKAMASNFTQFVLVDNGGTGDVTVAPSNFANGIAEWISSNSRSQAYKVTCSVRQSSAQNRKYTIKVEVPKGAWRSYLNMELTIPIFATNS | |
| | DCELIVKAMQGLLKDGNPIPSAIAANSGIYSGGSSGGSSGSETPGTSESATPESSGGSSGGSSDKKYSIGLDIGTNSVGWAVITDEYKVPSKKFKVLGNTDRHSI | |
| | KKNLIGALLFDSGETAEATRLKRTARRRYTRRKNRICYLQEIFSNEMAKVDDSFFHRLEESFLVEEDKKHERHPIFGNIVDEVAYHEKYPTIYHLRKKLVDSTDKA | |
| | DLRLIYLALAHMIKFRGHFLIEGDLNPDNSDVDKLFIQLVQTYNQLFEENPINASGVDAKAILSARLSKSRRLENLIAQLPGEKKNGLFGNLIALSLGLTPNFKSNF | |
| | DLAEDAKLQLSKDTYDDDLDNLLAQIGDQYADLFLAAKNLSDAILLSDILRVNTEITKAPLSASMIKRYDEHHQDLTLLKALVRQQLPEKYKEIFFDQSKNGYAG | |
| | YIDGGASQEEFYKFIKPILEKMDGTEELLVKLNREDLLRKQRTFDNGSIPHQIHLGELHAILRRQEDFYPFLKDNREKIEKILTFRIPYYVGPLARGNSRFAWMTR | |
| | KSEETITPWNFEEVVDKGASAQSFIERMTNFDKNLPNEKVLPKHSLLYEYFTVYNELTKVKYVTEGMRKPAFLSGEQKKAIVDLLFKTNRKVTVKQLKEDYFKKI | |
| | ECFDSVEISGVEDRFNASLGTYHDLLKIIKDKDFLDNEENEDILEDIVLTLTLFEDREMIEERLKTYAHLFDDKVMKQLKRRRYTGWGRLSRKLINGIRDKQSGKT | |
| | ILDFLKSDGFANRNFMQLIHDDSLTFKEDIQKAQVSGQGDSLHEHIANLAGSPAIKKGILQTVKVVDELVKVMGRHKPENIVIEMARENQTTQKGQKNSRER | |
| | MKRIEEGIKELGSQILKEHPVENTQLQNEKLYLYYLQNGRDMYVDQELDINRLSDYDVDHIVPQSFLKDDSIDNKVLTRSDKARGKSDNVPSEEVVKKMKNY | |
| | WRQLLNAKLITQRKFDNLTKAERGGLSELDKAGFIKRQLVETRQITKHVAQILDSRMNTKYDENDKLIREVKVITLKSKLVSDFRKDFQFYKVREINNYHHAHD | |
| | AYLNAVVGTALIKKYPKLESEFVYGDYKVYDVRKMIAKSEQEIGKATAKYFFYSNIMNFFKTEITLANGEIRKRPLIETNGETGEIVWDKGRDFATVRKVLSMPQ | |
| | VNIVKKTEVQTGGFSKESILPKRNSDKLIARKKDWDPKKYGGFDSPTVAYSVLVVAKVEKGKSKKLKSVKELLGITIMERSSFEKNPIDFLEAKGYKEVKKDLIIKL | |
| | PKYSLFELENGRKRMLASAGELQKGNELALPSKYVNFLYLASHYEKLKGSPEDNEQKQLFVEQHKHYLDEIIEQISEFSKRVILADANLDKVLSAYNKHRDKPIRE | |
| | QAENIIHLFTLTNLGAPAAFKYFDTTIDRKRYTSTKEVLDATLIHQSITGLYETRIDLSQLGGDKRTADGSEFESPKKKAKVE | |
| PL12039 | MPAAKRVKLDGGTLNIEDEHRLHETSKEPDVSLGSTWLSDFPQAWAETGGMGLAVRQAPLIIPLKATSTPVSIKQYPMSQEARLGIKPHIQRLLDQGILVPCQ | 16,102 |
| | SPWNTPLLPVKKPGTNDYRPVQDLREVNKRVEDIHPTVPNPYNLLSGLPPSHQWYTVLDLKDAFFCLRLHPTSQPLFAFEWRDPEMGISGQLTWTRLPQGF | |
| | KNSPTLFNEALHRDLADFRIQHPDLILLQYVDDLLLAATSELDCQQGTRALLQTLGNLGYRASAKKAQICQKQVKYLGYLLKEGQRWLTEARKETVMGQPTPK | |
| | TPRQLREFLGKAGFCRLFIPGFAEMAAPLYPLTKPGTLFNWGPDQQKAYQEIKQALLTAPALGLPDLTKPFELFVDEKQGYAKGVLTQKLGPWRRPVAYLSKK | |
| | LDPVAAGWPPCLRMVAAIAVLTKDAGKLTMGQPLVILAPHAVEALVKQPPDRWLSNARMTHYQALLLDTDRVQFGPVVALNPATLLPLPEEGLQHNCLDI | |
| | LAEAHGTRPDLTDQPLPDADHTWYTDGSSLLQEGQRKAGAAVTTETEVIWAKALPAGTSAQRAELIALTQALKMAEGKKLNVYTDSRYAFATAHIHGEIYRR | |
| | RGWLTSEGKEIKNKDEILALLKALFLPKRLSIIHCPGHQKGHSAEARGNRMADQAARKAAITETPDTSTLLAEAAAKEAAAKEAAAKEAAAKALEAEAAAKEA | |
| | AAKEAAAKEAAAKAMASNFTQFVLVDNGGTGDVTVAPSNFANGIAEWISSNSRSQAYKVTCSVRQSSAQNRKYTIKVEVPKGAWRSYLNMELTIPIFATNS | |
| | DCELIVKAMQGLLKDGNPIPSAIAANSGIYGSSGSSGSSGSSGSSGSSDKKYSIGLDIGTNSVGWAVITDEYKVPSKKFKVLGNTDRHSIKKNLIGALLFDSGETA | |
| | EATRLKRTARRRYTRRKNRICYLQEIFSNEMAKVDDSFFHRLEESFLVEEDKKHERHPIFGNIVDEVAYHEKYPTIYHLRKKLVDSTDKADLRLIYLALAHMIKFR | |
| | GHFLIEGDLNPDNSDVDKLFIQLVQTYNQLFEENPINASGVDAKAILSARLSKSRRLENLIAQLPGEKKNGLFGNLIALSLGLTPNFKSNFDLAEDAKLQLSKDTY | |
| | DDDLDNLLAQIGDQYADLFLAAKNLSDAILLSDILRVNTEITKAPLSASMIKRYDEHHQDLTLLKALVRQQLPEKYKEIFFDQSKNGYAGYIDGGASQEEFYKFIK | |
| | PILEKMDGTEELLVKLNREDLLRKQRTFDNGSIPHQIHLGELHAILRRQEDFYPFLKDNREKIEKILTFRIPYYVGPLARGNSRFAWMTRKSEETITPWNFEEVV | |
| | DKGASAQSFIERMTNFDKNLPNEKVLPKHSLLYEYFTVYNELTKVKYVTEGMRKPAFLSGEQKKAIVDLLFKTNRKVTVKQLKEDYFKKIECFDSVEISGVEDRF | |
| | NASLGTYHDLLKIIKDKDFLDNEENEDILEDIVLTLTLFEDREMIEERLKTYAHLFDDKVMKQLKRRRYTGWGRLSRKLINGIRDKQSGKTILDFLKSDGFANRNF | |
| | MQLIHDDSLTFKEDIQKAQVSGQGDSLHEHIANLAGSPAIKKGILQTVKVVDELVKVMGRHKPENIVIEMARENQTTQKGQKNSRERMKRIEEGIKELGSQIL | |
| | KEHPVENTQLQNEKLYLYYLQNGRDMYVDQELDINRLSDYDVDHIVPQSFLKDDSIDNKVLTRSDKARGKSDNVPSEEVVKKMKNYWRQLLNAKLITQRKF | |
| | DNLTKAERGGLSELDKAGFIKRQLVETRQITKHVAQILDSRMNTKYDENDKLIREVKVITLKSKLVSDFRKDFQFYKVREINNYHHAHDAYLNAVVGTALIKKYP | |
| | KLESEFVYGDYKVYDVRKMIAKSEQEIGKATAKYFFYSNIMNFFKTEITLANGEIRKRPLIETNGETGEIVWDKGRDFATVRKVLSMPQVNIVKKTEVQTGGFS | |
| | KESILPKRNSDKLIARKKDWDPKKYGGFDSPTVAYSVLVVAKVEKGKSKKLKSVKELLGITIMERSSFEKNPIDFLEAKGYKEVKKDLIIKLPKYSLFELENGRKRM | |
| | LASAGELQKGNELALPSKYVNFLYLASHYEKLKGSPEDNEQKQLFVEQHKHYLDEIIEQISEFSKRVILADANLDKVLSAYNKHRDKPIREQAENIIHLFTLTNLGA | |
| | PAAFKYFDTTIDRKRYTSTKEVLDATLIHQSITGLYETRIDLSQLGGDKRTADGSEFESPKKKAKVE | |
| PL12040 | MPAAKRVKLDGGTLNIEDEHRLHETSKEPDVSLGSTWLSDFPQAWAETGGMGLAVRQAPLIIPLKATSTPVSIKQYPMSQEARLGIKPHIQRLLDQGILVPCQ | 16,103 |
| | SPWNTPLLPVKKPGTNDYRPVQDLREVNKRVEDIHPTVPNPYNLLSGLPPSHQWYTVLDLKDAFFCLRLHPTSQPLFAFEWRDPEMGISGQLTWTRLPQGF | |
| | KNSPTLFNEALHRDLADFRIQHPDLILLQYVDDLLLAATSELDCQQGTRALLQTLGNLGYRASAKKAQICQKQVKYLGYLLKEGQRWLTEARKETVMGQPTPK | |
| | TPRQLREFLGKAGFCRLFIPGFAEMAAPLYPLTKPGTLFNWGPDQQKAYQEIKQALLTAPALGLPDLTKPFELFVDEKQGYAKGVLTQKLGPWRRPVAYLSKK | |
| | LDPVAAGWPPCLRMVAAIAVLTKDAGKLTMGQPLVILAPHAVEALVKQPPDRWLSNARMTHYQALLLDTDRVQFGPVVALNPATLLPLPEEGLQHNCLDI | |
| | LAEAHGTRPDLTDQPLPDADHTWYTDGSSLLQEGQRKAGAAVTTETEVIWAKALPAGTSAQRAELIALTQALKMAEGKKLNVYTDSRYAFATAHIHGEIYRR | |
| | RGWLTSEGKEIKNKDEILALLKALFLPKRLSIIHCPGHQKGHSAEARGNRMADQAARKAAITETPDTSTLLAEAAAKEAAAKEAAAKEAAAKALEAEAAAKEA | |
| | AAKEAAAKEAAAKAMASNFTQFVLVDNGGTGDVTVAPSNFANGIAEWISSNSRSQAYKVTCSVRQSSAQNRKYTIKVEVPKGAWRSYLNMELTIPIFATNS | |
| | DCELIVKAMQGLLKDGNPIPSAIAANSGIYGSSGGGEAAAKDKKYSIGLDIGTNSVGWAVITDEYKVPSKKFKVLGNTDRHSIKKNLIGALLFDSGETAEATRLK | |
| | RTARRRYTRRKNRICYLQEIFSNEMAKVDDSFFHRLEESFLVEEDKKHERHPIFGNIVDEVAYHEKYPTIYHLRKKLVDSTDKADLRLIYLALAHMIKFRGHFLIEG | |
| | DLNPDNSDVDKLFIQLVQTYNQLFEENPINASGVDAKAILSARLSKSRRLENLIAQLPGEKKNGLFGNLIALSLGLTPNFKSNFDLAEDAKLQLSKDTYDDDLDN | |
| | LLAQIGDQYADLFLAAKNLSDAILLSDILRVNTEITKAPLSASMIKRYDEHHQDLTLLKALVRQQLPEKYKEIFFDQSKNGYAGYIDGGASQEEFYKFIKPILEKMD | |
| | GTEELLVKLNREDLLRKQRTFDNGSIPHQIHLGELHAILRRQEDFYPFLKDNREKIEKILTFRIPYYVGPLARGNSRFAWMTRKSEETITPWNFEEVVDKGASAQ | |
| | SFIERMTNFDKNLPNEKVLPKHSLLYEYFTVYNELTKVKYVTEGMRKPAFLSGEQKKAIVDLLFKTNRKVTVKQLKEDYFKKIECFDSVEISGVEDRFNASLGTYH | |
| | DLLKIIKDKDFLDNEENEDILEDIVLTLTLFEDREMIEERLKTYAHLFDDKVMKQLKRRRYTGWGRLSRKLINGIRDKQSGKTILDFLKSDGFANRNFMQLIHDD | |
| | SLTFKEDIQKAQVSGQGDSLHEHIANLAGSPAIKKGILQTVKVVDELVKVMGRHKPENIVIEMARENQTTQKGQKNSRERMKRIEEGIKELGSQILKEHPVEN | |
| | TQLQNEKLYLYYLQNGRDMYVDQELDINRLSDYDVDHIVPQSFLKDDSIDNKVLTRSDKARGKSDNVPSEEVVKKMKNYWRQLLNAKLITQRKFDNLTKAER | |
| | GGLSELDKAGFIKRQLVETRQITKHVAQILDSRMNTKYDENDKLIREVKVITLKSKLVSDFRKDFQFYKVREINNYHHAHDAYLNAVVGTALIKKYPKLESEFVY | |
| | GDYKVYDVRKMIAKSEQEIGKATAKYFFYSNIMNFFKTEITLANGEIRKRPLIETNGETGEIVWDKGRDFATVRKVLSMPQVNIVKKTEVQTGGFSKESILPKR | |
| | NSDKLIARKKDWDPKKYGGFDSPTVAYSVLVVAKVEKGKSKKLKSVKELLGITIMERSSFEKNPIDFLEAKGYKEVKKDLIIKLPKYSLFELENGRKRMLASAGEL | |
| | QKGNELALPSKYVNFLYLASHYEKLKGSPEDNEQKQLFVEQHKHYLDEIIEQISEFSKRVILADANLDKVLSAYNKHRDKPIREQAENIIHLFTLTNLGAPAAFKY | |
| | FDTTIDRKRYTSTKEVLDATLIHQSITGLYETRIDLSQLGGDKRTADGSEFESPKKKAKVE | |
| PL12041 | MPAAKRVKLDGGTLNIEDEHRLHETSKEPDVSLGSTWLSDFPQAWAETGGMGLAVRQAPLIIPLKATSTPVSIKQYPMSQEARLGIKPHIQRLLDQGILVPCQ | 16,104 |
| | SPWNTPLLPVKKPGTNDYRPVQDLREVNKRVEDIHPTVPNPYNLLSGLPPSHQWYTVLDLKDAFFCLRLHPTSQPLFAFEWRDPEMGISGQLTWTRLPQGF | |
| | KNSPTLFNEALHRDLADFRIQHPDLILLQYVDDLLLAATSELDCQQGTRALLQTLGNLGYRASAKKAQICQKQVKYLGYLLKEGQRWLTEARKETVMGQPTPK | |
| | TPRQLREFLGKAGFCRLFIPGFAEMAAPLYPLTKPGTLFNWGPDQQKAYQEIKQALLTAPALGLPDLTKPFELFVDEKQGYAKGVLTQKLGPWRRPVAYLSKK | |
| | LDPVAAGWPPCLRMVAAIAVLTKDAGKLTMGQPLVILAPHAVEALVKQPPDRWLSNARMTHYQALLLDTDRVQFGPVVALNPATLLPLPEEGLQHNCLDI | |
| | LAEAHGTRPDLTDQPLPDADHTWYTDGSSLLQEGQRKAGAAVTTETEVIWAKALPAGTSAQRAELIALTQALKMAEGKKLNVYTDSRYAFATAHIHGEIYRR | |
| | RGWLTSEGKEIKNKDEILALLKALFLPKRLSIIHCPGHQKGHSAEARGNRMADQAARKAAITETPDTSTLLAEAAAKEAAAKEAAAKEAAAKALEAEAAAKEA | |
| | AAKEAAAKEAAAKAMASNFTQFVLVDNGGTGDVTVAPSNFANGIAEWISSNSRSQAYKVTCSVRQSSAQNRKYTIKVEVPKGAWRSYLNMELTIPIFATNS | |
| | DCELIVKAMQGLLKDGNPIPSAIAANSGIYGGSGGSMASNFTQFVLVDNGGTGDVTVAPSNFANGIAEWISSNSRSQAYKVTCSVRQSSAQNRKYTIKVEVP | |
| | KGAWRSYLNMELTIPIFATNSDCELIVKAMQGLLKDGNPIPSAIAANSGIYAEAAAKEAAAKEAAAKEAAAKALEAEAAAKEAAAKEAAAKEAAAKADKKYSI | |
| | GLDIGTNSVGWAVITDEYKVPSKKFKVLGNTDRHSIKKNLIGALLFDSGETAEATRLKRTARRRYTRRKNRICYLQEIFSNEMAKVDDSFFHRLEESFLVEEDKK | |
| | HERHPIFGNIVDEVAYHEKYPTIYHLRKKLVDSTDKADLRLIYLALAHMIKFRGHFLIEGDLNPDNSDVDKLFIQLVQTYNQLFEENPINASGVDAKAILSARLSK | |
| | SRRLENLIAQLPGEKKNGLFGNLIALSLGLTPNFKSNFDLAEDAKLQLSKDTYDDDLDNLLAQIGDQYADLFLAAKNLSDAILLSDILRVNTEITKAPLSASMIKRY | |
| | DEHHQDLTLLKALVRQQLPEKYKEIFFDQSKNGYAGYIDGGASQEEFYKFIKPILEKMDGTEELLVKLNREDLLRKQRTFDNGSIPHQIHLGELHAILRRQEDFY | |
| | PFLKDNREKIEKILTFRIPYYVGPLARGNSRFAWMTRKSEETITPWNFEEVVDKGASAQSFIERMTNFDKNLPNEKVLPKHSLLYEYFTVYNELTKVKYVTEGM | |
| | RKPAFLSGEQKKAIVDLLFKTNRKVTVKQLKEDYFKKIECFDSVEISGVEDRFNASLGTYHDLLKIIKDKDFLDNEENEDILEDIVLTLTLFEDREMIEERLKTYAHL | |
| | FDDKVMKQLKRRRYTGWGRLSRKLINGIRDKQSGKTILDFLKSDGFANRNFMQLIHDDSLTFKEDIQKAQVSGQGDSLHEHIANLAGSPAIKKGILQTVKVVD | |
| | ELVKVMGRHKPENIVIEMARENQTTQKGQKNSRERMKRIEEGIKELGSQILKEHPVENTQLQNEKLYLYYLQNGRDMYVDQELDINRLSDYDVDHIVPQSFL | |
| | KDDSIDNKVLTRSDKARGKSDNVPSEEVVKKMKNYWRQLLNAKLITQRKFDNLTKAERGGLSELDKAGFIKRQLVETRQITKHVAQILDSRMNTKYDENDKLI | |
| | REVKVITLKSKLVSDFRKDFQFYKVREINNYHHAHDAYLNAVVGTALIKKYPKLESEFVYGDYKVYDVRKMIAKSEQEIGKATAKYFFYSNIMNFFKTEITLANG | |
| | EIRKRPLIETNGETGEIVWDKGRDFATVRKVLSMPQVNIVKKTEVQTGGFSKESILPKRNSDKLIARKKDWDPKKYGGFDSPTVAYSVLVVAKVEKGKSKKLKS | |
| | VKELLGITIMERSSFEKNPIDFLEAKGYKEVKKDLIIKLPKYSLFELENGRKRMLASAGELQKGNELALPSKYVNFLYLASHYEKLKGSPEDNEQKQLFVEQHKHYL | |
| | DEIIEQISEFSKRVILADANLDKVLSAYNKHRDKPIREQAENIIHLFTLTNLGAPAAFKYFDTTIDRKRYTSTKEVLDATLIHQSITGLYETRIDLSQLGGDKRTADGS | |
| | EFESPKKKAKVE | |
| PL12042 | MPAAKRVKLDGGTLNIEDEHRLHETSKEPDVSLGSTWLSDFPQAWAETGGMGLAVRQAPLIIPLKATSTPVSIKQYPMSQEARLGIKPHIQRLLDQGILVPCQ | 16,105 |
| | SPWNTPLLPVKKPGTNDYRPVQDLREVNKRVEDIHPTVPNPYNLLSGLPPSHQWYTVLDLKDAFFCLRLHPTSQPLFAFEWRDPEMGISGQLTWTRLPQGF | |
| | KNSPTLFNEALHRDLADFRIQHPDLILLQYVDDLLLAATSELDCQQGTRALLQTLGNLGYRASAKKAQICQKQVKYLGYLLKEGQRWLTEARKETVMGQPTPK | |
| | TPRQLREFLGKAGFCRLFIPGFAEMAAPLYPLTKPGTLFNWGPDQQKAYQEIKQALLTAPALGLPDLTKPFELFVDEKQGYAKGVLTQKLGPWRRPVAYLSKK | |
| | LDPVAAGWPPCLRMVAAIAVLTKDAGKLTMGQPLVILAPHAVEALVKQPPDRWLSNARMTHYQALLLDTDRVQFGPVVALNPATLLPLPEEGLQHNCLDI | |
| | LAEAHGTRPDLTDQPLPDADHTWYTDGSSLLQEGQRKAGAAVTTETEVIWAKALPAGTSAQRAELIALTQALKMAEGKKLNVYTDSRYAFATAHIHGEIYRR | |
| | RGWLTSEGKEIKNKDEILALLKALFLPKRLSIIHCPGHQKGHSAEARGNRMADQAARKAAITETPDTSTLLAEAAAKEAAAKEAAAKEAAAKALEAEAAAKEA | |
| | AAKEAAAKEAAAKAMASNFTQFVLVDNGGTGDVTVAPSNFANGIAEWISSNSRSQAYKVTCSVRQSSAQNRKYTIKVEVPKGAWRSYLNMELTIPIFATNS | |
| | DCELIVKAMQGLLKDGNPIPSAIAANSGIYGGSGGSMASNFTQFVLVDNGGTGDVTVAPSNFANGIAEWISSNSRSQAYKVTCSVRQSSAQNRKYTIKVEVP | |
| | KGAWRSYLNMELTIPIFATNSDCELIVKAMQGLLKDGNPIPSAIAANSGIYSGGSSGGSSGSETPGTSESATPESSGGSSGGSSDKKYSIGLDIGTNSVGWAVIT | |
| | DEYKVPSKKFKVLGNTDRHSIKKNLIGALLFDSGETAEATRLKRTARRRYTRRKNRICYLQEIFSNEMAKVDDSFFHRLEESFLVEEDKKHERHPIFGNIVDEVAY | |
| | HEKYPTIYHLRKKLVDSTDKADLRLIYLALAHMIKFRGHFLIEGDLNPDNSDVDKLFIQLVQTYNQLFEENPINASGVDAKAILSARLSKSRRLENLIAQLPGEKK | |
| | NGLFGNLIALSLGLTPNFKSNFDLAEDAKLQLSKDTYDDDLDNLLAQIGDQYADLFLAAKNLSDAILLSDILRVNTEITKAPLSASMIKRYDEHHQDLTLLKALVR | |
| | QQLPEKYKEIFFDQSKNGYAGYIDGGASQEEFYKFIKPILEKMDGTEELLVKLNREDLLRKQRTFDNGSIPHQIHLGELHAILRRQEDFYPFLKDNREKIEKILTFRI | |
| | PYYVGPLARGNSRFAWMTRKSEETITPWNFEEVVDKGASAQSFIERMTNFDKNLPNEKVLPKHSLLYEYFTVYNELTKVKYVTEGMRKPAFLSGEQKKAIVD | |
| | LLFKTNRKVTVKQLKEDYFKKIECFDSVEISGVEDRFNASLGTYHDLLKIIKDKDFLDNEENEDILEDIVLTLTLFEDREMIEERLKTYAHLFDDKVMKQLKRRRYT | |
| | GWGRLSRKLINGIRDKQSGKTILDFLKSDGFANRNFMQLIHDDSLTFKEDIQKAQVSGQGDSLHEHIANLAGSPAIKKGILQTVKVVDELVKVMGRHKPENIV | |
| | IEMARENQTTQKGQKNSRERMKRIEEGIKELGSQILKEHPVENTQLQNEKLYLYYLQNGRDMYVDQELDINRLSDYDVDHIVPQSFLKDDSIDNKVLTRSDKA | |
| | RGKSDNVPSEEVVKKMKNYWRQLLNAKLITQRKFDNLTKAERGGLSELDKAGFIKRQLVETRQITKHVAQILDSRMNTKYDENDKLIREVKVITLKSKLVSDFR | |
| | KDFQFYKVREINNYHHAHDAYLNAVVGTALIKKYPKLESEFVYGDYKVYDVRKMIAKSEQEIGKATAKYFFYSNIMNFFKTEITLANGEIRKRPLIETNGETGEIV | |
| | WDKGRDFATVRKVLSMPQVNIVKKTEVQTGGFSKESILPKRNSDKLIARKKDWDPKKYGGFDSPTVAYSVLVVAKVEKGKSKKLKSVKELLGITIMERSSFEK | |
| | NPIDFLEAKGYKEVKKDLIIKLPKYSLFELENGRKRMLASAGELQKGNELALPSKYVNFLYLASHYEKLKGSPEDNEQKQLFVEQHKHYLDEIIEQISEFSKRVILA | |
| | DANLDKVLSAYNKHRDKPIREQAENIIHLFTLTNLGAPAAFKYFDTTIDRKRYTSTKEVLDATLIHQSITGLYETRIDLSQLGGDKRTADGSEFESPKKKAKVE | |
| PL12043 | MPAAKRVKLDGGTLNIEDEHRLHETSKEPDVSLGSTWLSDFPQAWAETGGMGLAVRQAPLIIPLKATSTPVSIKQYPMSQEARLGIKPHIQRLLDQGILVPCQ | 16,106 |
| | SPWNTPLLPVKKPGTNDYRPVQDLREVNKRVEDIHPTVPNPYNLLSGLPPSHQWYTVLDLKDAFFCLRLHPTSQPLFAFEWRDPEMGISGQLTWTRLPQGF | |
| | KNSPTLFNEALHRDLADFRIQHPDLILLQYVDDLLLAATSELDCQQGTRALLQTLGNLGYRASAKKAQICQKQVKYLGYLLKEGQRWLTEARKETVMGQPTPK | |
| | TPRQLREFLGKAGFCRLFIPGFAEMAAPLYPLTKPGTLFNWGPDQQKAYQEIKQALLTAPALGLPDLTKPFELFVDEKQGYAKGVLTQKLGPWRRPVAYLSKK | |
| | LDPVAAGWPPCLRMVAAIAVLTKDAGKLTMGQPLVILAPHAVEALVKQPPDRWLSNARMTHYQALLLDTDRVQFGPVVALNPATLLPLPEEGLQHNCLDI | |
| | LAEAHGTRPDLTDQPLPDADHTWYTDGSSLLQEGQRKAGAAVTTETEVIWAKALPAGTSAQRAELIALTQALKMAEGKKLNVYTDSRYAFATAHIHGEIYRR | |
| | RGWLTSEGKEIKNKDEILALLKALFLPKRLSIIHCPGHQKGHSAEARGNRMADQAARKAAITETPDTSTLLAEAAAKEAAAKEAAAKEAAAKALEAEAAAKEA | |
| | AAKEAAAKEAAAKAMASNFTQFVLVDNGGTGDVTVAPSNFANGIAEWISSNSRSQAYKVTCSVRQSSAQNRKYTIKVEVPKGAWRSYLNMELTIPIFATNS | |
| | DCELIVKAMQGLLKDGNPIPSAIAANSGIYGGSGGSMASNFTQFVLVDNGGTGDVTVAPSNFANGIAEWISSNSRSQAYKVTCSVRQSSAQNRKYTIKVEVP | |
| | KGAWRSYLNMELTIPIFATNSDCELIVKAMQGLLKDGNPIPSAIAANSGIYGSSGSSGSSGSSGSSGSSDKKYSIGLDIGTNSVGWAVITDEYKVPSKKFKVLGN | |
| | TDRHSIKKNLIGALLFDSGETAEATRLKRTARRRYTRRKNRICYLQEIFSNEMAKVDDSFFHRLEESFLVEEDKKHERHPIFGNIVDEVAYHEKYPTIYHLRKKLVD | |
| | STDKADLRLIYLALAHMIKFRGHFLIEGDLNPDNSDVDKLFIQLVQTYNQLFEENPINASGVDAKAILSARLSKSRRLENLIAQLPGEKKNGLFGNLIALSLGLTP | |
| | NFKSNFDLAEDAKLQLSKDTYDDDLDNLLAQIGDQYADLFLAAKNLSDAILLSDILRVNTEITKAPLSASMIKRYDEHHQDLTLLKALVRQQLPEKYKEIFFDQSK | |
| | NGYAGYIDGGASQEEFYKFIKPILEKMDGTEELLVKLNREDLLRKQRTFDNGSIPHQIHLGELHAILRRQEDFYPFLKDNREKIEKILTFRIPYYVGPLARGNSRFA | |
| | WMTRKSEETITPWNFEEVVDKGASAQSFIERMTNFDKNLPNEKVLPKHSLLYEYFTVYNELTKVKYVTEGMRKPAFLSGEQKKAIVDLLFKTNRKVTVKQLKE | |
| | DYFKKIECFDSVEISGVEDRFNASLGTYHDLLKIIKDKDFLDNEENEDILEDIVLTLTLFEDREMIEERLKTYAHLFDDKVMKQLKRRRYTGWGRLSRKLINGIRDK | |
| | QSGKTILDFLKSDGFANRNFMQLIHDDSLTFKEDIQKAQVSGQGDSLHEHIANLAGSPAIKKGILQTVKVVDELVKVMGRHKPENIVIEMARENQTTQKGQK | |
| | NSRERMKRIEEGIKELGSQILKEHPVENTQLQNEKLYLYYLQNGRDMYVDQELDINRLSDYDVDHIVPQSFLKDDSIDNKVLTRSDKARGKSDNVPSEEVVKK | |
| | MKNYWRQLLNAKLITQRKFDNLTKAERGGLSELDKAGFIKRQLVETRQITKHVAQILDSRMNTKYDENDKLIREVKVITLKSKLVSDFRKDFQFYKVREINNYH | |
| | HAHDAYLNAVVGTALIKKYPKLESEFVYGDYKVYDVRKMIAKSEQEIGKATAKYFFYSNIMNFFKTEITLANGEIRKRPLIETNGETGEIVWDKGRDFATVRKVL | |
| | SMPQVNIVKKTEVQTGGFSKESILPKRNSDKLIARKKDWDPKKYGGFDSPTVAYSVLVVAKVEKGKSKKLKSVKELLGITIMERSSFEKNPIDFLEAKGYKEVKK | |
| | DLIIKLPKYSLFELENGRKRMLASAGELQKGNELALPSKYVNFLYLASHYEKLKGSPEDNEQKQLFVEQHKHYLDEIIEQISEFSKRVILADANLDKVLSAYNKHR | |
| | DKPIREQAENIIHLFTLTNLGAPAAFKYFDTTIDRKRYTSTKEVLDATLIHQSITGLYETRIDLSQLGGDKRTADGSEFESPKKKAKVE | |
| PL12044 | MPAAKRVKLDGGTLNIEDEHRLHETSKEPDVSLGSTWLSDFPQAWAETGGMGLAVRQAPLIIPLKATSTPVSIKQYPMSQEARLGIKPHIQRLLDQGILVPCQ | 16,107 |
| | SPWNTPLLPVKKPGTNDYRPVQDLREVNKRVEDIHPTVPNPYNLLSGLPPSHQWYTVLDLKDAFFCLRLHPTSQPLFAFEWRDPEMGISGQLTWTRLPQGF | |
| | KNSPTLFNEALHRDLADFRIQHPDLILLQYVDDLLLAATSELDCQQGTRALLQTLGNLGYRASAKKAQICQKQVKYLGYLLKEGQRWLTEARKETVMGQPTPK | |
| | TPRQLREFLGKAGFCRLFIPGFAEMAAPLYPLTKPGTLFNWGPDQQKAYQEIKQALLTAPALGLPDLTKPFELFVDEKQGYAKGVLTQKLGPWRRPVAYLSKK | |
| | LDPVAAGWPPCLRMVAAIAVLTKDAGKLTMGQPLVILAPHAVEALVKQPPDRWLSNARMTHYQALLLDTDRVQFGPVVALNPATLLPLPEEGLQHNCLDI | |
| | LAEAHGTRPDLTDQPLPDADHTWYTDGSSLLQEGQRKAGAAVTTETEVIWAKALPAGTSAQRAELIALTQALKMAEGKKLNVYTDSRYAFATAHIHGEIYRR | |
| | RGWLTSEGKEIKNKDEILALLKALFLPKRLSIIHCPGHQKGHSAEARGNRMADQAARKAAITETPDTSTLLAEAAAKEAAAKEAAAKEAAAKALEAEAAAKEA | |
| | AAKEAAAKEAAAKAMASNFTQFVLVDNGGTGDVTVAPSNFANGIAEWISSNSRSQAYKVTCSVRQSSAQNRKYTIKVEVPKGAWRSYLNMELTIPIFATNS | |
| | DCELIVKAMQGLLKDGNPIPSAIAANSGIYGGSGGSMASNFTQFVLVDNGGTGDVTVAPSNFANGIAEWISSNSRSQAYKVTCSVRQSSAQNRKYTIKVEVP | |
| | KGAWRSYLNMELTIPIFATNSDCELIVKAMQGLLKDGNPIPSAIAANSGIYGSSGGGEAAAKDKKYSIGLDIGTNSVGWAVITDEYKVPSKKFKVLGNTDRHSI | |
| | KKNLIGALLFDSGETAEATRLKRTARRRYTRRKNRICYLQEIFSNEMAKVDDSFFHRLEESFLVEEDKKHERHPIFGNIVDEVAYHEKYPTIYHLRKKLVDSTDKA | |
| | DLRLIYLALAHMIKFRGHFLIEGDLNPDNSDVDKLFIQLVQTYNQLFEENPINASGVDAKAILSARLSKSRRLENLIAQLPGEKKNGLFGNLIALSLGLTPNFKSNF | |
| | DLAEDAKLQLSKDTYDDDLDNLLAQIGDQYADLFLAAKNLSDAILLSDILRVNTEITKAPLSASMIKRYDEHHQDLTLLKALVRQQLPEKYKEIFFDQSKNGYAG | |
| | YIDGGASQEEFYKFIKPILEKMDGTEELLVKLNREDLLRKQRTFDNGSIPHQIHLGELHAILRRQEDFYPFLKDNREKIEKILTFRIPYYVGPLARGNSRFAWMTR | |
| | KSEETITPWNFEEVVDKGASAQSFIERMTNFDKNLPNEKVLPKHSLLYEYFTVYNELTKVKYVTEGMRKPAFLSGEQKKAIVDLLFKTNRKVTVKQLKEDYFKKI | |
| | ECFDSVEISGVEDRFNASLGTYHDLLKIIKDKDFLDNEENEDILEDIVLTLTLFEDREMIEERLKTYAHLFDDKVMKQLKRRRYTGWGRLSRKLINGIRDKQSGKT | |
| | ILDFLKSDGFANRNFMQLIHDDSLTFKEDIQKAQVSGQGDSLHEHIANLAGSPAIKKGILQTVKVVDELVKVMGRHKPENIVIEMARENQTTQKGQKNSRER | |
| | MKRIEEGIKELGSQILKEHPVENTQLQNEKLYLYYLQNGRDMYVDQELDINRLSDYDVDHIVPQSFLKDDSIDNKVLTRSDKARGKSDNVPSEEVVKKMKNY | |
| | WRQLLNAKLITQRKFDNLTKAERGGLSELDKAGFIKRQLVETRQITKHVAQILDSRMNTKYDENDKLIREVKVITLKSKLVSDFRKDFQFYKVREINNYHHAHD | |
| | AYLNAVVGTALIKKYPKLESEFVYGDYKVYDVRKMIAKSEQEIGKATAKYFFYSNIMNFFKTEITLANGEIRKRPLIETNGETGEIVWDKGRDFATVRKVLSMPQ | |
| | VNIVKKTEVQTGGFSKESILPKRNSDKLIARKKDWDPKKYGGFDSPTVAYSVLVVAKVEKGKSKKLKSVKELLGITIMERSSFEKNPIDFLEAKGYKEVKKDLIIKL | |
| | PKYSLFELENGRKRMLASAGELQKGNELALPSKYVNFLYLASHYEKLKGSPEDNEQKQLFVEQHKHYLDEIIEQISEFSKRVILADANLDKVLSAYNKHRDKPIRE | |
| | QAENIIHLFTLTNLGAPAAFKYFDTTIDRKRYTSTKEVLDATLIHQSITGLYETRIDLSQLGGDKRTADGSEFESPKKKAKVE | |
| PL12045 | MPAAKRVKLDGGTLNIEDEHRLHETSKEPDVSLGSTWLSDFPQAWAETGGMGLAVRQAPLIIPLKATSTPVSIKQYPMSQEARLGIKPHIQRLLDQGILVPCQ | 16,108 |
| | SPWNTPLLPVKKPGTNDYRPVQDLREVNKRVEDIHPTVPNPYNLLSGLPPSHQWYTVLDLKDAFFCLRLHPTSQPLFAFEWRDPEMGISGQLTWTRLPQGF | |
| | KNSPTLFNEALHRDLADFRIQHPDLILLQYVDDLLLAATSELDCQQGTRALLQTLGNLGYRASAKKAQICQKQVKYLGYLLKEGQRWLTEARKETVMGQPTPK | |
| | TPRQLREFLGKAGFCRLFIPGFAEMAAPLYPLTKPGTLFNWGPDQQKAYQEIKQALLTAPALGLPDLTKPFELFVDEKQGYAKGVLTQKLGPWRRPVAYLSKK | |
| | LDPVAAGWPPCLRMVAAIAVLTKDAGKLTMGQPLVILAPHAVEALVKQPPDRWLSNARMTHYQALLLDTDRVQFGPVVALNPATLLPLPEEGLQHNCLDI | |
| | LAEAHGTRPDLTDQPLPDADHTWYTDGSSLLQEGQRKAGAAVTTETEVIWAKALPAGTSAQRAELIALTQALKMAEGKKLNVYTDSRYAFATAHIHGEIYRR | |
| | RGWLTSEGKEIKNKDEILALLKALFLPKRLSIIHCPGHQKGHSAEARGNRMADQAARKAAITETPDTSTLLAEAAAKEAAAKEAAAKEAAAKALEAEAAAKEA | |
| | AAKEAAAKEAAAKAMASNFTQFVLVDNGGTGDVTVAPSNFANGIAEWISSNSRSQAYKVTCSVRQSSAQNRKYTIKVEVPKGAWRSYLNMELTIPIFATNS | |
| | DCELIVKAMQGLLKDGNPIPSAIAANSGIYGGSGGSMASNFTQFVLVDNGGTGDVTVAPSNFANGIAEWISSNSRSQAYKVTCSVRQSSAQNRKYTIKVEVP | |
| | KGAWRSYLNMELTIPIFATNSDCELIVKAMQGLLKDGNPIPSAIAANSGIYGGGSGGGSGGGSGGGSMASNFTQFVLVDNGGTGDVTVAPSNFANGIAEW | |
| | ISSNSRSQAYKVTCSVRQSSAQNRKYTIKVEVPKGAWRSYLNMELTIPIFATNSDCELIVKAMQGLLKDGNPIPSAIAANSGIYGGSGGSMASNFTQFVLVDN | |
| | GGTGDVTVAPSNFANGIAEWISSNSRSQAYKVTCSVRQSSAQNRKYTIKVEVPKGAWRSYLNMELTIPIFATNSDCELIVKAMQGLLKDGNPIPSAIAANSGI | |
| | YAEAAAKEAAAKEAAAKEAAAKALEAEAAAKEAAAKEAAAKEAAAKADKKYSIGLDIGTNSVGWAVITDEYKVPSKKFKVLGNTDRHSIKKNLIGALLFDSGE | |
| | TAEATRLKRTARRRYTRRKNRICYLQEIFSNEMAKVDDSFFHRLEESFLVEEDKKHERHPIFGNIVDEVAYHEKYPTIYHLRKKLVDSTDKADLRLIYLALAHMIKF | |
| | RGHFLIEGDLNPDNSDVDKLFIQLVQTYNQLFEENPINASGVDAKAILSARLSKSRRLENLIAQLPGEKKNGLFGNLIALSLGLTPNFKSNFDLAEDAKLQLSKDT | |
| | YDDDLDNLLAQIGDQYADLFLAAKNLSDAILLSDILRVNTEITKAPLSASMIKRYDEHHQDLTLLKALVRQQLPEKYKEIFFDQSKNGYAGYIDGGASQEEFYKFI | |
| | KPILEKMDGTEELLVKLNREDLLRKQRTFDNGSIPHQIHLGELHAILRRQEDFYPFLKDNREKIEKILTFRIPYYVGPLARGNSRFAWMTRKSEETITPWNFEEVV | |
| | DKGASAQSFIERMTNFDKNLPNEKVLPKHSLLYEYFTVYNELTKVKYVTEGMRKPAFLSGEQKKAIVDLLFKTNRKVTVKQLKEDYFKKIECFDSVEISGVEDRF | |
| | NASLGTYHDLLKIIKDKDFLDNEENEDILEDIVLTLTLFEDREMIEERLKTYAHLFDDKVMKQLKRRRYTGWGRLSRKLINGIRDKQSGKTILDFLKSDGFANRNF | |
| | MQLIHDDSLTFKEDIQKAQVSGQGDSLHEHIANLAGSPAIKKGILQTVKVVDELVKVMGRHKPENIVIEMARENQTTQKGQKNSRERMKRIEEGIKELGSQIL | |
| | KEHPVENTQLQNEKLYLYYLQNGRDMYVDQELDINRLSDYDVDHIVPQSFLKDDSIDNKVLTRSDKARGKSDNVPSEEVVKKMKNYWRQLLNAKLITQRKF | |
| | DNLTKAERGGLSELDKAGFIKRQLVETRQITKHVAQILDSRMNTKYDENDKLIREVKVITLKSKLVSDFRKDFQFYKVREINNYHHAHDAYLNAVVGTALIKKYP | |
| | KLESEFVYGDYKVYDVRKMIAKSEQEIGKATAKYFFYSNIMNFFKTEITLANGEIRKRPLIETNGETGEIVWDKGRDFATVRKVLSMPQVNIVKKTEVQTGGFS | |
| | KESILPKRNSDKLIARKKDWDPKKYGGFDSPTVAYSVLVVAKVEKGKSKKLKSVKELLGITIMERSSFEKNPIDFLEAKGYKEVKKDLIIKLPKYSLFELENGRKRM | |
| | LASAGELQKGNELALPSKYVNFLYLASHYEKLKGSPEDNEQKQLFVEQHKHYLDEIIEQISEFSKRVILADANLDKVLSAYNKHRDKPIREQAENIIHLFTLTNLGA | |
| | PAAFKYFDTTIDRKRYTSTKEVLDATLIHQSITGLYETRIDLSQLGGDKRTADGSEFESPKKKAKVE | |
| PL12046 | MPAAKRVKLDGGTLNIEDEHRLHETSKEPDVSLGSTWLSDFPQAWAETGGMGLAVRQAPLIIPLKATSTPVSIKQYPMSQEARLGIKPHIQRLLDQGILVPCQ | 16,109 |
| | SPWNTPLLPVKKPGTNDYRPVQDLREVNKRVEDIHPTVPNPYNLLSGLPPSHQWYTVLDLKDAFFCLRLHPTSQPLFAFEWRDPEMGISGQLTWTRLPQGF | |
| | KNSPTLFNEALHRDLADFRIQHPDLILLQYVDDLLLAATSELDCQQGTRALLQTLGNLGYRASAKKAQICQKQVKYLGYLLKEGQRWLTEARKETVMGQPTPK | |
| | TPRQLREFLGKAGFCRLFIPGFAEMAAPLYPLTKPGTLFNWGPDQQKAYQEIKQALLTAPALGLPDLTKPFELFVDEKQGYAKGVLTQKLGPWRRPVAYLSKK | |
| | LDPVAAGWPPCLRMVAAIAVLTKDAGKLTMGQPLVILAPHAVEALVKQPPDRWLSNARMTHYQALLLDTDRVQFGPVVALNPATLLPLPEEGLQHNCLDI | |
| | LAEAHGTRPDLTDQPLPDADHTWYTDGSSLLQEGQRKAGAAVTTETEVIWAKALPAGTSAQRAELIALTQALKMAEGKKLNVYTDSRYAFATAHIHGEIYRR | |
| | RGWLTSEGKEIKNKDEILALLKALFLPKRLSIIHCPGHQKGHSAEARGNRMADQAARKAAITETPDTSTLLAEAAAKEAAAKEAAAKEAAAKALEAEAAAKEA | |
| | AAKEAAAKEAAAKAMASNFTQFVLVDNGGTGDVTVAPSNFANGIAEWISSNSRSQAYKVTCSVRQSSAQNRKYTIKVEVPKGAWRSYLNMELTIPIFATNS | |
| | DCELIVKAMQGLLKDGNPIPSAIAANSGIYGGSGGSMASNFTQFVLVDNGGTGDVTVAPSNFANGIAEWISSNSRSQAYKVTCSVRQSSAQNRKYTIKVEVP | |
| | KGAWRSYLNMELTIPIFATNSDCELIVKAMQGLLKDGNPIPSAIAANSGIYGGGSGGGSGGGSGGGSMASNFTQFVLVDNGGTGDVTVAPSNFANGIAEW | |
| | ISSNSRSQAYKVTCSVRQSSAQNRKYTIKVEVPKGAWRSYLNMELTIPIFATNSDCELIVKAMQGLLKDGNPIPSAIAANSGIYGGSGGSMASNFTQFVLVDN | |
| | GGTGDVTVAPSNFANGIAEWISSNSRSQAYKVTCSVRQSSAQNRKYTIKVEVPKGAWRSYLNMELTIPIFATNSDCELIVKAMQGLLKDGNPIPSAIAANSGI | |
| | YSGGSSGGSSGSETPGTSESATPESSGGSSGGSSDKKYSIGLDIGTNSVGWAVITDEYKVPSKKFKVLGNTDRHSIKKNLIGALLFDSGETAEATRLKRTARRRYT | |
| | RRKNRICYLQEIFSNEMAKVDDSFFHRLEESFLVEEDKKHERHPIFGNIVDEVAYHEKYPTIYHLRKKLVDSTDKADLRLIYLALAHMIKFRGHFLIEGDLNPDNS | |
| | DVDKLFIQLVQTYNQLFEENPINASGVDAKAILSARLSKSRRLENLIAQLPGEKKNGLFGNLIALSLGLTPNFKSNFDLAEDAKLQLSKDTYDDDLDNLLAQIGD | |
| | QYADLFLAAKNLSDAILLSDILRVNTEITKAPLSASMIKRYDEHHQDLTLLKALVRQQLPEKYKEIFFDQSKNGYAGYIDGGASQEEFYKFIKPILEKMDGTEELLV | |
| | KLNREDLLRKQRTFDNGSIPHQIHLGELHAILRRQEDFYPFLKDNREKIEKILTFRIPYYVGPLARGNSRFAWMTRKSEETITPWNFEEVVDKGASAQSFIERMT | |
| | NFDKNLPNEKVLPKHSLLYEYFTVYNELTKVKYVTEGMRKPAFLSGEQKKAIVDLLFKTNRKVTVKQLKEDYFKKIECFDSVEISGVEDRFNASLGTYHDLLKIIK | |
| | DKDFLDNEENEDILEDIVLTLTLFEDREMIEERLKTYAHLFDDKVMKQLKRRRYTGWGRLSRKLINGIRDKQSGKTILDFLKSDGFANRNFMQLIHDDSLTFKE | |
| | DIQKAQVSGQGDSLHEHIANLAGSPAIKKGILQTVKVVDELVKVMGRHKPENIVIEMARENQTTQKGQKNSRERMKRIEEGIKELGSQILKEHPVENTQLQN | |
| | EKLYLYYLQNGRDMYVDQELDINRLSDYDVDHIVPQSFLKDDSIDNKVLTRSDKARGKSDNVPSEEVVKKMKNYWRQLLNAKLITQRKFDNLTKAERGGLSE | |
| | LDKAGFIKRQLVETRQITKHVAQILDSRMNTKYDENDKLIREVKVITLKSKLVSDFRKDFQFYKVREINNYHHAHDAYLNAVVGTALIKKYPKLESEFVYGDYKV | |
| | YDVRKMIAKSEQEIGKATAKYFFYSNIMNFFKTEITLANGEIRKRPLIETNGETGEIVWDKGRDFATVRKVLSMPQVNIVKKTEVQTGGFSKESILPKRNSDKLI | |
| | ARKKDWDPKKYGGFDSPTVAYSVLVVAKVEKGKSKKLKSVKELLGITIMERSSFEKNPIDFLEAKGYKEVKKDLIIKLPKYSLFELENGRKRMLASAGELQKGNEL | |
| | ALPSKYVNFLYLASHYEKLKGSPEDNEQKQLFVEQHKHYLDEIIEQISEFSKRVILADANLDKVLSAYNKHRDKPIREQAENIIHLFTLTNLGAPAAFKYFDTTIDR | |
| | KRYTSTKEVLDATLIHQSITGLYETRIDLSQLGGDKRTADGSEFESPKKKAKVE | |
| PL12047 | MPAAKRVKLDGGTLNIEDEHRLHETSKEPDVSLGSTWLSDFPQAWAETGGMGLAVRQAPLIIPLKATSTPVSIKQYPMSQEARLGIKPHIQRLLDQGILVPCQ | 16,110 |
| | SPWNTPLLPVKKPGTNDYRPVQDLREVNKRVEDIHPTVPNPYNLLSGLPPSHQWYTVLDLKDAFFCLRLHPTSQPLFAFEWRDPEMGISGQLTWTRLPQGF | |
| | KNSPTLFNEALHRDLADFRIQHPDLILLQYVDDLLLAATSELDCQQGTRALLQTLGNLGYRASAKKAQICQKQVKYLGYLLKEGQRWLTEARKETVMGQPTPK | |
| | TPRQLREFLGKAGFCRLFIPGFAEMAAPLYPLTKPGTLFNWGPDQQKAYQEIKQALLTAPALGLPDLTKPFELFVDEKQGYAKGVLTQKLGPWRRPVAYLSKK | |
| | LDPVAAGWPPCLRMVAAIAVLTKDAGKLTMGQPLVILAPHAVEALVKQPPDRWLSNARMTHYQALLLDTDRVQFGPVVALNPATLLPLPEEGLQHNCLDI | |
| | LAEAHGTRPDLTDQPLPDADHTWYTDGSSLLQEGQRKAGAAVTTETEVIWAKALPAGTSAQRAELIALTQALKMAEGKKLNVYTDSRYAFATAHIHGEIYRR | |
| | RGWLTSEGKEIKNKDEILALLKALFLPKRLSIIHCPGHQKGHSAEARGNRMADQAARKAAITETPDTSTLLAEAAAKEAAAKEAAAKEAAAKALEAEAAAKEA | |
| | AAKEAAAKEAAAKAMASNFTQFVLVDNGGTGDVTVAPSNFANGIAEWISSNSRSQAYKVTCSVRQSSAQNRKYTIKVEVPKGAWRSYLNMELTIPIFATNS | |
| | DCELIVKAMQGLLKDGNPIPSAIAANSGIYGGSGGSMASNFTQFVLVDNGGTGDVTVAPSNFANGIAEWISSNSRSQAYKVTCSVRQSSAQNRKYTIKVEVP | |
| | KGAWRSYLNMELTIPIFATNSDCELIVKAMQGLLKDGNPIPSAIAANSGIYGGGSGGGSGGGSGGGSMASNFTQFVLVDNGGTGDVTVAPSNFANGIAEW | |
| | ISSNSRSQAYKVTCSVRQSSAQNRKYTIKVEVPKGAWRSYLNMELTIPIFATNSDCELIVKAMQGLLKDGNPIPSAIAANSGIYGGSGGSMASNFTQFVLVDN | |
| | GGTGDVTVAPSNFANGIAEWISSNSRSQAYKVTCSVRQSSAQNRKYTIKVEVPKGAWRSYLNMELTIPIFATNSDCELIVKAMQGLLKDGNPIPSAIAANSGI | |
| | YGSSGSSGSSGSSGSSGSSDKKYSIGLDIGTNSVGWAVITDEYKVPSKKFKVLGNTDRHSIKKNLIGALLFDSGETAEATRLKRTARRRYTRRKNRICYLQEIFSNE | |
| | MAKVDDSFFHRLEESFLVEEDKKHERHPIFGNIVDEVAYHEKYPTIYHLRKKLVDSTDKADLRLIYLALAHMIKFRGHFLIEGDLNPDNSDVDKLFIQLVQTYNQ | |
| | LFEENPINASGVDAKAILSARLSKSRRLENLIAQLPGEKKNGLFGNLIALSLGLTPNFKSNFDLAEDAKLQLSKDTYDDDLDNLLAQIGDQYADLFLAAKNLSDAI | |
| | LLSDILRVNTEITKAPLSASMIKRYDEHHQDLTLLKALVRQQLPEKYKEIFFDQSKNGYAGYIDGGASQEEFYKFIKPILEKMDGTEELLVKLNREDLLRKQRTFD | |
| | NGSIPHQIHLGELHAILRRQEDFYPFLKDNREKIEKILTFRIPYYVGPLARGNSRFAWMTRKSEETITPWNFEEVVDKGASAQSFIERMTNFDKNLPNEKVLPK | |
| | HSLLYEYFTVYNELTKVKYVTEGMRKPAFLSGEQKKAIVDLLFKTNRKVTVKQLKEDYFKKIECFDSVEISGVEDRFNASLGTYHDLLKIIKDKDFLDNEENEDILE | |
| | DIVLTLTLFEDREMIEERLKTYAHLFDDKVMKQLKRRRYTGWGRLSRKLINGIRDKQSGKTILDFLKSDGFANRNFMQLIHDDSLTFKEDIQKAQVSGQGDSL | |
| | HEHIANLAGSPAIKKGILQTVKVVDELVKVMGRHKPENIVIEMARENQTTQKGQKNSRERMKRIEEGIKELGSQILKEHPVENTQLQNEKLYLYYLQNGRDM | |
| | YVDQELDINRLSDYDVDHIVPQSFLKDDSIDNKVLTRSDKARGKSDNVPSEEVVKKMKNYWRQLLNAKLITQRKFDNLTKAERGGLSELDKAGFIKRQLVETR | |
| | QITKHVAQILDSRMNTKYDENDKLIREVKVITLKSKLVSDFRKDFQFYKVREINNYHHAHDAYLNAVVGTALIKKYPKLESEFVYGDYKVYDVRKMIAKSEQEIG | |
| | KATAKYFFYSNIMNFFKTEITLANGEIRKRPLIETNGETGEIVWDKGRDFATVRKVLSMPQVNIVKKTEVQTGGFSKESILPKRNSDKLIARKKDWDPKKYGGF | |
| | DSPTVAYSVLVVAKVEKGKSKKLKSVKELLGITIMERSSFEKNPIDFLEAKGYKEVKKDLIIKLPKYSLFELENGRKRMLASAGELQKGNELALPSKYVNFLYLASH | |
| | YEKLKGSPEDNEQKQLFVEQHKHYLDEIIEQISEFSKRVILADANLDKVLSAYNKHRDKPIREQAENIIHLFTLTNLGAPAAFKYFDTTIDRKRYTSTKEVLDATLIH | |
| | QSITGLYETRIDLSQLGGDKRTADGSEFESPKKKAKVE | |
| PL12048 | MPAAKRVKLDGGTLNIEDEHRLHETSKEPDVSLGSTWLSDFPQAWAETGGMGLAVRQAPLIIPLKATSTPVSIKQYPMSQEARLGIKPHIQRLLDQGILVPCQ | 16,111 |
| | SPWNTPLLPVKKPGTNDYRPVQDLREVNKRVEDIHPTVPNPYNLLSGLPPSHQWYTVLDLKDAFFCLRLHPTSQPLFAFEWRDPEMGISGQLTWTRLPQGF | |
| | KNSPTLFNEALHRDLADFRIQHPDLILLQYVDDLLLAATSELDCQQGTRALLQTLGNLGYRASAKKAQICQKQVKYLGYLLKEGQRWLTEARKETVMGQPTPK | |
| | TPRQLREFLGKAGFCRLFIPGFAEMAAPLYPLTKPGTLFNWGPDQQKAYQEIKQALLTAPALGLPDLTKPFELFVDEKQGYAKGVLTQKLGPWRRPVAYLSKK | |
| | LDPVAAGWPPCLRMVAAIAVLTKDAGKLTMGQPLVILAPHAVEALVKQPPDRWLSNARMTHYQALLLDTDRVQFGPVVALNPATLLPLPEEGLQHNCLDI | |
| | LAEAHGTRPDLTDQPLPDADHTWYTDGSSLLQEGQRKAGAAVTTETEVIWAKALPAGTSAQRAELIALTQALKMAEGKKLNVYTDSRYAFATAHIHGEIYRR | |
| | RGWLTSEGKEIKNKDEILALLKALFLPKRLSIIHCPGHQKGHSAEARGNRMADQAARKAAITETPDTSTLLAEAAAKEAAAKEAAAKEAAAKALEAEAAAKEA | |
| | AAKEAAAKEAAAKAMASNFTQFVLVDNGGTGDVTVAPSNFANGIAEWISSNSRSQAYKVTCSVRQSSAQNRKYTIKVEVPKGAWRSYLNMELTIPIFATNS | |
| | DCELIVKAMQGLLKDGNPIPSAIAANSGIYGGSGGSMASNFTQFVLVDNGGTGDVTVAPSNFANGIAEWISSNSRSQAYKVTCSVRQSSAQNRKYTIKVEVP | |
| | KGAWRSYLNMELTIPIFATNSDCELIVKAMQGLLKDGNPIPSAIAANSGIYGGGSGGGSGGGSGGGSMASNFTQFVLVDNGGTGDVTVAPSNFANGIAEW | |
| | ISSNSRSQAYKVTCSVRQSSAQNRKYTIKVEVPKGAWRSYLNMELTIPIFATNSDCELIVKAMQGLLKDGNPIPSAIAANSGIYGGSGGSMASNFTQFVLVDN | |
| | GGTGDVTVAPSNFANGIAEWISSNSRSQAYKVTCSVRQSSAQNRKYTIKVEVPKGAWRSYLNMELTIPIFATNSDCELIVKAMQGLLKDGNPIPSAIAANSGI | |
| | YGSSGGGEAAAKDKKYSIGLDIGTNSVGWAVITDEYKVPSKKFKVLGNTDRHSIKKNLIGALLFDSGETAEATRLKRTARRRYTRRKNRICYLQEIFSNEMAKVD | |
| | DSFFHRLEESFLVEEDKKHERHPIFGNIVDEVAYHEKYPTIYHLRKKLVDSTDKADLRLIYLALAHMIKFRGHFLIEGDLNPDNSDVDKLFIQLVQTYNQLFEENPI | |
| | NASGVDAKAILSARLSKSRRLENLIAQLPGEKKNGLFGNLIALSLGLTPNFKSNFDLAEDAKLQLSKDTYDDDLDNLLAQIGDQYADLFLAAKNLSDAILLSDILR | |
| | VNTEITKAPLSASMIKRYDEHHQDLTLLKALVRQQLPEKYKEIFFDQSKNGYAGYIDGGASQEEFYKFIKPILEKMDGTEELLVKLNREDLLRKQRTFDNGSIPH | |
| | QIHLGELHAILRRQEDFYPFLKDNREKIEKILTFRIPYYVGPLARGNSRFAWMTRKSEETITPWNFEEVVDKGASAQSFIERMTNFDKNLPNEKVLPKHSLLYEY | |
| | FTVYNELTKVKYVTEGMRKPAFLSGEQKKAIVDLLFKTNRKVTVKQLKEDYFKKIECFDSVEISGVEDRFNASLGTYHDLLKIIKDKDFLDNEENEDILEDIVLTLTL | |
| | FEDREMIEERLKTYAHLFDDKVMKQLKRRRYTGWGRLSRKLINGIRDKQSGKTILDFLKSDGFANRNFMQLIHDDSLTFKEDIQKAQVSGQGDSLHEHIANLA | |
| | GSPAIKKGILQTVKVVDELVKVMGRHKPENIVIEMARENQTTQKGQKNSRERMKRIEEGIKELGSQILKEHPVENTQLQNEKLYLYYLQNGRDMYVDQELDI | |
| | NRLSDYDVDHIVPQSFLKDDSIDNKVLTRSDKARGKSDNVPSEEVVKKMKNYWRQLLNAKLITQRKFDNLTKAERGGLSELDKAGFIKRQLVETRQITKHVA | |
| | QILDSRMNTKYDENDKLIREVKVITLKSKLVSDFRKDFQFYKVREINNYHHAHDAYLNAVVGTALIKKYPKLESEFVYGDYKVYDVRKMIAKSEQEIGKATAKYF | |
| | FYSNIMNFFKTEITLANGEIRKRPLIETNGETGEIVWDKGRDFATVRKVLSMPQVNIVKKTEVQTGGFSKESILPKRNSDKLIARKKDWDPKKYGGFDSPTVAY | |
| | SVLVVAKVEKGKSKKLKSVKELLGITIMERSSFEKNPIDFLEAKGYKEVKKDLIIKLPKYSLFELENGRKRMLASAGELQKGNELALPSKYVNFLYLASHYEKLKGSP | |
| | EDNEQKQLFVEQHKHYLDEIIEQISEFSKRVILADANLDKVLSAYNKHRDKPIREQAENIIHLFTLTNLGAPAAFKYFDTTIDRKRYTSTKEVLDATLIHQSITGLYE | |
| | TRIDLSQLGGDKRTADGSEFESPKKKAKVE | |
| PL12049 | MPAAKRVKLDGGTLNIEDEHRLHETSKEPDVSLGSTWLSDFPQAWAETGGMGLAVRQAPLIIPLKATSTPVSIKQYPMSQEARLGIKPHIQRLLDQGILVPCQ | 16,112 |
| | SPWNTPLLPVKKPGTNDYRPVQDLREVNKRVEDIHPTVPNPYNLLSGLPPSHQWYTVLDLKDAFFCLRLHPTSQPLFAFEWRDPEMGISGQLTWTRLPQGF | |
| | KNSPTLFNEALHRDLADFRIQHPDLILLQYVDDLLLAATSELDCQQGTRALLQTLGNLGYRASAKKAQICQKQVKYLGYLLKEGQRWLTEARKETVMGQPTPK | |
| | TPRQLREFLGKAGFCRLFIPGFAEMAAPLYPLTKPGTLFNWGPDQQKAYQEIKQALLTAPALGLPDLTKPFELFVDEKQGYAKGVLTQKLGPWRRPVAYLSKK | |
| | LDPVAAGWPPCLRMVAAIAVLTKDAGKLTMGQPLVILAPHAVEALVKQPPDRWLSNARMTHYQALLLDTDRVQFGPVVALNPATLLPLPEEGLQHNCLDI | |
| | LAEAHGTRPDLTDQPLPDADHTWYTDGSSLLQEGQRKAGAAVTTETEVIWAKALPAGTSAQRAELIALTQALKMAEGKKLNVYTDSRYAFATAHIHGEIYRR | |
| | RGWLTSEGKEIKNKDEILALLKALFLPKRLSIIHCPGHQKGHSAEARGNRMADQAARKAAITETPDTSTLLSGGSSGGSSGSETPGTSESATPESSGGSSGGSS | |
| | MASNFTQFVLVDNGGTGDVTVAPSNFANGIAEWISSNSRSQAYKVTCSVRQSSAQNRKYTIKVEVPKGAWRSYLNMELTIPIFATNSDCELIVKAMQGLLK | |
| | DGNPIPSAIAANSGIYAEAAAKEAAAKEAAAKEAAAKALEAEAAAKEAAAKEAAAKEAAAKADKKYSIGLDIGTNSVGWAVITDEYKVPSKKFKVLGNTDRHS | |
| | IKKNLIGALLFDSGETAEATRLKRTARRRYTRRKNRICYLQEIFSNEMAKVDDSFFHRLEESFLVEEDKKHERHPIFGNIVDEVAYHEKYPTIYHLRKKLVDSTDKA | |
| | DLRLIYLALAHMIKFRGHFLIEGDLNPDNSDVDKLFIQLVQTYNQLFEENPINASGVDAKAILSARLSKSRRLENLIAQLPGEKKNGLFGNLIALSLGLTPNFKSNF | |
| | DLAEDAKLQLSKDTYDDDLDNLLAQIGDQYADLFLAAKNLSDAILLSDILRVNTEITKAPLSASMIKRYDEHHQDLTLLKALVRQQLPEKYKEIFFDQSKNGYAG | |
| | YIDGGASQEEFYKFIKPILEKMDGTEELLVKLNREDLLRKQRTFDNGSIPHQIHLGELHAILRRQEDFYPFLKDNREKIEKILTFRIPYYVGPLARGNSRFAWMTR | |
| | KSEETITPWNFEEVVDKGASAQSFIERMTNFDKNLPNEKVLPKHSLLYEYFTVYNELTKVKYVTEGMRKPAFLSGEQKKAIVDLLFKTNRKVTVKQLKEDYFKKI | |
| | ECFDSVEISGVEDRFNASLGTYHDLLKIIKDKDFLDNEENEDILEDIVLTLTLFEDREMIEERLKTYAHLFDDKVMKQLKRRRYTGWGRLSRKLINGIRDKQSGKT | |
| | ILDFLKSDGFANRNFMQLIHDDSLTFKEDIQKAQVSGQGDSLHEHIANLAGSPAIKKGILQTVKVVDELVKVMGRHKPENIVIEMARENQTTQKGQKNSRER | |
| | MKRIEEGIKELGSQILKEHPVENTQLQNEKLYLYYLQNGRDMYVDQELDINRLSDYDVDHIVPQSFLKDDSIDNKVLTRSDKARGKSDNVPSEEVVKKMKNY | |
| | WRQLLNAKLITQRKFDNLTKAERGGLSELDKAGFIKRQLVETRQITKHVAQILDSRMNTKYDENDKLIREVKVITLKSKLVSDFRKDFQFYKVREINNYHHAHD | |
| | AYLNAVVGTALIKKYPKLESEFVYGDYKVYDVRKMIAKSEQEIGKATAKYFFYSNIMNFFKTEITLANGEIRKRPLIETNGETGEIVWDKGRDFATVRKVLSMPQ | |
| | VNIVKKTEVQTGGFSKESILPKRNSDKLIARKKDWDPKKYGGFDSPTVAYSVLVVAKVEKGKSKKLKSVKELLGITIMERSSFEKNPIDFLEAKGYKEVKKDLIIKL | |
| | PKYSLFELENGRKRMLASAGELQKGNELALPSKYVNFLYLASHYEKLKGSPEDNEQKQLFVEQHKHYLDEIIEQISEFSKRVILADANLDKVLSAYNKHRDKPIRE | |
| | QAENIIHLFTLTNLGAPAAFKYFDTTIDRKRYTSTKEVLDATLIHQSITGLYETRIDLSQLGGDKRTADGSEFESPKKKAKVE | |
| PL12050 | MPAAKRVKLDGGTLNIEDEHRLHETSKEPDVSLGSTWLSDFPQAWAETGGMGLAVRQAPLIIPLKATSTPVSIKQYPMSQEARLGIKPHIQRLLDQGILVPCQ | 16,113 |
| | SPWNTPLLPVKKPGTNDYRPVQDLREVNKRVEDIHPTVPNPYNLLSGLPPSHQWYTVLDLKDAFFCLRLHPTSQPLFAFEWRDPEMGISGQLTWTRLPQGF | |
| | KNSPTLFNEALHRDLADFRIQHPDLILLQYVDDLLLAATSELDCQQGTRALLQTLGNLGYRASAKKAQICQKQVKYLGYLLKEGQRWLTEARKETVMGQPTPK | |
| | TPRQLREFLGKAGFCRLFIPGFAEMAAPLYPLTKPGTLFNWGPDQQKAYQEIKQALLTAPALGLPDLTKPFELFVDEKQGYAKGVLTQKLGPWRRPVAYLSKK | |
| | LDPVAAGWPPCLRMVAAIAVLTKDAGKLTMGQPLVILAPHAVEALVKQPPDRWLSNARMTHYQALLLDTDRVQFGPVVALNPATLLPLPEEGLQHNCLDI | |
| | LAEAHGTRPDLTDQPLPDADHTWYTDGSSLLQEGQRKAGAAVTTETEVIWAKALPAGTSAQRAELIALTQALKMAEGKKLNVYTDSRYAFATAHIHGEIYRR | |
| | RGWLTSEGKEIKNKDEILALLKALFLPKRLSIIHCPGHQKGHSAEARGNRMADQAARKAAITETPDTSTLLSGGSSGGSSGSETPGTSESATPESSGGSSGGSS | |
| | MASNFTQFVLVDNGGTGDVTVAPSNFANGIAEWISSNSRSQAYKVTCSVRQSSAQNRKYTIKVEVPKGAWRSYLNMELTIPIFATNSDCELIVKAMQGLLK | |
| | DGNPIPSAIAANSGIYSGGSSGGSSGSETPGTSESATPESSGGSSGGSSDKKYSIGLDIGTNSVGWAVITDEYKVPSKKFKVLGNTDRHSIKKNLIGALLFDSGET | |
| | AEATRLKRTARRRYTRRKNRICYLQEIFSNEMAKVDDSFFHRLEESFLVEEDKKHERHPIFGNIVDEVAYHEKYPTIYHLRKKLVDSTDKADLRLIYLALAHMIKF | |
| | RGHFLIEGDLNPDNSDVDKLFIQLVQTYNQLFEENPINASGVDAKAILSARLSKSRRLENLIAQLPGEKKNGLFGNLIALSLGLTPNFKSNFDLAEDAKLQLSKDT | |
| | YDDDLDNLLAQIGDQYADLFLAAKNLSDAILLSDILRVNTEITKAPLSASMIKRYDEHHQDLTLLKALVRQQLPEKYKEIFFDQSKNGYAGYIDGGASQEEFYKFI | |
| | KPILEKMDGTEELLVKLNREDLLRKQRTFDNGSIPHQIHLGELHAILRRQEDFYPFLKDNREKIEKILTFRIPYYVGPLARGNSRFAWMTRKSEETITPWNFEEVV | |
| | DKGASAQSFIERMTNFDKNLPNEKVLPKHSLLYEYFTVYNELTKVKYVTEGMRKPAFLSGEQKKAIVDLLFKTNRKVTVKQLKEDYFKKIECFDSVEISGVEDRF | |
| | NASLGTYHDLLKIIKDKDFLDNEENEDILEDIVLTLTLFEDREMIEERLKTYAHLFDDKVMKQLKRRRYTGWGRLSRKLINGIRDKQSGKTILDFLKSDGFANRNF | |
| | MQLIHDDSLTFKEDIQKAQVSGQGDSLHEHIANLAGSPAIKKGILQTVKVVDELVKVMGRHKPENIVIEMARENQTTQKGQKNSRERMKRIEEGIKELGSQIL | |
| | KEHPVENTQLQNEKLYLYYLQNGRDMYVDQELDINRLSDYDVDHIVPQSFLKDDSIDNKVLTRSDKARGKSDNVPSEEVVKKMKNYWRQLLNAKLITQRKF | |
| | DNLTKAERGGLSELDKAGFIKRQLVETRQITKHVAQILDSRMNTKYDENDKLIREVKVITLKSKLVSDFRKDFQFYKVREINNYHHAHDAYLNAVVGTALIKKYP | |
| | KLESEFVYGDYKVYDVRKMIAKSEQEIGKATAKYFFYSNIMNFFKTEITLANGEIRKRPLIETNGETGEIVWDKGRDFATVRKVLSMPQVNIVKKTEVQTGGFS | |
| | KESILPKRNSDKLIARKKDWDPKKYGGFDSPTVAYSVLVVAKVEKGKSKKLKSVKELLGITIMERSSFEKNPIDFLEAKGYKEVKKDLIIKLPKYSLFELENGRKRM | |
| | LASAGELQKGNELALPSKYVNFLYLASHYEKLKGSPEDNEQKQLFVEQHKHYLDEIIEQISEFSKRVILADANLDKVLSAYNKHRDKPIREQAENIIHLFTLTNLGA | |
| | PAAFKYFDTTIDRKRYTSTKEVLDATLIHQSITGLYETRIDLSQLGGDKRTADGSEFESPKKKAKVE | |
| PL12051 | MPAAKRVKLDGGTLNIEDEHRLHETSKEPDVSLGSTWLSDFPQAWAETGGMGLAVRQAPLIIPLKATSTPVSIKQYPMSQEARLGIKPHIQRLLDQGILVPCQ | 16,114 |
| | SPWNTPLLPVKKPGTNDYRPVQDLREVNKRVEDIHPTVPNPYNLLSGLPPSHQWYTVLDLKDAFFCLRLHPTSQPLFAFEWRDPEMGISGQLTWTRLPQGF | |
| | KNSPTLFNEALHRDLADFRIQHPDLILLQYVDDLLLAATSELDCQQGTRALLQTLGNLGYRASAKKAQICQKQVKYLGYLLKEGQRWLTEARKETVMGQPTPK | |
| | TPRQLREFLGKAGFCRLFIPGFAEMAAPLYPLTKPGTLFNWGPDQQKAYQEIKQALLTAPALGLPDLTKPFELFVDEKQGYAKGVLTQKLGPWRRPVAYLSKK | |
| | LDPVAAGWPPCLRMVAAIAVLTKDAGKLTMGQPLVILAPHAVEALVKQPPDRWLSNARMTHYQALLLDTDRVQFGPVVALNPATLLPLPEEGLQHNCLDI | |
| | LAEAHGTRPDLTDQPLPDADHTWYTDGSSLLQEGQRKAGAAVTTETEVIWAKALPAGTSAQRAELIALTQALKMAEGKKLNVYTDSRYAFATAHIHGEIYRR | |
| | RGWLTSEGKEIKNKDEILALLKALFLPKRLSIIHCPGHQKGHSAEARGNRMADQAARKAAITETPDTSTLLSGGSSGGSSGSETPGTSESATPESSGGSSGGSS | |
| | MASNFTQFVLVDNGGTGDVTVAPSNFANGIAEWISSNSRSQAYKVTCSVRQSSAQNRKYTIKVEVPKGAWRSYLNMELTIPIFATNSDCELIVKAMQGLLK | |
| | DGNPIPSAIAANSGIYGSSGSSGSSGSSGSSGSSDKKYSIGLDIGTNSVGWAVITDEYKVPSKKFKVLGNTDRHSIKKNLIGALLFDSGETAEATRLKRTARRRYT | |
| | RRKNRICYLQEIFSNEMAKVDDSFFHRLEESFLVEEDKKHERHPIFGNIVDEVAYHEKYPTIYHLRKKLVDSTDKADLRLIYLALAHMIKFRGHFLIEGDLNPDNS | |
| | DVDKLFIQLVQTYNQLFEENPINASGVDAKAILSARLSKSRRLENLIAQLPGEKKNGLFGNLIALSLGLTPNFKSNFDLAEDAKLQLSKDTYDDDLDNLLAQIGD | |
| | QYADLFLAAKNLSDAILLSDILRVNTEITKAPLSASMIKRYDEHHQDLTLLKALVRQQLPEKYKEIFFDQSKNGYAGYIDGGASQEEFYKFIKPILEKMDGTEELLV | |
| | KLNREDLLRKQRTFDNGSIPHQIHLGELHAILRRQEDFYPFLKDNREKIEKILTFRIPYYVGPLARGNSRFAWMTRKSEETITPWNFEEVVDKGASAQSFIERMT | |
| | NFDKNLPNEKVLPKHSLLYEYFTVYNELTKVKYVTEGMRKPAFLSGEQKKAIVDLLFKTNRKVTVKQLKEDYFKKIECFDSVEISGVEDRFNASLGTYHDLLKIIK | |
| | DKDFLDNEENEDILEDIVLTLTLFEDREMIEERLKTYAHLFDDKVMKQLKRRRYTGWGRLSRKLINGIRDKQSGKTILDFLKSDGFANRNFMQLIHDDSLTFKE | |
| | DIQKAQVSGQGDSLHEHIANLAGSPAIKKGILQTVKVVDELVKVMGRHKPENIVIEMARENQTTQKGQKNSRERMKRIEEGIKELGSQILKEHPVENTQLQN | |
| | EKLYLYYLQNGRDMYVDQELDINRLSDYDVDHIVPQSFLKDDSIDNKVLTRSDKARGKSDNVPSEEVVKKMKNYWRQLLNAKLITQRKFDNLTKAERGGLSE | |
| | LDKAGFIKRQLVETRQITKHVAQILDSRMNTKYDENDKLIREVKVITLKSKLVSDFRKDFQFYKVREINNYHHAHDAYLNAVVGTALIKKYPKLESEFVYGDYKV | |
| | YDVRKMIAKSEQEIGKATAKYFFYSNIMNFFKTEITLANGEIRKRPLIETNGETGEIVWDKGRDFATVRKVLSMPQVNIVKKTEVQTGGFSKESILPKRNSDKLI | |
| | ARKKDWDPKKYGGFDSPTVAYSVLVVAKVEKGKSKKLKSVKELLGITIMERSSFEKNPIDFLEAKGYKEVKKDLIIKLPKYSLFELENGRKRMLASAGELQKGNEL | |
| | ALPSKYVNFLYLASHYEKLKGSPEDNEQKQLFVEQHKHYLDEIIEQISEFSKRVILADANLDKVLSAYNKHRDKPIREQAENIIHLFTLTNLGAPAAFKYFDTTIDR | |
| | KRYTSTKEVLDATLIHQSITGLYETRIDLSQLGGDKRTADGSEFESPKKKAKVE | |
| PL12052 | MPAAKRVKLDGGTLNIEDEHRLHETSKEPDVSLGSTWLSDFPQAWAETGGMGLAVRQAPLIIPLKATSTPVSIKQYPMSQEARLGIKPHIQRLLDQGILVPCQ | 16,115 |
| | SPWNTPLLPVKKPGTNDYRPVQDLREVNKRVEDIHPTVPNPYNLLSGLPPSHQWYTVLDLKDAFFCLRLHPTSQPLFAFEWRDPEMGISGQLTWTRLPQGF | |
| | KNSPTLFNEALHRDLADFRIQHPDLILLQYVDDLLLAATSELDCQQGTRALLQTLGNLGYRASAKKAQICQKQVKYLGYLLKEGQRWLTEARKETVMGQPTPK | |
| | TPRQLREFLGKAGFCRLFIPGFAEMAAPLYPLTKPGTLFNWGPDQQKAYQEIKQALLTAPALGLPDLTKPFELFVDEKQGYAKGVLTQKLGPWRRPVAYLSKK | |
| | LDPVAAGWPPCLRMVAAIAVLTKDAGKLTMGQPLVILAPHAVEALVKQPPDRWLSNARMTHYQALLLDTDRVQFGPVVALNPATLLPLPEEGLQHNCLDI | |
| | LAEAHGTRPDLTDQPLPDADHTWYTDGSSLLQEGQRKAGAAVTTETEVIWAKALPAGTSAQRAELIALTQALKMAEGKKLNVYTDSRYAFATAHIHGEIYRR | |
| | RGWLTSEGKEIKNKDEILALLKALFLPKRLSIIHCPGHQKGHSAEARGNRMADQAARKAAITETPDTSTLLSGGSSGGSSGSETPGTSESATPESSGGSSGGSS | |
| | MASNFTQFVLVDNGGTGDVTVAPSNFANGIAEWISSNSRSQAYKVTCSVRQSSAQNRKYTIKVEVPKGAWRSYLNMELTIPIFATNSDCELIVKAMQGLLK | |
| | DGNPIPSAIAANSGIYGSSGGGEAAAKDKKYSIGLDIGTNSVGWAVITDEYKVPSKKFKVLGNTDRHSIKKNLIGALLFDSGETAEATRLKRTARRRYTRRKNRI | |
| | CYLQEIFSNEMAKVDDSFFHRLEESFLVEEDKKHERHPIFGNIVDEVAYHEKYPTIYHLRKKLVDSTDKADLRLIYLALAHMIKFRGHFLIEGDLNPDNSDVDKLF | |
| | IQLVQTYNQLFEENPINASGVDAKAILSARLSKSRRLENLIAQLPGEKKNGLFGNLIALSLGLTPNFKSNFDLAEDAKLQLSKDTYDDDLDNLLAQIGDQYADLFL | |
| | AAKNLSDAILLSDILRVNTEITKAPLSASMIKRYDEHHQDLTLLKALVRQQLPEKYKEIFFDQSKNGYAGYIDGGASQEEFYKFIKPILEKMDGTEELLVKLNREDL | |
| | LRKQRTFDNGSIPHQIHLGELHAILRRQEDFYPFLKDNREKIEKILTFRIPYYVGPLARGNSRFAWMTRKSEETITPWNFEEVVDKGASAQSFIERMTNFDKNL | |
| | PNEKVLPKHSLLYEYFTVYNELTKVKYVTEGMRKPAFLSGEQKKAIVDLLFKTNRKVTVKQLKEDYFKKIECFDSVEISGVEDRFNASLGTYHDLLKIIKDKDFLD | |
| | NEENEDILEDIVLTLTLFEDREMIEERLKTYAHLFDDKVMKQLKRRRYTGWGRLSRKLINGIRDKQSGKTILDFLKSDGFANRNFMQLIHDDSLTFKEDIQKAQ | |
| | VSGQGDSLHEHIANLAGSPAIKKGILQTVKVVDELVKVMGRHKPENIVIEMARENQTTQKGQKNSRERMKRIEEGIKELGSQILKEHPVENTQLQNEKLYLYY | |
| | LQNGRDMYVDQELDINRLSDYDVDHIVPQSFLKDDSIDNKVLTRSDKARGKSDNVPSEEVVKKMKNYWRQLLNAKLITQRKFDNLTKAERGGLSELDKAGFI | |
| | KRQLVETRQITKHVAQILDSRMNTKYDENDKLIREVKVITLKSKLVSDFRKDFQFYKVREINNYHHAHDAYLNAVVGTALIKKYPKLESEFVYGDYKVYDVRKM | |
| | IAKSEQEIGKATAKYFFYSNIMNFFKTEITLANGEIRKRPLIETNGETGEIVWDKGRDFATVRKVLSMPQVNIVKKTEVQTGGFSKESILPKRNSDKLIARKKDW | |
| | DPKKYGGFDSPTVAYSVLVVAKVEKGKSKKLKSVKELLGITIMERSSFEKNPIDFLEAKGYKEVKKDLIIKLPKYSLFELENGRKRMLASAGELQKGNELALPSKYV | |
| | NFLYLASHYEKLKGSPEDNEQKQLFVEQHKHYLDEIIEQISEFSKRVILADANLDKVLSAYNKHRDKPIREQAENIIHLFTLTNLGAPAAFKYFDTTIDRKRYTSTK | |
| | EVLDATLIHQSITGLYETRIDLSQLGGDKRTADGSEFESPKKKAKVE | |
| PL12053 | MPAAKRVKLDGGTLNIEDEHRLHETSKEPDVSLGSTWLSDFPQAWAETGGMGLAVRQAPLIIPLKATSTPVSIKQYPMSQEARLGIKPHIQRLLDQGILVPCQ | 16,116 |
| | SPWNTPLLPVKKPGTNDYRPVQDLREVNKRVEDIHPTVPNPYNLLSGLPPSHQWYTVLDLKDAFFCLRLHPTSQPLFAFEWRDPEMGISGQLTWTRLPQGF | |
| | KNSPTLFNEALHRDLADFRIQHPDLILLQYVDDLLLAATSELDCQQGTRALLQTLGNLGYRASAKKAQICQKQVKYLGYLLKEGQRWLTEARKETVMGQPTPK | |
| | TPRQLREFLGKAGFCRLFIPGFAEMAAPLYPLTKPGTLFNWGPDQQKAYQEIKQALLTAPALGLPDLTKPFELFVDEKQGYAKGVLTQKLGPWRRPVAYLSKK | |
| | LDPVAAGWPPCLRMVAAIAVLTKDAGKLTMGQPLVILAPHAVEALVKQPPDRWLSNARMTHYQALLLDTDRVQFGPVVALNPATLLPLPEEGLQHNCLDI | |
| | LAEAHGTRPDLTDQPLPDADHTWYTDGSSLLQEGQRKAGAAVTTETEVIWAKALPAGTSAQRAELIALTQALKMAEGKKLNVYTDSRYAFATAHIHGEIYRR | |
| | RGWLTSEGKEIKNKDEILALLKALFLPKRLSIIHCPGHQKGHSAEARGNRMADQAARKAAITETPDTSTLLSGGSSGGSSGSETPGTSESATPESSGGSSGGSS | |
| | MASNFTQFVLVDNGGTGDVTVAPSNFANGIAEWISSNSRSQAYKVTCSVRQSSAQNRKYTIKVEVPKGAWRSYLNMELTIPIFATNSDCELIVKAMQGLLK | |
| | DGNPIPSAIAANSGIYGGSGGSMASNFTQFVLVDNGGTGDVTVAPSNFANGIAEWISSNSRSQAYKVTCSVRQSSAQNRKYTIKVEVPKGAWRSYLNMELT | |
| | IPIFATNSDCELIVKAMQGLLKDGNPIPSAIAANSGIYAEAAAKEAAAKEAAAKEAAAKALEAEAAAKEAAAKEAAAKEAAAKADKKYSIGLDIGTNSVGWAVI | |
| | TDEYKVPSKKFKVLGNTDRHSIKKNLIGALLFDSGETAEATRLKRTARRRYTRRKNRICYLQEIFSNEMAKVDDSFFHRLEESFLVEEDKKHERHPIFGNIVDEVA | |
| | YHEKYPTIYHLRKKLVDSTDKADLRLIYLALAHMIKFRGHFLIEGDLNPDNSDVDKLFIQLVQTYNQLFEENPINASGVDAKAILSARLSKSRRLENLIAQLPGEKK | |
| | NGLFGNLIALSLGLTPNFKSNFDLAEDAKLQLSKDTYDDDLDNLLAQIGDQYADLFLAAKNLSDAILLSDILRVNTEITKAPLSASMIKRYDEHHQDLTLLKALVR | |
| | QQLPEKYKEIFFDQSKNGYAGYIDGGASQEEFYKFIKPILEKMDGTEELLVKLNREDLLRKQRTFDNGSIPHQIHLGELHAILRRQEDFYPFLKDNREKIEKILTFRI | |
| | PYYVGPLARGNSRFAWMTRKSEETITPWNFEEVVDKGASAQSFIERMTNFDKNLPNEKVLPKHSLLYEYFTVYNELTKVKYVTEGMRKPAFLSGEQKKAIVD | |
| | LLFKTNRKVTVKQLKEDYFKKIECFDSVEISGVEDRFNASLGTYHDLLKIIKDKDFLDNEENEDILEDIVLTLTLFEDREMIEERLKTYAHLFDDKVMKQLKRRRYT | |
| | GWGRLSRKLINGIRDKQSGKTILDFLKSDGFANRNFMQLIHDDSLTFKEDIQKAQVSGQGDSLHEHIANLAGSPAIKKGILQTVKVVDELVKVMGRHKPENIV | |
| | IEMARENQTTQKGQKNSRERMKRIEEGIKELGSQILKEHPVENTQLQNEKLYLYYLQNGRDMYVDQELDINRLSDYDVDHIVPQSFLKDDSIDNKVLTRSDKA | |
| | RGKSDNVPSEEVVKKMKNYWRQLLNAKLITQRKFDNLTKAERGGLSELDKAGFIKRQLVETRQITKHVAQILDSRMNTKYDENDKLIREVKVITLKSKLVSDFR | |
| | KDFQFYKVREINNYHHAHDAYLNAVVGTALIKKYPKLESEFVYGDYKVYDVRKMIAKSEQEIGKATAKYFFYSNIMNFFKTEITLANGEIRKRPLIETNGETGEIV | |
| | WDKGRDFATVRKVLSMPQVNIVKKTEVQTGGFSKESILPKRNSDKLIARKKDWDPKKYGGFDSPTVAYSVLVVAKVEKGKSKKLKSVKELLGITIMERSSFEK | |
| | NPIDFLEAKGYKEVKKDLIIKLPKYSLFELENGRKRMLASAGELQKGNELALPSKYVNFLYLASHYEKLKGSPEDNEQKQLFVEQHKHYLDEIIEQISEFSKRVILA | |
| | DANLDKVLSAYNKHRDKPIREQAENIIHLFTLTNLGAPAAFKYFDTTIDRKRYTSTKEVLDATLIHQSITGLYETRIDLSQLGGDKRTADGSEFESPKKKAKVE | |
| PL12054 | MPAAKRVKLDGGTLNIEDEHRLHETSKEPDVSLGSTWLSDFPQAWAETGGMGLAVRQAPLIIPLKATSTPVSIKQYPMSQEARLGIKPHIQRLLDQGILVPCQ | 16,117 |
| | SPWNTPLLPVKKPGTNDYRPVQDLREVNKRVEDIHPTVPNPYNLLSGLPPSHQWYTVLDLKDAFFCLRLHPTSQPLFAFEWRDPEMGISGQLTWTRLPQGF | |
| | KNSPTLFNEALHRDLADFRIQHPDLILLQYVDDLLLAATSELDCQQGTRALLQTLGNLGYRASAKKAQICQKQVKYLGYLLKEGQRWLTEARKETVMGQPTPK | |
| | TPRQLREFLGKAGFCRLFIPGFAEMAAPLYPLTKPGTLFNWGPDQQKAYQEIKQALLTAPALGLPDLTKPFELFVDEKQGYAKGVLTQKLGPWRRPVAYLSKK | |
| | LDPVAAGWPPCLRMVAAIAVLTKDAGKLTMGQPLVILAPHAVEALVKQPPDRWLSNARMTHYQALLLDTDRVQFGPVVALNPATLLPLPEEGLQHNCLDI | |
| | LAEAHGTRPDLTDQPLPDADHTWYTDGSSLLQEGQRKAGAAVTTETEVIWAKALPAGTSAQRAELIALTQALKMAEGKKLNVYTDSRYAFATAHIHGEIYRR | |
| | RGWLTSEGKEIKNKDEILALLKALFLPKRLSIIHCPGHQKGHSAEARGNRMADQAARKAAITETPDTSTLLSGGSSGGSSGSETPGTSESATPESSGGSSGGSS | |
| | MASNFTQFVLVDNGGTGDVTVAPSNFANGIAEWISSNSRSQAYKVTCSVRQSSAQNRKYTIKVEVPKGAWRSYLNMELTIPIFATNSDCELIVKAMQGLLK | |
| | DGNPIPSAIAANSGIYGGSGGSMASNFTQFVLVDNGGTGDVTVAPSNFANGIAEWISSNSRSQAYKVTCSVRQSSAQNRKYTIKVEVPKGAWRSYLNMELT | |
| | IPIFATNSDCELIVKAMQGLLKDGNPIPSAIAANSGIYSGGSSGGSSGSETPGTSESATPESSGGSSGGSSDKKYSIGLDIGTNSVGWAVITDEYKVPSKKFKVLG | |
| | NTDRHSIKKNLIGALLFDSGETAEATRLKRTARRRYTRRKNRICYLQEIFSNEMAKVDDSFFHRLEESFLVEEDKKHERHPIFGNIVDEVAYHEKYPTIYHLRKKLV | |
| | DSTDKADLRLIYLALAHMIKFRGHFLIEGDLNPDNSDVDKLFIQLVQTYNQLFEENPINASGVDAKAILSARLSKSRRLENLIAQLPGEKKNGLFGNLIALSLGLTP | |
| | NFKSNFDLAEDAKLQLSKDTYDDDLDNLLAQIGDQYADLFLAAKNLSDAILLSDILRVNTEITKAPLSASMIKRYDEHHQDLTLLKALVRQQLPEKYKEIFFDQSK | |
| | NGYAGYIDGGASQEEFYKFIKPILEKMDGTEELLVKLNREDLLRKQRTFDNGSIPHQIHLGELHAILRRQEDFYPFLKDNREKIEKILTFRIPYYVGPLARGNSRFA | |
| | WMTRKSEETITPWNFEEVVDKGASAQSFIERMTNFDKNLPNEKVLPKHSLLYEYFTVYNELTKVKYVTEGMRKPAFLSGEQKKAIVDLLFKTNRKVTVKQLKE | |
| | DYFKKIECFDSVEISGVEDRFNASLGTYHDLLKIIKDKDFLDNEENEDILEDIVLTLTLFEDREMIEERLKTYAHLFDDKVMKQLKRRRYTGWGRLSRKLINGIRDK | |
| | QSGKTILDFLKSDGFANRNFMQLIHDDSLTFKEDIQKAQVSGQGDSLHEHIANLAGSPAIKKGILQTVKVVDELVKVMGRHKPENIVIEMARENQTTQKGQK | |
| | NSRERMKRIEEGIKELGSQILKEHPVENTQLQNEKLYLYYLQNGRDMYVDQELDINRLSDYDVDHIVPQSFLKDDSIDNKVLTRSDKARGKSDNVPSEEVVKK | |
| | MKNYWRQLLNAKLITQRKFDNLTKAERGGLSELDKAGFIKRQLVETRQITKHVAQILDSRMNTKYDENDKLIREVKVITLKSKLVSDFRKDFQFYKVREINNYH | |
| | HAHDAYLNAVVGTALIKKYPKLESEFVYGDYKVYDVRKMIAKSEQEIGKATAKYFFYSNIMNFFKTEITLANGEIRKRPLIETNGETGEIVWDKGRDFATVRKVL | |
| | SMPQVNIVKKTEVQTGGFSKESILPKRNSDKLIARKKDWDPKKYGGFDSPTVAYSVLVVAKVEKGKSKKLKSVKELLGITIMERSSFEKNPIDFLEAKGYKEVKK | |
| | DLIIKLPKYSLFELENGRKRMLASAGELQKGNELALPSKYVNFLYLASHYEKLKGSPEDNEQKQLFVEQHKHYLDEIIEQISEFSKRVILADANLDKVLSAYNKHR | |
| | DKPIREQAENIIHLFTLTNLGAPAAFKYFDTTIDRKRYTSTKEVLDATLIHQSITGLYETRIDLSQLGGDKRTADGSEFESPKKKAKVE | |
| PL12055 | MPAAKRVKLDGGTLNIEDEHRLHETSKEPDVSLGSTWLSDFPQAWAETGGMGLAVRQAPLIIPLKATSTPVSIKQYPMSQEARLGIKPHIQRLLDQGILVPCQ | 16,118 |
| | SPWNTPLLPVKKPGTNDYRPVQDLREVNKRVEDIHPTVPNPYNLLSGLPPSHQWYTVLDLKDAFFCLRLHPTSQPLFAFEWRDPEMGISGQLTWTRLPQGF | |
| | KNSPTLFNEALHRDLADFRIQHPDLILLQYVDDLLLAATSELDCQQGTRALLQTLGNLGYRASAKKAQICQKQVKYLGYLLKEGQRWLTEARKETVMGQPTPK | |
| | TPRQLREFLGKAGFCRLFIPGFAEMAAPLYPLTKPGTLFNWGPDQQKAYQEIKQALLTAPALGLPDLTKPFELFVDEKQGYAKGVLTQKLGPWRRPVAYLSKK | |
| | LDPVAAGWPPCLRMVAAIAVLTKDAGKLTMGQPLVILAPHAVEALVKQPPDRWLSNARMTHYQALLLDTDRVQFGPVVALNPATLLPLPEEGLQHNCLDI | |
| | LAEAHGTRPDLTDQPLPDADHTWYTDGSSLLQEGQRKAGAAVTTETEVIWAKALPAGTSAQRAELIALTQALKMAEGKKLNVYTDSRYAFATAHIHGEIYRR | |
| | RGWLTSEGKEIKNKDEILALLKALFLPKRLSIIHCPGHQKGHSAEARGNRMADQAARKAAITETPDTSTLLSGGSSGGSSGSETPGTSESATPESSGGSSGGSS | |
| | MASNFTQFVLVDNGGTGDVTVAPSNFANGIAEWISSNSRSQAYKVTCSVRQSSAQNRKYTIKVEVPKGAWRSYLNMELTIPIFATNSDCELIVKAMQGLLK | |
| | DGNPIPSAIAANSGIYGGSGGSMASNFTQFVLVDNGGTGDVTVAPSNFANGIAEWISSNSRSQAYKVTCSVRQSSAQNRKYTIKVEVPKGAWRSYLNMELT | |
| | IPIFATNSDCELIVKAMQGLLKDGNPIPSAIAANSGIYGSSGSSGSSGSSGSSGSSDKKYSIGLDIGTNSVGWAVITDEYKVPSKKFKVLGNTDRHSIKKNLIGALL | |
| | FDSGETAEATRLKRTARRRYTRRKNRICYLQEIFSNEMAKVDDSFFHRLEESFLVEEDKKHERHPIFGNIVDEVAYHEKYPTIYHLRKKLVDSTDKADLRLIYLALA | |
| | HMIKFRGHFLIEGDLNPDNSDVDKLFIQLVQTYNQLFEENPINASGVDAKAILSARLSKSRRLENLIAQLPGEKKNGLFGNLIALSLGLTPNFKSNFDLAEDAKL | |
| | QLSKDTYDDDLDNLLAQIGDQYADLFLAAKNLSDAILLSDILRVNTEITKAPLSASMIKRYDEHHQDLTLLKALVRQQLPEKYKEIFFDQSKNGYAGYIDGGASQ | |
| | EEFYKFIKPILEKMDGTEELLVKLNREDLLRKQRTFDNGSIPHQIHLGELHAILRRQEDFYPFLKDNREKIEKILTFRIPYYVGPLARGNSRFAWMTRKSEETITPW | |
| | NFEEVVDKGASAQSFIERMTNFDKNLPNEKVLPKHSLLYEYFTVYNELTKVKYVTEGMRKPAFLSGEQKKAIVDLLFKTNRKVTVKQLKEDYFKKIECFDSVEIS | |
| | GVEDRFNASLGTYHDLLKIIKDKDFLDNEENEDILEDIVLTLTLFEDREMIEERLKTYAHLFDDKVMKQLKRRRYTGWGRLSRKLINGIRDKQSGKTILDFLKSDG | |
| | FANRNFMQLIHDDSLTFKEDIQKAQVSGQGDSLHEHIANLAGSPAIKKGILQTVKVVDELVKVMGRHKPENIVIEMARENQTTQKGQKNSRERMKRIEEGIK | |
| | ELGSQILKEHPVENTQLQNEKLYLYYLQNGRDMYVDQELDINRLSDYDVDHIVPQSFLKDDSIDNKVLTRSDKARGKSDNVPSEEVVKKMKNYWRQLLNAKL | |
| | ITQRKFDNLTKAERGGLSELDKAGFIKRQLVETRQITKHVAQILDSRMNTKYDENDKLIREVKVITLKSKLVSDFRKDFQFYKVREINNYHHAHDAYLNAVVGT | |
| | ALIKKYPKLESEFVYGDYKVYDVRKMIAKSEQEIGKATAKYFFYSNIMNFFKTEITLANGEIRKRPLIETNGETGEIVWDKGRDFATVRKVLSMPQVNIVKKTEV | |
| | QTGGFSKESILPKRNSDKLIARKKDWDPKKYGGFDSPTVAYSVLVVAKVEKGKSKKLKSVKELLGITIMERSSFEKNPIDFLEAKGYKEVKKDLIIKLPKYSLFELEN | |
| | GRKRMLASAGELQKGNELALPSKYVNFLYLASHYEKLKGSPEDNEQKQLFVEQHKHYLDEIIEQISEFSKRVILADANLDKVLSAYNKHRDKPIREQAENIIHLFT | |
| | LTNLGAPAAFKYFDTTIDRKRYTSTKEVLDATLIHQSITGLYETRIDLSQLGGDKRTADGSEFESPKKKAKVE | |
| PL12056 | MPAAKRVKLDGGTLNIEDEHRLHETSKEPDVSLGSTWLSDFPQAWAETGGMGLAVRQAPLIIPLKATSTPVSIKQYPMSQEARLGIKPHIQRLLDQGILVPCQ | 16,119 |
| | SPWNTPLLPVKKPGTNDYRPVQDLREVNKRVEDIHPTVPNPYNLLSGLPPSHQWYTVLDLKDAFFCLRLHPTSQPLFAFEWRDPEMGISGQLTWTRLPQGF | |
| | KNSPTLFNEALHRDLADFRIQHPDLILLQYVDDLLLAATSELDCQQGTRALLQTLGNLGYRASAKKAQICQKQVKYLGYLLKEGQRWLTEARKETVMGQPTPK | |
| | TPRQLREFLGKAGFCRLFIPGFAEMAAPLYPLTKPGTLFNWGPDQQKAYQEIKQALLTAPALGLPDLTKPFELFVDEKQGYAKGVLTQKLGPWRRPVAYLSKK | |
| | LDPVAAGWPPCLRMVAAIAVLTKDAGKLTMGQPLVILAPHAVEALVKQPPDRWLSNARMTHYQALLLDTDRVQFGPVVALNPATLLPLPEEGLQHNCLDI | |
| | LAEAHGTRPDLTDQPLPDADHTWYTDGSSLLQEGQRKAGAAVTTETEVIWAKALPAGTSAQRAELIALTQALKMAEGKKLNVYTDSRYAFATAHIHGEIYRR | |
| | RGWLTSEGKEIKNKDEILALLKALFLPKRLSIIHCPGHQKGHSAEARGNRMADQAARKAAITETPDTSTLLSGGSSGGSSGSETPGTSESATPESSGGSSGGSS | |
| | MASNFTQFVLVDNGGTGDVTVAPSNFANGIAEWISSNSRSQAYKVTCSVRQSSAQNRKYTIKVEVPKGAWRSYLNMELTIPIFATNSDCELIVKAMQGLLK | |
| | DGNPIPSAIAANSGIYGGSGGSMASNFTQFVLVDNGGTGDVTVAPSNFANGIAEWISSNSRSQAYKVTCSVRQSSAQNRKYTIKVEVPKGAWRSYLNMELT | |
| | IPIFATNSDCELIVKAMQGLLKDGNPIPSAIAANSGIYGSSGGGEAAAKDKKYSIGLDIGTNSVGWAVITDEYKVPSKKFKVLGNTDRHSIKKNLIGALLFDSGET | |
| | AEATRLKRTARRRYTRRKNRICYLQEIFSNEMAKVDDSFFHRLEESFLVEEDKKHERHPIFGNIVDEVAYHEKYPTIYHLRKKLVDSTDKADLRLIYLALAHMIKF | |
| | RGHFLIEGDLNPDNSDVDKLFIQLVQTYNQLFEENPINASGVDAKAILSARLSKSRRLENLIAQLPGEKKNGLFGNLIALSLGLTPNFKSNFDLAEDAKLQLSKDT | |
| | YDDDLDNLLAQIGDQYADLFLAAKNLSDAILLSDILRVNTEITKAPLSASMIKRYDEHHQDLTLLKALVRQQLPEKYKEIFFDQSKNGYAGYIDGGASQEEFYKFI | |
| | KPILEKMDGTEELLVKLNREDLLRKQRTFDNGSIPHQIHLGELHAILRRQEDFYPFLKDNREKIEKILTFRIPYYVGPLARGNSRFAWMTRKSEETITPWNFEEVV | |
| | DKGASAQSFIERMTNFDKNLPNEKVLPKHSLLYEYFTVYNELTKVKYVTEGMRKPAFLSGEQKKAIVDLLFKTNRKVTVKQLKEDYFKKIECFDSVEISGVEDRF | |
| | NASLGTYHDLLKIIKDKDFLDNEENEDILEDIVLTLTLFEDREMIEERLKTYAHLFDDKVMKQLKRRRYTGWGRLSRKLINGIRDKQSGKTILDFLKSDGFANRNF | |
| | MQLIHDDSLTFKEDIQKAQVSGQGDSLHEHIANLAGSPAIKKGILQTVKVVDELVKVMGRHKPENIVIEMARENQTTQKGQKNSRERMKRIEEGIKELGSQIL | |
| | KEHPVENTQLQNEKLYLYYLQNGRDMYVDQELDINRLSDYDVDHIVPQSFLKDDSIDNKVLTRSDKARGKSDNVPSEEVVKKMKNYWRQLLNAKLITQRKF | |
| | DNLTKAERGGLSELDKAGFIKRQLVETRQITKHVAQILDSRMNTKYDENDKLIREVKVITLKSKLVSDFRKDFQFYKVREINNYHHAHDAYLNAVVGTALIKKYP | |
| | KLESEFVYGDYKVYDVRKMIAKSEQEIGKATAKYFFYSNIMNFFKTEITLANGEIRKRPLIETNGETGEIVWDKGRDFATVRKVLSMPQVNIVKKTEVQTGGFS | |
| | KESILPKRNSDKLIARKKDWDPKKYGGFDSPTVAYSVLVVAKVEKGKSKKLKSVKELLGITIMERSSFEKNPIDFLEAKGYKEVKKDLIIKLPKYSLFELENGRKRM | |
| | LASAGELQKGNELALPSKYVNFLYLASHYEKLKGSPEDNEQKQLFVEQHKHYLDEIIEQISEFSKRVILADANLDKVLSAYNKHRDKPIREQAENIIHLFTLTNLGA | |
| | PAAFKYFDTTIDRKRYTSTKEVLDATLIHQSITGLYETRIDLSQLGGDKRTADGSEFESPKKKAKVE | |
| PL12057 | MPAAKRVKLDGGTLNIEDEHRLHETSKEPDVSLGSTWLSDFPQAWAETGGMGLAVRQAPLIIPLKATSTPVSIKQYPMSQEARLGIKPHIQRLLDQGILVPCQ | 16,120 |
| | SPWNTPLLPVKKPGTNDYRPVQDLREVNKRVEDIHPTVPNPYNLLSGLPPSHQWYTVLDLKDAFFCLRLHPTSQPLFAFEWRDPEMGISGQLTWTRLPQGF | |
| | KNSPTLFNEALHRDLADFRIQHPDLILLQYVDDLLLAATSELDCQQGTRALLQTLGNLGYRASAKKAQICQKQVKYLGYLLKEGQRWLTEARKETVMGQPTPK | |
| | TPRQLREFLGKAGFCRLFIPGFAEMAAPLYPLTKPGTLFNWGPDQQKAYQEIKQALLTAPALGLPDLTKPFELFVDEKQGYAKGVLTQKLGPWRRPVAYLSKK | |
| | LDPVAAGWPPCLRMVAAIAVLTKDAGKLTMGQPLVILAPHAVEALVKQPPDRWLSNARMTHYQALLLDTDRVQFGPVVALNPATLLPLPEEGLQHNCLDI | |
| | LAEAHGTRPDLTDQPLPDADHTWYTDGSSLLQEGQRKAGAAVTTETEVIWAKALPAGTSAQRAELIALTQALKMAEGKKLNVYTDSRYAFATAHIHGEIYRR | |
| | RGWLTSEGKEIKNKDEILALLKALFLPKRLSIIHCPGHQKGHSAEARGNRMADQAARKAAITETPDTSTLLSGGSSGGSSGSETPGTSESATPESSGGSSGGSS | |
| | MASNFTQFVLVDNGGTGDVTVAPSNFANGIAEWISSNSRSQAYKVTCSVRQSSAQNRKYTIKVEVPKGAWRSYLNMELTIPIFATNSDCELIVKAMQGLLK | |
| | DGNPIPSAIAANSGIYGGSGGSMASNFTQFVLVDNGGTGDVTVAPSNFANGIAEWISSNSRSQAYKVTCSVRQSSAQNRKYTIKVEVPKGAWRSYLNMELT | |
| | IPIFATNSDCELIVKAMQGLLKDGNPIPSAIAANSGIYGGGSGGGSGGGSGGGSMASNFTQFVLVDNGGTGDVTVAPSNFANGIAEWISSNSRSQAYKVTCS | |
| | VRQSSAQNRKYTIKVEVPKGAWRSYLNMELTIPIFATNSDCELIVKAMQGLLKDGNPIPSAIAANSGIYGGSGGSMASNFTQFVLVDNGGTGDVTVAPSNFA | |
| | NGIAEWISSNSRSQAYKVTCSVRQSSAQNRKYTIKVEVPKGAWRSYLNMELTIPIFATNSDCELIVKAMQGLLKDGNPIPSAIAANSGIYAEAAAKEAAAKEAA | |
| | AKEAAAKALEAEAAAKEAAAKEAAAKEAAAKADKKYSIGLDIGTNSVGWAVITDEYKVPSKKFKVLGNTDRHSIKKNLIGALLFDSGETAEATRLKRTARRRYT | |
| | RRKNRICYLQEIFSNEMAKVDDSFFHRLEESFLVEEDKKHERHPIFGNIVDEVAYHEKYPTIYHLRKKLVDSTDKADLRLIYLALAHMIKFRGHFLIEGDLNPDNS | |
| | DVDKLFIQLVQTYNQLFEENPINASGVDAKAILSARLSKSRRLENLIAQLPGEKKNGLFGNLIALSLGLTPNFKSNFDLAEDAKLQLSKDTYDDDLDNLLAQIGD | |
| | QYADLFLAAKNLSDAILLSDILRVNTEITKAPLSASMIKRYDEHHQDLTLLKALVRQQLPEKYKEIFFDQSKNGYAGYIDGGASQEEFYKFIKPILEKMDGTEELLV | |
| | KLNREDLLRKQRTFDNGSIPHQIHLGELHAILRRQEDFYPFLKDNREKIEKILTFRIPYYVGPLARGNSRFAWMTRKSEETITPWNFEEVVDKGASAQSFIERMT | |
| | NFDKNLPNEKVLPKHSLLYEYFTVYNELTKVKYVTEGMRKPAFLSGEQKKAIVDLLFKTNRKVTVKQLKEDYFKKIECFDSVEISGVEDRFNASLGTYHDLLKIIK | |
| | DKDFLDNEENEDILEDIVLTLTLFEDREMIEERLKTYAHLFDDKVMKQLKRRRYTGWGRLSRKLINGIRDKQSGKTILDFLKSDGFANRNFMQLIHDDSLTFKE | |
| | DIQKAQVSGQGDSLHEHIANLAGSPAIKKGILQTVKVVDELVKVMGRHKPENIVIEMARENQTTQKGQKNSRERMKRIEEGIKELGSQILKEHPVENTQLQN | |
| | EKLYLYYLQNGRDMYVDQELDINRLSDYDVDHIVPQSFLKDDSIDNKVLTRSDKARGKSDNVPSEEVVKKMKNYWRQLLNAKLITQRKFDNLTKAERGGLSE | |
| | LDKAGFIKRQLVETRQITKHVAQILDSRMNTKYDENDKLIREVKVITLKSKLVSDFRKDFQFYKVREINNYHHAHDAYLNAVVGTALIKKYPKLESEFVYGDYKV | |
| | YDVRKMIAKSEQEIGKATAKYFFYSNIMNFFKTEITLANGEIRKRPLIETNGETGEIVWDKGRDFATVRKVLSMPQVNIVKKTEVQTGGFSKESILPKRNSDKLI | |
| | ARKKDWDPKKYGGFDSPTVAYSVLVVAKVEKGKSKKLKSVKELLGITIMERSSFEKNPIDFLEAKGYKEVKKDLIIKLPKYSLFELENGRKRMLASAGELQKGNEL | |
| | ALPSKYVNFLYLASHYEKLKGSPEDNEQKQLFVEQHKHYLDEIIEQISEFSKRVILADANLDKVLSAYNKHRDKPIREQAENIIHLFTLTNLGAPAAFKYFDTTIDR | |
| | KRYTSTKEVLDATLIHQSITGLYETRIDLSQLGGDKRTADGSEFESPKKKAKVE | |
| PL12058 | MPAAKRVKLDGGTLNIEDEHRLHETSKEPDVSLGSTWLSDFPQAWAETGGMGLAVRQAPLIIPLKATSTPVSIKQYPMSQEARLGIKPHIQRLLDQGILVPCQ | 16,121 |
| | SPWNTPLLPVKKPGTNDYRPVQDLREVNKRVEDIHPTVPNPYNLLSGLPPSHQWYTVLDLKDAFFCLRLHPTSQPLFAFEWRDPEMGISGQLTWTRLPQGF | |
| | KNSPTLFNEALHRDLADFRIQHPDLILLQYVDDLLLAATSELDCQQGTRALLQTLGNLGYRASAKKAQICQKQVKYLGYLLKEGQRWLTEARKETVMGQPTPK | |
| | TPRQLREFLGKAGFCRLFIPGFAEMAAPLYPLTKPGTLFNWGPDQQKAYQEIKQALLTAPALGLPDLTKPFELFVDEKQGYAKGVLTQKLGPWRRPVAYLSKK | |
| | LDPVAAGWPPCLRMVAAIAVLTKDAGKLTMGQPLVILAPHAVEALVKQPPDRWLSNARMTHYQALLLDTDRVQFGPVVALNPATLLPLPEEGLQHNCLDI | |
| | LAEAHGTRPDLTDQPLPDADHTWYTDGSSLLQEGQRKAGAAVTTETEVIWAKALPAGTSAQRAELIALTQALKMAEGKKLNVYTDSRYAFATAHIHGEIYRR | |
| | RGWLTSEGKEIKNKDEILALLKALFLPKRLSIIHCPGHQKGHSAEARGNRMADQAARKAAITETPDTSTLLSGGSSGGSSGSETPGTSESATPESSGGSSGGSS | |
| | MASNFTQFVLVDNGGTGDVTVAPSNFANGIAEWISSNSRSQAYKVTCSVRQSSAQNRKYTIKVEVPKGAWRSYLNMELTIPIFATNSDCELIVKAMQGLLK | |
| | DGNPIPSAIAANSGIYGGSGGSMASNFTQFVLVDNGGTGDVTVAPSNFANGIAEWISSNSRSQAYKVTCSVRQSSAQNRKYTIKVEVPKGAWRSYLNMELT | |
| | IPIFATNSDCELIVKAMQGLLKDGNPIPSAIAANSGIYGGGSGGGSGGGSGGGSMASNFTQFVLVDNGGTGDVTVAPSNFANGIAEWISSNSRSQAYKVTCS | |
| | VRQSSAQNRKYTIKVEVPKGAWRSYLNMELTIPIFATNSDCELIVKAMQGLLKDGNPIPSAIAANSGIYGGSGGSMASNFTQFVLVDNGGTGDVTVAPSNFA | |
| | NGIAEWISSNSRSQAYKVTCSVRQSSAQNRKYTIKVEVPKGAWRSYLNMELTIPIFATNSDCELIVKAMQGLLKDGNPIPSAIAANSGIYSGGSSGGSSGSETP | |
| | GTSESATPESSGGSSGGSSDKKYSIGLDIGTNSVGWAVITDEYKVPSKKFKVLGNTDRHSIKKNLIGALLFDSGETAEATRLKRTARRRYTRRKNRICYLQEIFSN | |
| | EMAKVDDSFFHRLEESFLVEEDKKHERHPIFGNIVDEVAYHEKYPTIYHLRKKLVDSTDKADLRLIYLALAHMIKFRGHFLIEGDLNPDNSDVDKLFIQLVQTYN | |
| | QLFEENPINASGVDAKAILSARLSKSRRLENLIAQLPGEKKNGLFGNLIALSLGLTPNFKSNFDLAEDAKLQLSKDTYDDDLDNLLAQIGDQYADLFLAAKNLSD | |
| | AILLSDILRVNTEITKAPLSASMIKRYDEHHQDLTLLKALVRQQLPEKYKEIFFDQSKNGYAGYIDGGASQEEFYKFIKPILEKMDGTEELLVKLNREDLLRKQRTF | |
| | DNGSIPHQIHLGELHAILRRQEDFYPFLKDNREKIEKILTFRIPYYVGPLARGNSRFAWMTRKSEETITPWNFEEVVDKGASAQSFIERMTNFDKNLPNEKVLP | |
| | KHSLLYEYFTVYNELTKVKYVTEGMRKPAFLSGEQKKAIVDLLFKTNRKVTVKQLKEDYFKKIECFDSVEISGVEDRFNASLGTYHDLLKIIKDKDFLDNEENEDIL | |
| | EDIVLTLTLFEDREMIEERLKTYAHLFDDKVMKQLKRRRYTGWGRLSRKLINGIRDKQSGKTILDFLKSDGFANRNFMQLIHDDSLTFKEDIQKAQVSGQGDSL | |
| | HEHIANLAGSPAIKKGILQTVKVVDELVKVMGRHKPENIVIEMARENQTTQKGQKNSRERMKRIEEGIKELGSQILKEHPVENTQLQNEKLYLYYLQNGRDM | |
| | YVDQELDINRLSDYDVDHIVPQSFLKDDSIDNKVLTRSDKARGKSDNVPSEEVVKKMKNYWRQLLNAKLITQRKFDNLTKAERGGLSELDKAGFIKRQLVETR | |
| | QITKHVAQILDSRMNTKYDENDKLIREVKVITLKSKLVSDFRKDFQFYKVREINNYHHAHDAYLNAVVGTALIKKYPKLESEFVYGDYKVYDVRKMIAKSEQEIG | |
| | KATAKYFFYSNIMNFFKTEITLANGEIRKRPLIETNGETGEIVWDKGRDFATVRKVLSMPQVNIVKKTEVQTGGFSKESILPKRNSDKLIARKKDWDPKKYGGF | |
| | DSPTVAYSVLVVAKVEKGKSKKLKSVKELLGITIMERSSFEKNPIDFLEAKGYKEVKKDLIIKLPKYSLFELENGRKRMLASAGELQKGNELALPSKYVNFLYLASH | |
| | YEKLKGSPEDNEQKQLFVEQHKHYLDEIIEQISEFSKRVILADANLDKVLSAYNKHRDKPIREQAENIIHLFTLTNLGAPAAFKYFDTTIDRKRYTSTKEVLDATLIH | |
| | QSITGLYETRIDLSQLGGDKRTADGSEFESPKKKAKVE | |
| PL12059 | MPAAKRVKLDGGTLNIEDEHRLHETSKEPDVSLGSTWLSDFPQAWAETGGMGLAVRQAPLIIPLKATSTPVSIKQYPMSQEARLGIKPHIQRLLDQGILVPCQ | 16,122 |
| | SPWNTPLLPVKKPGTNDYRPVQDLREVNKRVEDIHPTVPNPYNLLSGLPPSHQWYTVLDLKDAFFCLRLHPTSQPLFAFEWRDPEMGISGQLTWTRLPQGF | |
| | KNSPTLFNEALHRDLADFRIQHPDLILLQYVDDLLLAATSELDCQQGTRALLQTLGNLGYRASAKKAQICQKQVKYLGYLLKEGQRWLTEARKETVMGQPTPK | |
| | TPRQLREFLGKAGFCRLFIPGFAEMAAPLYPLTKPGTLFNWGPDQQKAYQEIKQALLTAPALGLPDLTKPFELFVDEKQGYAKGVLTQKLGPWRRPVAYLSKK | |
| | LDPVAAGWPPCLRMVAAIAVLTKDAGKLTMGQPLVILAPHAVEALVKQPPDRWLSNARMTHYQALLLDTDRVQFGPVVALNPATLLPLPEEGLQHNCLDI | |
| | LAEAHGTRPDLTDQPLPDADHTWYTDGSSLLQEGQRKAGAAVTTETEVIWAKALPAGTSAQRAELIALTQALKMAEGKKLNVYTDSRYAFATAHIHGEIYRR | |
| | RGWLTSEGKEIKNKDEILALLKALFLPKRLSIIHCPGHQKGHSAEARGNRMADQAARKAAITETPDTSTLLSGGSSGGSSGSETPGTSESATPESSGGSSGGSS | |
| | MASNFTQFVLVDNGGTGDVTVAPSNFANGIAEWISSNSRSQAYKVTCSVRQSSAQNRKYTIKVEVPKGAWRSYLNMELTIPIFATNSDCELIVKAMQGLLK | |
| | DGNPIPSAIAANSGIYGGSGGSMASNFTQFVLVDNGGTGDVTVAPSNFANGIAEWISSNSRSQAYKVTCSVRQSSAQNRKYTIKVEVPKGAWRSYLNMELT | |
| | IPIFATNSDCELIVKAMQGLLKDGNPIPSAIAANSGIYGGGSGGGSGGGSGGGSMASNFTQFVLVDNGGTGDVTVAPSNFANGIAEWISSNSRSQAYKVTCS | |
| | VRQSSAQNRKYTIKVEVPKGAWRSYLNMELTIPIFATNSDCELIVKAMQGLLKDGNPIPSAIAANSGIYGGSGGSMASNFTQFVLVDNGGTGDVTVAPSNFA | |
| | NGIAEWISSNSRSQAYKVTCSVRQSSAQNRKYTIKVEVPKGAWRSYLNMELTIPIFATNSDCELIVKAMQGLLKDGNPIPSAIAANSGIYGSSGSSGSSGSSGSS | |
| | GSSDKKYSIGLDIGTNSVGWAVITDEYKVPSKKFKVLGNTDRHSIKKNLIGALLFDSGETAEATRLKRTARRRYTRRKNRICYLQEIFSNEMAKVDDSFFHRLEES | |
| | FLVEEDKKHERHPIFGNIVDEVAYHEKYPTIYHLRKKLVDSTDKADLRLIYLALAHMIKFRGHFLIEGDLNPDNSDVDKLFIQLVQTYNQLFEENPINASGVDAK | |
| | AILSARLSKSRRLENLIAQLPGEKKNGLFGNLIALSLGLTPNFKSNFDLAEDAKLQLSKDTYDDDLDNLLAQIGDQYADLFLAAKNLSDAILLSDILRVNTEITKAPL | |
| | SASMIKRYDEHHQDLTLLKALVRQQLPEKYKEIFFDQSKNGYAGYIDGGASQEEFYKFIKPILEKMDGTEELLVKLNREDLLRKQRTFDNGSIPHQIHLGELHAIL | |
| | RRQEDFYPFLKDNREKIEKILTFRIPYYVGPLARGNSRFAWMTRKSEETITPWNFEEVVDKGASAQSFIERMTNFDKNLPNEKVLPKHSLLYEYFTVYNELTKVK | |
| | YVTEGMRKPAFLSGEQKKAIVDLLFKTNRKVTVKQLKEDYFKKIECFDSVEISGVEDRFNASLGTYHDLLKIIKDKDFLDNEENEDILEDIVLTLTLFEDREMIEERL | |
| | KTYAHLFDDKVMKQLKRRRYTGWGRLSRKLINGIRDKQSGKTILDFLKSDGFANRNFMQLIHDDSLTFKEDIQKAQVSGQGDSLHEHIANLAGSPAIKKGILQ | |
| | TVKVVDELVKVMGRHKPENIVIEMARENQTTQKGQKNSRERMKRIEEGIKELGSQILKEHPVENTQLQNEKLYLYYLQNGRDMYVDQELDINRLSDYDVDHI | |
| | VPQSFLKDDSIDNKVLTRSDKARGKSDNVPSEEVVKKMKNYWRQLLNAKLITQRKFDNLTKAERGGLSELDKAGFIKRQLVETRQITKHVAQILDSRMNTKY | |
| | DENDKLIREVKVITLKSKLVSDFRKDFQFYKVREINNYHHAHDAYLNAVVGTALIKKYPKLESEFVYGDYKVYDVRKMIAKSEQEIGKATAKYFFYSNIMNFFKT | |
| | EITLANGEIRKRPLIETNGETGEIVWDKGRDFATVRKVLSMPQVNIVKKTEVQTGGFSKESILPKRNSDKLIARKKDWDPKKYGGFDSPTVAYSVLVVAKVEKG | |
| | KSKKLKSVKELLGITIMERSSFEKNPIDFLEAKGYKEVKKDLIIKLPKYSLFELENGRKRMLASAGELQKGNELALPSKYVNFLYLASHYEKLKGSPEDNEQKQLFV | |
| | EQHKHYLDEIIEQISEFSKRVILADANLDKVLSAYNKHRDKPIREQAENIIHLFTLTNLGAPAAFKYFDTTIDRKRYTSTKEVLDATLIHQSITGLYETRIDLSQLGGD | |
| | KRTADGSEFESPKKKAKVE | |
| PL12060 | MPAAKRVKLDGGTLNIEDEHRLHETSKEPDVSLGSTWLSDFPQAWAETGGMGLAVRQAPLIIPLKATSTPVSIKQYPMSQEARLGIKPHIQRLLDQGILVPCQ | 16,123 |
| | SPWNTPLLPVKKPGTNDYRPVQDLREVNKRVEDIHPTVPNPYNLLSGLPPSHQWYTVLDLKDAFFCLRLHPTSQPLFAFEWRDPEMGISGQLTWTRLPQGF | |
| | KNSPTLFNEALHRDLADFRIQHPDLILLQYVDDLLLAATSELDCQQGTRALLQTLGNLGYRASAKKAQICQKQVKYLGYLLKEGQRWLTEARKETVMGQPTPK | |
| | TPRQLREFLGKAGFCRLFIPGFAEMAAPLYPLTKPGTLFNWGPDQQKAYQEIKQALLTAPALGLPDLTKPFELFVDEKQGYAKGVLTQKLGPWRRPVAYLSKK | |
| | LDPVAAGWPPCLRMVAAIAVLTKDAGKLTMGQPLVILAPHAVEALVKQPPDRWLSNARMTHYQALLLDTDRVQFGPVVALNPATLLPLPEEGLQHNCLDI | |
| | LAEAHGTRPDLTDQPLPDADHTWYTDGSSLLQEGQRKAGAAVTTETEVIWAKALPAGTSAQRAELIALTQALKMAEGKKLNVYTDSRYAFATAHIHGEIYRR | |
| | RGWLTSEGKEIKNKDEILALLKALFLPKRLSIIHCPGHQKGHSAEARGNRMADQAARKAAITETPDTSTLLSGGSSGGSSGSETPGTSESATPESSGGSSGGSS | |
| | MASNFTQFVLVDNGGTGDVTVAPSNFANGIAEWISSNSRSQAYKVTCSVRQSSAQNRKYTIKVEVPKGAWRSYLNMELTIPIFATNSDCELIVKAMQGLLK | |
| | DGNPIPSAIAANSGIYGGSGGSMASNFTQFVLVDNGGTGDVTVAPSNFANGIAEWISSNSRSQAYKVTCSVRQSSAQNRKYTIKVEVPKGAWRSYLNMELT | |
| | IPIFATNSDCELIVKAMQGLLKDGNPIPSAIAANSGIYGGGSGGGSGGGSGGGSMASNFTQFVLVDNGGTGDVTVAPSNFANGIAEWISSNSRSQAYKVTCS | |
| | VRQSSAQNRKYTIKVEVPKGAWRSYLNMELTIPIFATNSDCELIVKAMQGLLKDGNPIPSAIAANSGIYGGSGGSMASNFTQFVLVDNGGTGDVTVAPSNFA | |
| | NGIAEWISSNSRSQAYKVTCSVRQSSAQNRKYTIKVEVPKGAWRSYLNMELTIPIFATNSDCELIVKAMQGLLKDGNPIPSAIAANSGIYGSSGGGEAAAKDK | |
| | KYSIGLDIGTNSVGWAVITDEYKVPSKKFKVLGNTDRHSIKKNLIGALLFDSGETAEATRLKRTARRRYTRRKNRICYLQEIFSNEMAKVDDSFFHRLEESFLVEE | |
| | DKKHERHPIFGNIVDEVAYHEKYPTIYHLRKKLVDSTDKADLRLIYLALAHMIKFRGHFLIEGDLNPDNSDVDKLFIQLVQTYNQLFEENPINASGVDAKAILSAR | |
| | LSKSRRLENLIAQLPGEKKNGLFGNLIALSLGLTPNFKSNFDLAEDAKLQLSKDTYDDDLDNLLAQIGDQYADLFLAAKNLSDAILLSDILRVNTEITKAPLSASMI | |
| | KRYDEHHQDLTLLKALVRQQLPEKYKEIFFDQSKNGYAGYIDGGASQEEFYKFIKPILEKMDGTEELLVKLNREDLLRKQRTFDNGSIPHQIHLGELHAILRRQE | |
| | DFYPFLKDNREKIEKILTFRIPYYVGPLARGNSRFAWMTRKSEETITPWNFEEVVDKGASAQSFIERMTNFDKNLPNEKVLPKHSLLYEYFTVYNELTKVKYVTE | |
| | GMRKPAFLSGEQKKAIVDLLFKTNRKVTVKQLKEDYFKKIECFDSVEISGVEDRFNASLGTYHDLLKIIKDKDFLDNEENEDILEDIVLTLTLFEDREMIEERLKTY | |
| | AHLFDDKVMKQLKRRRYTGWGRLSRKLINGIRDKQSGKTILDFLKSDGFANRNFMQLIHDDSLTFKEDIQKAQVSGQGDSLHEHIANLAGSPAIKKGILQTVK | |
| | VVDELVKVMGRHKPENIVIEMARENQTTQKGQKNSRERMKRIEEGIKELGSQILKEHPVENTQLQNEKLYLYYLQNGRDMYVDQELDINRLSDYDVDHIVP | |
| | QSFLKDDSIDNKVLTRSDKARGKSDNVPSEEVVKKMKNYWRQLLNAKLITQRKFDNLTKAERGGLSELDKAGFIKRQLVETRQITKHVAQILDSRMNTKYDE | |
| | NDKLIREVKVITLKSKLVSDFRKDFQFYKVREINNYHHAHDAYLNAVVGTALIKKYPKLESEFVYGDYKVYDVRKMIAKSEQEIGKATAKYFFYSNIMNFFKTEIT | |
| | LANGEIRKRPLIETNGETGEIVWDKGRDFATVRKVLSMPQVNIVKKTEVQTGGFSKESILPKRNSDKLIARKKDWDPKKYGGFDSPTVAYSVLVVAKVEKGKS | |
| | KKLKSVKELLGITIMERSSFEKNPIDFLEAKGYKEVKKDLIIKLPKYSLFELENGRKRMLASAGELQKGNELALPSKYVNFLYLASHYEKLKGSPEDNEQKQLFVEQ | |
| | HKHYLDEIIEQISEFSKRVILADANLDKVLSAYNKHRDKPIREQAENIIHLFTLTNLGAPAAFKYFDTTIDRKRYTSTKEVLDATLIHQSITGLYETRIDLSQLGGDKR | |
| | TADGSEFESPKKKAKVE | |
| PL12061 | MPAAKRVKLDGGTLNIEDEHRLHETSKEPDVSLGSTWLSDFPQAWAETGGMGLAVRQAPLIIPLKATSTPVSIKQYPMSQEARLGIKPHIQRLLDQGILVPCQ | 16,124 |
| | SPWNTPLLPVKKPGTNDYRPVQDLREVNKRVEDIHPTVPNPYNLLSGLPPSHQWYTVLDLKDAFFCLRLHPTSQPLFAFEWRDPEMGISGQLTWTRLPQGF | |
| | KNSPTLFNEALHRDLADFRIQHPDLILLQYVDDLLLAATSELDCQQGTRALLQTLGNLGYRASAKKAQICQKQVKYLGYLLKEGQRWLTEARKETVMGQPTPK | |
| | TPRQLREFLGKAGFCRLFIPGFAEMAAPLYPLTKPGTLFNWGPDQQKAYQEIKQALLTAPALGLPDLTKPFELFVDEKQGYAKGVLTQKLGPWRRPVAYLSKK | |
| | LDPVAAGWPPCLRMVAAIAVLTKDAGKLTMGQPLVILAPHAVEALVKQPPDRWLSNARMTHYQALLLDTDRVQFGPVVALNPATLLPLPEEGLQHNCLDI | |
| | LAEAHGTRPDLTDQPLPDADHTWYTDGSSLLQEGQRKAGAAVTTETEVIWAKALPAGTSAQRAELIALTQALKMAEGKKLNVYTDSRYAFATAHIHGEIYRR | |
| | RGWLTSEGKEIKNKDEILALLKALFLPKRLSIIHCPGHQKGHSAEARGNRMADQAARKAAITETPDTSTLLGSSGSSGSSGSSGSSGSSMASNFTQFVLVDNG | |
| | GTGDVTVAPSNFANGIAEWISSNSRSQAYKVTCSVRQSSAQNRKYTIKVEVPKGAWRSYLNMELTIPIFATNSDCELIVKAMQGLLKDGNPIPSAIAANSGIY | |
| | AEAAAKEAAAKEAAAKEAAAKALEAEAAAKEAAAKEAAAKEAAAKADKKYSIGLDIGTNSVGWAVITDEYKVPSKKFKVLGNTDRHSIKKNLIGALLFDSGET | |
| | AEATRLKRTARRRYTRRKNRICYLQEIFSNEMAKVDDSFFHRLEESFLVEEDKKHERHPIFGNIVDEVAYHEKYPTIYHLRKKLVDSTDKADLRLIYLALAHMIKF | |
| | RGHFLIEGDLNPDNSDVDKLFIQLVQTYNQLFEENPINASGVDAKAILSARLSKSRRLENLIAQLPGEKKNGLFGNLIALSLGLTPNFKSNFDLAEDAKLQLSKDT | |
| | YDDDLDNLLAQIGDQYADLFLAAKNLSDAILLSDILRVNTEITKAPLSASMIKRYDEHHQDLTLLKALVRQQLPEKYKEIFFDQSKNGYAGYIDGGASQEEFYKFI | |
| | KPILEKMDGTEELLVKLNREDLLRKQRTFDNGSIPHQIHLGELHAILRRQEDFYPFLKDNREKIEKILTFRIPYYVGPLARGNSRFAWMTRKSEETITPWNFEEVV | |
| | DKGASAQSFIERMTNFDKNLPNEKVLPKHSLLYEYFTVYNELTKVKYVTEGMRKPAFLSGEQKKAIVDLLFKTNRKVTVKQLKEDYFKKIECFDSVEISGVEDRF | |
| | NASLGTYHDLLKIIKDKDFLDNEENEDILEDIVLTLTLFEDREMIEERLKTYAHLFDDKVMKQLKRRRYTGWGRLSRKLINGIRDKQSGKTILDFLKSDGFANRNF | |
| | MQLIHDDSLTFKEDIQKAQVSGQGDSLHEHIANLAGSPAIKKGILQTVKVVDELVKVMGRHKPENIVIEMARENQTTQKGQKNSRERMKRIEEGIKELGSQIL | |
| | KEHPVENTQLQNEKLYLYYLQNGRDMYVDQELDINRLSDYDVDHIVPQSFLKDDSIDNKVLTRSDKARGKSDNVPSEEVVKKMKNYWRQLLNAKLITQRKF | |
| | DNLTKAERGGLSELDKAGFIKRQLVETRQITKHVAQILDSRMNTKYDENDKLIREVKVITLKSKLVSDFRKDFQFYKVREINNYHHAHDAYLNAVVGTALIKKYP | |
| | KLESEFVYGDYKVYDVRKMIAKSEQEIGKATAKYFFYSNIMNFFKTEITLANGEIRKRPLIETNGETGEIVWDKGRDFATVRKVLSMPQVNIVKKTEVQTGGFS | |
| | KESILPKRNSDKLIARKKDWDPKKYGGFDSPTVAYSVLVVAKVEKGKSKKLKSVKELLGITIMERSSFEKNPIDFLEAKGYKEVKKDLIIKLPKYSLFELENGRKRM | |
| | LASAGELQKGNELALPSKYVNFLYLASHYEKLKGSPEDNEQKQLFVEQHKHYLDEIIEQISEFSKRVILADANLDKVLSAYNKHRDKPIREQAENIIHLFTLTNLGA | |
| | PAAFKYFDTTIDRKRYTSTKEVLDATLIHQSITGLYETRIDLSQLGGDKRTADGSEFESPKKKAKVE | |
| PL12062 | MPAAKRVKLDGGTLNIEDEHRLHETSKEPDVSLGSTWLSDFPQAWAETGGMGLAVRQAPLIIPLKATSTPVSIKQYPMSQEARLGIKPHIQRLLDQGILVPCQ | 16,125 |
| | SPWNTPLLPVKKPGTNDYRPVQDLREVNKRVEDIHPTVPNPYNLLSGLPPSHQWYTVLDLKDAFFCLRLHPTSQPLFAFEWRDPEMGISGQLTWTRLPQGF | |
| | KNSPTLFNEALHRDLADFRIQHPDLILLQYVDDLLLAATSELDCQQGTRALLQTLGNLGYRASAKKAQICQKQVKYLGYLLKEGQRWLTEARKETVMGQPTPK | |
| | TPRQLREFLGKAGFCRLFIPGFAEMAAPLYPLTKPGTLFNWGPDQQKAYQEIKQALLTAPALGLPDLTKPFELFVDEKQGYAKGVLTQKLGPWRRPVAYLSKK | |
| | LDPVAAGWPPCLRMVAAIAVLTKDAGKLTMGQPLVILAPHAVEALVKQPPDRWLSNARMTHYQALLLDTDRVQFGPVVALNPATLLPLPEEGLQHNCLDI | |
| | LAEAHGTRPDLTDQPLPDADHTWYTDGSSLLQEGQRKAGAAVTTETEVIWAKALPAGTSAQRAELIALTQALKMAEGKKLNVYTDSRYAFATAHIHGEIYRR | |
| | RGWLTSEGKEIKNKDEILALLKALFLPKRLSIIHCPGHQKGHSAEARGNRMADQAARKAAITETPDTSTLLGSSGSSGSSGSSGSSGSSMASNFTQFVLVDNG | |
| | GTGDVTVAPSNFANGIAEWISSNSRSQAYKVTCSVRQSSAQNRKYTIKVEVPKGAWRSYLNMELTIPIFATNSDCELIVKAMQGLLKDGNPIPSAIAANSGIYS | |
| | GGSSGGSSGSETPGTSESATPESSGGSSGGSSDKKYSIGLDIGTNSVGWAVITDEYKVPSKKFKVLGNTDRHSIKKNLIGALLFDSGETAEATRLKRTARRRYTR | |
| | RKNRICYLQEIFSNEMAKVDDSFFHRLEESFLVEEDKKHERHPIFGNIVDEVAYHEKYPTIYHLRKKLVDSTDKADLRLIYLALAHMIKFRGHFLIEGDLNPDNSD | |
| | VDKLFIQLVQTYNQLFEENPINASGVDAKAILSARLSKSRRLENLIAQLPGEKKNGLFGNLIALSLGLTPNFKSNFDLAEDAKLQLSKDTYDDDLDNLLAQIGDQ | |
| | YADLFLAAKNLSDAILLSDILRVNTEITKAPLSASMIKRYDEHHQDLTLLKALVRQQLPEKYKEIFFDQSKNGYAGYIDGGASQEEFYKFIKPILEKMDGTEELLVK | |
| | LNREDLLRKQRTFDNGSIPHQIHLGELHAILRRQEDFYPFLKDNREKIEKILTFRIPYYVGPLARGNSRFAWMTRKSEETITPWNFEEVVDKGASAQSFIERMTN | |
| | FDKNLPNEKVLPKHSLLYEYFTVYNELTKVKYVTEGMRKPAFLSGEQKKAIVDLLFKTNRKVTVKQLKEDYFKKIECFDSVEISGVEDRFNASLGTYHDLLKIIKDK | |
| | DFLDNEENEDILEDIVLTLTLFEDREMIEERLKTYAHLFDDKVMKQLKRRRYTGWGRLSRKLINGIRDKQSGKTILDFLKSDGFANRNFMQLIHDDSLTFKEDIQ | |
| | KAQVSGQGDSLHEHIANLAGSPAIKKGILQTVKVVDELVKVMGRHKPENIVIEMARENQTTQKGQKNSRERMKRIEEGIKELGSQILKEHPVENTQLQNEKL | |
| | YLYYLQNGRDMYVDQELDINRLSDYDVDHIVPQSFLKDDSIDNKVLTRSDKARGKSDNVPSEEVVKKMKNYWRQLLNAKLITQRKFDNLTKAERGGLSELDK | |
| | AGFIKRQLVETRQITKHVAQILDSRMNTKYDENDKLIREVKVITLKSKLVSDFRKDFQFYKVREINNYHHAHDAYLNAVVGTALIKKYPKLESEFVYGDYKVYDV | |
| | RKMIAKSEQEIGKATAKYFFYSNIMNFFKTEITLANGEIRKRPLIETNGETGEIVWDKGRDFATVRKVLSMPQVNIVKKTEVQTGGFSKESILPKRNSDKLIARKK | |
| | DWDPKKYGGFDSPTVAYSVLVVAKVEKGKSKKLKSVKELLGITIMERSSFEKNPIDFLEAKGYKEVKKDLIIKLPKYSLFELENGRKRMLASAGELQKGNELALPS | |
| | KYVNFLYLASHYEKLKGSPEDNEQKQLFVEQHKHYLDEIIEQISEFSKRVILADANLDKVLSAYNKHRDKPIREQAENIIHLFTLTNLGAPAAFKYFDTTIDRKRYT | |
| | STKEVLDATLIHQSITGLYETRIDLSQLGGDKRTADGSEFESPKKKAKVE | |
| PL12063 | MPAAKRVKLDGGTLNIEDEHRLHETSKEPDVSLGSTWLSDFPQAWAETGGMGLAVRQAPLIIPLKATSTPVSIKQYPMSQEARLGIKPHIQRLLDQGILVPCQ | 16,126 |
| | SPWNTPLLPVKKPGTNDYRPVQDLREVNKRVEDIHPTVPNPYNLLSGLPPSHQWYTVLDLKDAFFCLRLHPTSQPLFAFEWRDPEMGISGQLTWTRLPQGF | |
| | KNSPTLFNEALHRDLADFRIQHPDLILLQYVDDLLLAATSELDCQQGTRALLQTLGNLGYRASAKKAQICQKQVKYLGYLLKEGQRWLTEARKETVMGQPTPK | |
| | TPRQLREFLGKAGFCRLFIPGFAEMAAPLYPLTKPGTLFNWGPDQQKAYQEIKQALLTAPALGLPDLTKPFELFVDEKQGYAKGVLTQKLGPWRRPVAYLSKK | |
| | LDPVAAGWPPCLRMVAAIAVLTKDAGKLTMGQPLVILAPHAVEALVKQPPDRWLSNARMTHYQALLLDTDRVQFGPVVALNPATLLPLPEEGLQHNCLDI | |
| | LAEAHGTRPDLTDQPLPDADHTWYTDGSSLLQEGQRKAGAAVTTETEVIWAKALPAGTSAQRAELIALTQALKMAEGKKLNVYTDSRYAFATAHIHGEIYRR | |
| | RGWLTSEGKEIKNKDEILALLKALFLPKRLSIIHCPGHQKGHSAEARGNRMADQAARKAAITETPDTSTLLGSSGSSGSSGSSGSSGSSMASNFTQFVLVDNG | |
| | GTGDVTVAPSNFANGIAEWISSNSRSQAYKVTCSVRQSSAQNRKYTIKVEVPKGAWRSYLNMELTIPIFATNSDCELIVKAMQGLLKDGNPIPSAIAANSGIY | |
| | GSSGSSGSSGSSGSSGSSDKKYSIGLDIGTNSVGWAVITDEYKVPSKKFKVLGNTDRHSIKKNLIGALLFDSGETAEATRLKRTARRRYTRRKNRICYLQEIFSNE | |
| | MAKVDDSFFHRLEESFLVEEDKKHERHPIFGNIVDEVAYHEKYPTIYHLRKKLVDSTDKADLRLIYLALAHMIKFRGHFLIEGDLNPDNSDVDKLFIQLVQTYNQ | |
| | LFEENPINASGVDAKAILSARLSKSRRLENLIAQLPGEKKNGLFGNLIALSLGLTPNFKSNFDLAEDAKLQLSKDTYDDDLDNLLAQIGDQYADLFLAAKNLSDAI | |
| | LLSDILRVNTEITKAPLSASMIKRYDEHHQDLTLLKALVRQQLPEKYKEIFFDQSKNGYAGYIDGGASQEEFYKFIKPILEKMDGTEELLVKLNREDLLRKQRTFD | |
| | NGSIPHQIHLGELHAILRRQEDFYPFLKDNREKIEKILTFRIPYYVGPLARGNSRFAWMTRKSEETITPWNFEEVVDKGASAQSFIERMTNFDKNLPNEKVLPK | |
| | HSLLYEYFTVYNELTKVKYVTEGMRKPAFLSGEQKKAIVDLLFKTNRKVTVKQLKEDYFKKIECFDSVEISGVEDRFNASLGTYHDLLKIIKDKDFLDNEENEDILE | |
| | DIVLTLTLFEDREMIEERLKTYAHLFDDKVMKQLKRRRYTGWGRLSRKLINGIRDKQSGKTILDFLKSDGFANRNFMQLIHDDSLTFKEDIQKAQVSGQGDSL | |
| | HEHIANLAGSPAIKKGILQTVKVVDELVKVMGRHKPENIVIEMARENQTTQKGQKNSRERMKRIEEGIKELGSQILKEHPVENTQLQNEKLYLYYLQNGRDM | |
| | YVDQELDINRLSDYDVDHIVPQSFLKDDSIDNKVLTRSDKARGKSDNVPSEEVVKKMKNYWRQLLNAKLITQRKFDNLTKAERGGLSELDKAGFIKRQLVETR | |
| | QITKHVAQILDSRMNTKYDENDKLIREVKVITLKSKLVSDFRKDFQFYKVREINNYHHAHDAYLNAVVGTALIKKYPKLESEFVYGDYKVYDVRKMIAKSEQEIG | |
| | KATAKYFFYSNIMNFFKTEITLANGEIRKRPLIETNGETGEIVWDKGRDFATVRKVLSMPQVNIVKKTEVQTGGFSKESILPKRNSDKLIARKKDWDPKKYGGF | |
| | DSPTVAYSVLVVAKVEKGKSKKLKSVKELLGITIMERSSFEKNPIDFLEAKGYKEVKKDLIIKLPKYSLFELENGRKRMLASAGELQKGNELALPSKYVNFLYLASH | |
| | YEKLKGSPEDNEQKQLFVEQHKHYLDEIIEQISEFSKRVILADANLDKVLSAYNKHRDKPIREQAENIIHLFTLTNLGAPAAFKYFDTTIDRKRYTSTKEVLDATLIH | |
| | QSITGLYETRIDLSQLGGDKRTADGSEFESPKKKAKVE | |
| PL12064 | MPAAKRVKLDGGTLNIEDEHRLHETSKEPDVSLGSTWLSDFPQAWAETGGMGLAVRQAPLIIPLKATSTPVSIKQYPMSQEARLGIKPHIQRLLDQGILVPCQ | 16,127 |
| | SPWNTPLLPVKKPGTNDYRPVQDLREVNKRVEDIHPTVPNPYNLLSGLPPSHQWYTVLDLKDAFFCLRLHPTSQPLFAFEWRDPEMGISGQLTWTRLPQGF | |
| | KNSPTLFNEALHRDLADFRIQHPDLILLQYVDDLLLAATSELDCQQGTRALLQTLGNLGYRASAKKAQICQKQVKYLGYLLKEGQRWLTEARKETVMGQPTPK | |
| | TPRQLREFLGKAGFCRLFIPGFAEMAAPLYPLTKPGTLFNWGPDQQKAYQEIKQALLTAPALGLPDLTKPFELFVDEKQGYAKGVLTQKLGPWRRPVAYLSKK | |
| | LDPVAAGWPPCLRMVAAIAVLTKDAGKLTMGQPLVILAPHAVEALVKQPPDRWLSNARMTHYQALLLDTDRVQFGPVVALNPATLLPLPEEGLQHNCLDI | |
| | LAEAHGTRPDLTDQPLPDADHTWYTDGSSLLQEGQRKAGAAVTTETEVIWAKALPAGTSAQRAELIALTQALKMAEGKKLNVYTDSRYAFATAHIHGEIYRR | |
| | RGWLTSEGKEIKNKDEILALLKALFLPKRLSIIHCPGHQKGHSAEARGNRMADQAARKAAITETPDTSTLLGSSGSSGSSGSSGSSGSSMASNFTQFVLVDNG | |
| | GTGDVTVAPSNFANGIAEWISSNSRSQAYKVTCSVRQSSAQNRKYTIKVEVPKGAWRSYLNMELTIPIFATNSDCELIVKAMQGLLKDGNPIPSAIAANSGIY | |
| | GSSGGGEAAAKDKKYSIGLDIGTNSVGWAVITDEYKVPSKKFKVLGNTDRHSIKKNLIGALLFDSGETAEATRLKRTARRRYTRRKNRICYLQEIFSNEMAKVD | |
| | DSFFHRLEESFLVEEDKKHERHPIFGNIVDEVAYHEKYPTIYHLRKKLVDSTDKADLRLIYLALAHMIKFRGHFLIEGDLNPDNSDVDKLFIQLVQTYNQLFEENPI | |
| | NASGVDAKAILSARLSKSRRLENLIAQLPGEKKNGLFGNLIALSLGLTPNFKSNFDLAEDAKLQLSKDTYDDDLDNLLAQIGDQYADLFLAAKNLSDAILLSDILR | |
| | VNTEITKAPLSASMIKRYDEHHQDLTLLKALVRQQLPEKYKEIFFDQSKNGYAGYIDGGASQEEFYKFIKPILEKMDGTEELLVKLNREDLLRKQRTFDNGSIPH | |
| | QIHLGELHAILRRQEDFYPFLKDNREKIEKILTFRIPYYVGPLARGNSRFAWMTRKSEETITPWNFEEVVDKGASAQSFIERMTNFDKNLPNEKVLPKHSLLYEY | |
| | FTVYNELTKVKYVTEGMRKPAFLSGEQKKAIVDLLFKTNRKVTVKQLKEDYFKKIECFDSVEISGVEDRFNASLGTYHDLLKIIKDKDFLDNEENEDILEDIVLTLTL | |
| | FEDREMIEERLKTYAHLFDDKVMKQLKRRRYTGWGRLSRKLINGIRDKQSGKTILDFLKSDGFANRNFMQLIHDDSLTFKEDIQKAQVSGQGDSLHEHIANLA | |
| | GSPAIKKGILQTVKVVDELVKVMGRHKPENIVIEMARENQTTQKGQKNSRERMKRIEEGIKELGSQILKEHPVENTQLQNEKLYLYYLQNGRDMYVDQELDI | |
| | NRLSDYDVDHIVPQSFLKDDSIDNKVLTRSDKARGKSDNVPSEEVVKKMKNYWRQLLNAKLITQRKFDNLTKAERGGLSELDKAGFIKRQLVETRQITKHVA | |
| | QILDSRMNTKYDENDKLIREVKVITLKSKLVSDFRKDFQFYKVREINNYHHAHDAYLNAVVGTALIKKYPKLESEFVYGDYKVYDVRKMIAKSEQEIGKATAKYF | |
| | FYSNIMNFFKTEITLANGEIRKRPLIETNGETGEIVWDKGRDFATVRKVLSMPQVNIVKKTEVQTGGFSKESILPKRNSDKLIARKKDWDPKKYGGFDSPTVAY | |
| | SVLVVAKVEKGKSKKLKSVKELLGITIMERSSFEKNPIDFLEAKGYKEVKKDLIIKLPKYSLFELENGRKRMLASAGELQKGNELALPSKYVNFLYLASHYEKLKGSP | |
| | EDNEQKQLFVEQHKHYLDEIIEQISEFSKRVILADANLDKVLSAYNKHRDKPIREQAENIIHLFTLTNLGAPAAFKYFDTTIDRKRYTSTKEVLDATLIHQSITGLYE | |
| | TRIDLSQLGGDKRTADGSEFESPKKKAKVE | |
| PL12065 | MPAAKRVKLDGGTLNIEDEHRLHETSKEPDVSLGSTWLSDFPQAWAETGGMGLAVRQAPLIIPLKATSTPVSIKQYPMSQEARLGIKPHIQRLLDQGILVPCQ | 16,128 |
| | SPWNTPLLPVKKPGTNDYRPVQDLREVNKRVEDIHPTVPNPYNLLSGLPPSHQWYTVLDLKDAFFCLRLHPTSQPLFAFEWRDPEMGISGQLTWTRLPQGF | |
| | KNSPTLFNEALHRDLADFRIQHPDLILLQYVDDLLLAATSELDCQQGTRALLQTLGNLGYRASAKKAQICQKQVKYLGYLLKEGQRWLTEARKETVMGQPTPK | |
| | TPRQLREFLGKAGFCRLFIPGFAEMAAPLYPLTKPGTLFNWGPDQQKAYQEIKQALLTAPALGLPDLTKPFELFVDEKQGYAKGVLTQKLGPWRRPVAYLSKK | |
| | LDPVAAGWPPCLRMVAAIAVLTKDAGKLTMGQPLVILAPHAVEALVKQPPDRWLSNARMTHYQALLLDTDRVQFGPVVALNPATLLPLPEEGLQHNCLDI | |
| | LAEAHGTRPDLTDQPLPDADHTWYTDGSSLLQEGQRKAGAAVTTETEVIWAKALPAGTSAQRAELIALTQALKMAEGKKLNVYTDSRYAFATAHIHGEIYRR | |
| | RGWLTSEGKEIKNKDEILALLKALFLPKRLSIIHCPGHQKGHSAEARGNRMADQAARKAAITETPDTSTLLGSSGSSGSSGSSGSSGSSMASNFTQFVLVDNG | |
| | GTGDVTVAPSNFANGIAEWISSNSRSQAYKVTCSVRQSSAQNRKYTIKVEVPKGAWRSYLNMELTIPIFATNSDCELIVKAMQGLLKDGNPIPSAIAANSGIY | |
| | GGSGGSMASNFTQFVLVDNGGTGDVTVAPSNFANGIAEWISSNSRSQAYKVTCSVRQSSAQNRKYTIKVEVPKGAWRSYLNMELTIPIFATNSDCELIVKA | |
| | MQGLLKDGNPIPSAIAANSGIYAEAAAKEAAAKEAAAKEAAAKALEAEAAAKEAAAKEAAAKEAAAKADKKYSIGLDIGTNSVGWAVITDEYKVPSKKFKVL | |
| | GNTDRHSIKKNLIGALLFDSGETAEATRLKRTARRRYTRRKNRICYLQEIFSNEMAKVDDSFFHRLEESFLVEEDKKHERHPIFGNIVDEVAYHEKYPTIYHLRKK | |
| | LVDSTDKADLRLIYLALAHMIKFRGHFLIEGDLNPDNSDVDKLFIQLVQTYNQLFEENPINASGVDAKAILSARLSKSRRLENLIAQLPGEKKNGLFGNLIALSLGL | |
| | TPNFKSNFDLAEDAKLQLSKDTYDDDLDNLLAQIGDQYADLFLAAKNLSDAILLSDILRVNTEITKAPLSASMIKRYDEHHQDLTLLKALVRQQLPEKYKEIFFDQ | |
| | SKNGYAGYIDGGASQEEFYKFIKPILEKMDGTEELLVKLNREDLLRKQRTFDNGSIPHQIHLGELHAILRRQEDFYPFLKDNREKIEKILTFRIPYYVGPLARGNSR | |
| | FAWMTRKSEETITPWNFEEVVDKGASAQSFIERMTNFDKNLPNEKVLPKHSLLYEYFTVYNELTKVKYVTEGMRKPAFLSGEQKKAIVDLLFKTNRKVTVKQL | |
| | KEDYFKKIECFDSVEISGVEDRFNASLGTYHDLLKIIKDKDFLDNEENEDILEDIVLTLTLFEDREMIEERLKTYAHLFDDKVMKQLKRRRYTGWGRLSRKLINGIR | |
| | DKQSGKTILDFLKSDGFANRNFMQLIHDDSLTFKEDIQKAQVSGQGDSLHEHIANLAGSPAIKKGILQTVKVVDELVKVMGRHKPENIVIEMARENQTTQKG | |
| | QKNSRERMKRIEEGIKELGSQILKEHPVENTQLQNEKLYLYYLQNGRDMYVDQELDINRLSDYDVDHIVPQSFLKDDSIDNKVLTRSDKARGKSDNVPSEEVV | |
| | KKMKNYWRQLLNAKLITQRKFDNLTKAERGGLSELDKAGFIKRQLVETRQITKHVAQILDSRMNTKYDENDKLIREVKVITLKSKLVSDFRKDFQFYKVREINN | |
| | YHHAHDAYLNAVVGTALIKKYPKLESEFVYGDYKVYDVRKMIAKSEQEIGKATAKYFFYSNIMNFFKTEITLANGEIRKRPLIETNGETGEIVWDKGRDFATVRK | |
| | VLSMPQVNIVKKTEVQTGGFSKESILPKRNSDKLIARKKDWDPKKYGGFDSPTVAYSVLVVAKVEKGKSKKLKSVKELLGITIMERSSFEKNPIDFLEAKGYKEV | |
| | KKDLIIKLPKYSLFELENGRKRMLASAGELQKGNELALPSKYVNFLYLASHYEKLKGSPEDNEQKQLFVEQHKHYLDEIIEQISEFSKRVILADANLDKVLSAYNKH | |
| | RDKPIREQAENIIHLFTLTNLGAPAAFKYFDTTIDRKRYTSTKEVLDATLIHQSITGLYETRIDLSQLGGDKRTADGSEFESPKKKAKVE | |
| PL12067 | MPAAKRVKLDGGTLNIEDEHRLHETSKEPDVSLGSTWLSDFPQAWAETGGMGLAVRQAPLIIPLKATSTPVSIKQYPMSQEARLGIKPHIQRLLDQGILVPCQ | 16,130 |
| | SPWNTPLLPVKKPGTNDYRPVQDLREVNKRVEDIHPTVPNPYNLLSGLPPSHQWYTVLDLKDAFFCLRLHPTSQPLFAFEWRDPEMGISGQLTWTRLPQGF | |
| | KNSPTLFNEALHRDLADFRIQHPDLILLQYVDDLLLAATSELDCQQGTRALLQTLGNLGYRASAKKAQICQKQVKYLGYLLKEGQRWLTEARKETVMGQPTPK | |
| | TPRQLREFLGKAGFCRLFIPGFAEMAAPLYPLTKPGTLFNWGPDQQKAYQEIKQALLTAPALGLPDLTKPFELFVDEKQGYAKGVLTQKLGPWRRPVAYLSKK | |
| | LDPVAAGWPPCLRMVAAIAVLTKDAGKLTMGQPLVILAPHAVEALVKQPPDRWLSNARMTHYQALLLDTDRVQFGPVVALNPATLLPLPEEGLQHNCLDI | |
| | LAEAHGTRPDLTDQPLPDADHTWYTDGSSLLQEGQRKAGAAVTTETEVIWAKALPAGTSAQRAELIALTQALKMAEGKKLNVYTDSRYAFATAHIHGEIYRR | |
| | RGWLTSEGKEIKNKDEILALLKALFLPKRLSIIHCPGHQKGHSAEARGNRMADQAARKAAITETPDTSTLLGSSGSSGSSGSSGSSGSSMASNFTQFVLVDNG | |
| | GTGDVTVAPSNFANGIAEWISSNSRSQAYKVTCSVRQSSAQNRKYTIKVEVPKGAWRSYLNMELTIPIFATNSDCELIVKAMQGLLKDGNPIPSAIAANSGIY | |
| | GGSGGSMASNFTQFVLVDNGGTGDVTVAPSNFANGIAEWISSNSRSQAYKVTCSVRQSSAQNRKYTIKVEVPKGAWRSYLNMELTIPIFATNSDCELIVKA | |
| | MQGLLKDGNPIPSAIAANSGIYGSSGSSGSSGSSGSSGSSDKKYSIGLDIGTNSVGWAVITDEYKVPSKKFKVLGNTDRHSIKKNLIGALLFDSGETAEATRLKRT | |
| | ARRRYTRRKNRICYLQEIFSNEMAKVDDSFFHRLEESFLVEEDKKHERHPIFGNIVDEVAYHEKYPTIYHLRKKLVDSTDKADLRLIYLALAHMIKFRGHFLIEGDL | |
| | NPDNSDVDKLFIQLVQTYNQLFEENPINASGVDAKAILSARLSKSRRLENLIAQLPGEKKNGLFGNLIALSLGLTPNFKSNFDLAEDAKLQLSKDTYDDDLDNLL | |
| | AQIGDQYADLFLAAKNLSDAILLSDILRVNTEITKAPLSASMIKRYDEHHQDLTLLKALVRQQLPEKYKEIFFDQSKNGYAGYIDGGASQEEFYKFIKPILEKMDG | |
| | TEELLVKLNREDLLRKQRTFDNGSIPHQIHLGELHAILRRQEDFYPFLKDNREKIEKILTFRIPYYVGPLARGNSRFAWMTRKSEETITPWNFEEVVDKGASAQS | |
| | FIERMTNFDKNLPNEKVLPKHSLLYEYFTVYNELTKVKYVTEGMRKPAFLSGEQKKAIVDLLFKTNRKVTVKQLKEDYFKKIECFDSVEISGVEDRFNASLGTYH | |
| | DLLKIIKDKDFLDNEENEDILEDIVLTLTLFEDREMIEERLKTYAHLFDDKVMKQLKRRRYTGWGRLSRKLINGIRDKQSGKTILDFLKSDGFANRNFMQLIHDD | |
| | SLTFKEDIQKAQVSGQGDSLHEHIANLAGSPAIKKGILQTVKVVDELVKVMGRHKPENIVIEMARENQTTQKGQKNSRERMKRIEEGIKELGSQILKEHPVEN | |
| | TQLQNEKLYLYYLQNGRDMYVDQELDINRLSDYDVDHIVPQSFLKDDSIDNKVLTRSDKARGKSDNVPSEEVVKKMKNYWRQLLNAKLITQRKFDNLTKAER | |
| | GGLSELDKAGFIKRQLVETRQITKHVAQILDSRMNTKYDENDKLIREVKVITLKSKLVSDFRKDFQFYKVREINNYHHAHDAYLNAVVGTALIKKYPKLESEFVY | |
| | GDYKVYDVRKMIAKSEQEIGKATAKYFFYSNIMNFFKTEITLANGEIRKRPLIETNGETGEIVWDKGRDFATVRKVLSMPQVNIVKKTEVQTGGFSKESILPKR | |
| | NSDKLIARKKDWDPKKYGGFDSPTVAYSVLVVAKVEKGKSKKLKSVKELLGITIMERSSFEKNPIDFLEAKGYKEVKKDLIIKLPKYSLFELENGRKRMLASAGEL | |
| | QKGNELALPSKYVNFLYLASHYEKLKGSPEDNEQKQLFVEQHKHYLDEIIEQISEFSKRVILADANLDKVLSAYNKHRDKPIREQAENIIHLFTLTNLGAPAAFKY | |
| | FDTTIDRKRYTSTKEVLDATLIHQSITGLYETRIDLSQLGGDKRTADGSEFESPKKKAKVE | |
| PL12068 | MPAAKRVKLDGGTLNIEDEHRLHETSKEPDVSLGSTWLSDFPQAWAETGGMGLAVRQAPLIIPLKATSTPVSIKQYPMSQEARLGIKPHIQRLLDQGILVPCQ | 16,131 |
| | SPWNTPLLPVKKPGTNDYRPVQDLREVNKRVEDIHPTVPNPYNLLSGLPPSHQWYTVLDLKDAFFCLRLHPTSQPLFAFEWRDPEMGISGQLTWTRLPQGF | |
| | KNSPTLFNEALHRDLADFRIQHPDLILLQYVDDLLLAATSELDCQQGTRALLQTLGNLGYRASAKKAQICQKQVKYLGYLLKEGQRWLTEARKETVMGQPTPK | |
| | TPRQLREFLGKAGFCRLFIPGFAEMAAPLYPLTKPGTLFNWGPDQQKAYQEIKQALLTAPALGLPDLTKPFELFVDEKQGYAKGVLTQKLGPWRRPVAYLSKK | |
| | LDPVAAGWPPCLRMVAAIAVLTKDAGKLTMGQPLVILAPHAVEALVKQPPDRWLSNARMTHYQALLLDTDRVQFGPVVALNPATLLPLPEEGLQHNCLDI | |
| | LAEAHGTRPDLTDQPLPDADHTWYTDGSSLLQEGQRKAGAAVTTETEVIWAKALPAGTSAQRAELIALTQALKMAEGKKLNVYTDSRYAFATAHIHGEIYRR | |
| | RGWLTSEGKEIKNKDEILALLKALFLPKRLSIIHCPGHQKGHSAEARGNRMADQAARKAAITETPDTSTLLGSSGSSGSSGSSGSSGSSMASNFTQFVLVDNG | |
| | GTGDVTVAPSNFANGIAEWISSNSRSQAYKVTCSVRQSSAQNRKYTIKVEVPKGAWRSYLNMELTIPIFATNSDCELIVKAMQGLLKDGNPIPSAIAANSGIY | |
| | GGSGGSMASNFTQFVLVDNGGTGDVTVAPSNFANGIAEWISSNSRSQAYKVTCSVRQSSAQNRKYTIKVEVPKGAWRSYLNMELTIPIFATNSDCELIVKA | |
| | MQGLLKDGNPIPSAIAANSGIYGSSGGGEAAAKDKKYSIGLDIGTNSVGWAVITDEYKVPSKKFKVLGNTDRHSIKKNLIGALLFDSGETAEATRLKRTARRRY | |
| | TRRKNRICYLQEIFSNEMAKVDDSFFHRLEESFLVEEDKKHERHPIFGNIVDEVAYHEKYPTIYHLRKKLVDSTDKADLRLIYLALAHMIKFRGHFLIEGDLNPDN | |
| | SDVDKLFIQLVQTYNQLFEENPINASGVDAKAILSARLSKSRRLENLIAQLPGEKKNGLFGNLIALSLGLTPNFKSNFDLAEDAKLQLSKDTYDDDLDNLLAQIGD | |
| | QYADLFLAAKNLSDAILLSDILRVNTEITKAPLSASMIKRYDEHHQDLTLLKALVRQQLPEKYKEIFFDQSKNGYAGYIDGGASQEEFYKFIKPILEKMDGTEELLV | |
| | KLNREDLLRKQRTFDNGSIPHQIHLGELHAILRRQEDFYPFLKDNREKIEKILTFRIPYYVGPLARGNSRFAWMTRKSEETITPWNFEEVVDKGASAQSFIERMT | |
| | NFDKNLPNEKVLPKHSLLYEYFTVYNELTKVKYVTEGMRKPAFLSGEQKKAIVDLLFKTNRKVTVKQLKEDYFKKIECFDSVEISGVEDRFNASLGTYHDLLKIIK | |
| | DKDFLDNEENEDILEDIVLTLTLFEDREMIEERLKTYAHLFDDKVMKQLKRRRYTGWGRLSRKLINGIRDKQSGKTILDFLKSDGFANRNFMQLIHDDSLTFKE | |
| | DIQKAQVSGQGDSLHEHIANLAGSPAIKKGILQTVKVVDELVKVMGRHKPENIVIEMARENQTTQKGQKNSRERMKRIEEGIKELGSQILKEHPVENTQLQN | |
| | EKLYLYYLQNGRDMYVDQELDINRLSDYDVDHIVPQSFLKDDSIDNKVLTRSDKARGKSDNVPSEEVVKKMKNYWRQLLNAKLITQRKFDNLTKAERGGLSE | |
| | LDKAGFIKRQLVETRQITKHVAQILDSRMNTKYDENDKLIREVKVITLKSKLVSDFRKDFQFYKVREINNYHHAHDAYLNAVVGTALIKKYPKLESEFVYGDYKV | |
| | YDVRKMIAKSEQEIGKATAKYFFYSNIMNFFKTEITLANGEIRKRPLIETNGETGEIVWDKGRDFATVRKVLSMPQVNIVKKTEVQTGGFSKESILPKRNSDKLI | |
| | ARKKDWDPKKYGGFDSPTVAYSVLVVAKVEKGKSKKLKSVKELLGITIMERSSFEKNPIDFLEAKGYKEVKKDLIIKLPKYSLFELENGRKRMLASAGELQKGNEL | |
| | ALPSKYVNFLYLASHYEKLKGSPEDNEQKQLFVEQHKHYLDEIIEQISEFSKRVILADANLDKVLSAYNKHRDKPIREQAENIIHLFTLTNLGAPAAFKYFDTTIDR | |
| | KRYTSTKEVLDATLIHQSITGLYETRIDLSQLGGDKRTADGSEFESPKKKAKVE | |
| PL12069 | MPAAKRVKLDGGTLNIEDEHRLHETSKEPDVSLGSTWLSDFPQAWAETGGMGLAVRQAPLIIPLKATSTPVSIKQYPMSQEARLGIKPHIQRLLDQGILVPCQ | 16,132 |
| | SPWNTPLLPVKKPGTNDYRPVQDLREVNKRVEDIHPTVPNPYNLLSGLPPSHQWYTVLDLKDAFFCLRLHPTSQPLFAFEWRDPEMGISGQLTWTRLPQGF | |
| | KNSPTLFNEALHRDLADFRIQHPDLILLQYVDDLLLAATSELDCQQGTRALLQTLGNLGYRASAKKAQICQKQVKYLGYLLKEGQRWLTEARKETVMGQPTPK | |
| | TPRQLREFLGKAGFCRLFIPGFAEMAAPLYPLTKPGTLFNWGPDQQKAYQEIKQALLTAPALGLPDLTKPFELFVDEKQGYAKGVLTQKLGPWRRPVAYLSKK | |
| | LDPVAAGWPPCLRMVAAIAVLTKDAGKLTMGQPLVILAPHAVEALVKQPPDRWLSNARMTHYQALLLDTDRVQFGPVVALNPATLLPLPEEGLQHNCLDI | |
| | LAEAHGTRPDLTDQPLPDADHTWYTDGSSLLQEGQRKAGAAVTTETEVIWAKALPAGTSAQRAELIALTQALKMAEGKKLNVYTDSRYAFATAHIHGEIYRR | |
| | RGWLTSEGKEIKNKDEILALLKALFLPKRLSIIHCPGHQKGHSAEARGNRMADQAARKAAITETPDTSTLLGSSGSSGSSGSSGSSGSSMASNFTQFVLVDNG | |
| | GTGDVTVAPSNFANGIAEWISSNSRSQAYKVTCSVRQSSAQNRKYTIKVEVPKGAWRSYLNMELTIPIFATNSDCELIVKAMQGLLKDGNPIPSAIAANSGIY | |
| | GGSGGSMASNFTQFVLVDNGGTGDVTVAPSNFANGIAEWISSNSRSQAYKVTCSVRQSSAQNRKYTIKVEVPKGAWRSYLNMELTIPIFATNSDCELIVKA | |
| | MQGLLKDGNPIPSAIAANSGIYGGGSGGGSGGGSGGGSMASNFTQFVLVDNGGTGDVTVAPSNFANGIAEWISSNSRSQAYKVTCSVRQSSAQNRKYTIK | |
| | VEVPKGAWRSYLNMELTIPIFATNSDCELIVKAMQGLLKDGNPIPSAIAANSGIYGGSGGSMASNFTQFVLVDNGGTGDVTVAPSNFANGIAEWISSNSRSQ | |
| | AYKVTCSVRQSSAQNRKYTIKVEVPKGAWRSYLNMELTIPIFATNSDCELIVKAMQGLLKDGNPIPSAIAANSGIYAEAAAKEAAAKEAAAKEAAAKALEAEA | |
| | AAKEAAAKEAAAKEAAAKADKKYSIGLDIGTNSVGWAVITDEYKVPSKKFKVLGNTDRHSIKKNLIGALLFDSGETAEATRLKRTARRRYTRRKNRICYLQEIFS | |
| | NEMAKVDDSFFHRLEESFLVEEDKKHERHPIFGNIVDEVAYHEKYPTIYHLRKKLVDSTDKADLRLIYLALAHMIKFRGHFLIEGDLNPDNSDVDKLFIQLVQTY | |
| | NQLFEENPINASGVDAKAILSARLSKSRRLENLIAQLPGEKKNGLFGNLIALSLGLTPNFKSNFDLAEDAKLQLSKDTYDDDLDNLLAQIGDQYADLFLAAKNLS | |
| | DAILLSDILRVNTEITKAPLSASMIKRYDEHHQDLTLLKALVRQQLPEKYKEIFFDQSKNGYAGYIDGGASQEEFYKFIKPILEKMDGTEELLVKLNREDLLRKQRT | |
| | FDNGSIPHQIHLGELHAILRRQEDFYPFLKDNREKIEKILTFRIPYYVGPLARGNSRFAWMTRKSEETITPWNFEEVVDKGASAQSFIERMTNFDKNLPNEKVLP | |
| | KHSLLYEYFTVYNELTKVKYVTEGMRKPAFLSGEQKKAIVDLLFKTNRKVTVKQLKEDYFKKIECFDSVEISGVEDRFNASLGTYHDLLKIIKDKDFLDNEENEDIL | |
| | EDIVLTLTLFEDREMIEERLKTYAHLFDDKVMKQLKRRRYTGWGRLSRKLINGIRDKQSGKTILDFLKSDGFANRNFMQLIHDDSLTFKEDIQKAQVSGQGDSL | |
| | HEHIANLAGSPAIKKGILQTVKVVDELVKVMGRHKPENIVIEMARENQTTQKGQKNSRERMKRIEEGIKELGSQILKEHPVENTQLQNEKLYLYYLQNGRDM | |
| | YVDQELDINRLSDYDVDHIVPQSFLKDDSIDNKVLTRSDKARGKSDNVPSEEVVKKMKNYWRQLLNAKLITQRKFDNLTKAERGGLSELDKAGFIKRQLVETR | |
| | QITKHVAQILDSRMNTKYDENDKLIREVKVITLKSKLVSDFRKDFQFYKVREINNYHHAHDAYLNAVVGTALIKKYPKLESEFVYGDYKVYDVRKMIAKSEQEIG | |
| | KATAKYFFYSNIMNFFKTEITLANGEIRKRPLIETNGETGEIVWDKGRDFATVRKVLSMPQVNIVKKTEVQTGGFSKESILPKRNSDKLIARKKDWDPKKYGGF | |
| | DSPTVAYSVLVVAKVEKGKSKKLKSVKELLGITIMERSSFEKNPIDFLEAKGYKEVKKDLIIKLPKYSLFELENGRKRMLASAGELQKGNELALPSKYVNFLYLASH | |
| | YEKLKGSPEDNEQKQLFVEQHKHYLDEIIEQISEFSKRVILADANLDKVLSAYNKHRDKPIREQAENIIHLFTLTNLGAPAAFKYFDTTIDRKRYTSTKEVLDATLIH | |
| | QSITGLYETRIDLSQLGGDKRTADGSEFESPKKKAKVE | |
| PL12070 | MPAAKRVKLDGGTLNIEDEHRLHETSKEPDVSLGSTWLSDFPQAWAETGGMGLAVRQAPLIIPLKATSTPVSIKQYPMSQEARLGIKPHIQRLLDQGILVPCQ | 16,133 |
| | SPWNTPLLPVKKPGTNDYRPVQDLREVNKRVEDIHPTVPNPYNLLSGLPPSHQWYTVLDLKDAFFCLRLHPTSQPLFAFEWRDPEMGISGQLTWTRLPQGF | |
| | KNSPTLFNEALHRDLADFRIQHPDLILLQYVDDLLLAATSELDCQQGTRALLQTLGNLGYRASAKKAQICQKQVKYLGYLLKEGQRWLTEARKETVMGQPTPK | |
| | TPRQLREFLGKAGFCRLFIPGFAEMAAPLYPLTKPGTLFNWGPDQQKAYQEIKQALLTAPALGLPDLTKPFELFVDEKQGYAKGVLTQKLGPWRRPVAYLSKK | |
| | LDPVAAGWPPCLRMVAAIAVLTKDAGKLTMGQPLVILAPHAVEALVKQPPDRWLSNARMTHYQALLLDTDRVQFGPVVALNPATLLPLPEEGLQHNCLDI | |
| | LAEAHGTRPDLTDQPLPDADHTWYTDGSSLLQEGQRKAGAAVTTETEVIWAKALPAGTSAQRAELIALTQALKMAEGKKLNVYTDSRYAFATAHIHGEIYRR | |
| | RGWLTSEGKEIKNKDEILALLKALFLPKRLSIIHCPGHQKGHSAEARGNRMADQAARKAAITETPDTSTLLGSSGSSGSSGSSGSSGSSMASNFTQFVLVDNG | |
| | GTGDVTVAPSNFANGIAEWISSNSRSQAYKVTCSVRQSSAQNRKYTIKVEVPKGAWRSYLNMELTIPIFATNSDCELIVKAMQGLLKDGNPIPSAIAANSGIY | |
| | GGSGGSMASNFTQFVLVDNGGTGDVTVAPSNFANGIAEWISSNSRSQAYKVTCSVRQSSAQNRKYTIKVEVPKGAWRSYLNMELTIPIFATNSDCELIVKA | |
| | MQGLLKDGNPIPSAIAANSGIYGGGSGGGSGGGSGGGSMASNFTQFVLVDNGGTGDVTVAPSNFANGIAEWISSNSRSQAYKVTCSVRQSSAQNRKYTIK | |
| | VEVPKGAWRSYLNMELTIPIFATNSDCELIVKAMQGLLKDGNPIPSAIAANSGIYGGSGGSMASNFTQFVLVDNGGTGDVTVAPSNFANGIAEWISSNSRSQ | |
| | AYKVTCSVRQSSAQNRKYTIKVEVPKGAWRSYLNMELTIPIFATNSDCELIVKAMQGLLKDGNPIPSAIAANSGIYSGGSSGGSSGSETPGTSESATPESSGGSS | |
| | GGSSDKKYSIGLDIGTNSVGWAVITDEYKVPSKKFKVLGNTDRHSIKKNLIGALLFDSGETAEATRLKRTARRRYTRRKNRICYLQEIFSNEMAKVDDSFFHRLE | |
| | ESFLVEEDKKHERHPIFGNIVDEVAYHEKYPTIYHLRKKLVDSTDKADLRLIYLALAHMIKFRGHFLIEGDLNPDNSDVDKLFIQLVQTYNQLFEENPINASGVDA | |
| | KAILSARLSKSRRLENLIAQLPGEKKNGLFGNLIALSLGLTPNFKSNFDLAEDAKLQLSKDTYDDDLDNLLAQIGDQYADLFLAAKNLSDAILLSDILRVNTEITKA | |
| | PLSASMIKRYDEHHQDLTLLKALVRQQLPEKYKEIFFDQSKNGYAGYIDGGASQEEFYKFIKPILEKMDGTEELLVKLNREDLLRKQRTFDNGSIPHQIHLGELH | |
| | AILRRQEDFYPFLKDNREKIEKILTFRIPYYVGPLARGNSRFAWMTRKSEETITPWNFEEVVDKGASAQSFIERMTNFDKNLPNEKVLPKHSLLYEYFTVYNELT | |
| | KVKYVTEGMRKPAFLSGEQKKAIVDLLFKTNRKVTVKQLKEDYFKKIECFDSVEISGVEDRFNASLGTYHDLLKIIKDKDFLDNEENEDILEDIVLTLTLFEDREMI | |
| | EERLKTYAHLFDDKVMKQLKRRRYTGWGRLSRKLINGIRDKQSGKTILDFLKSDGFANRNFMQLIHDDSLTFKEDIQKAQVSGQGDSLHEHIANLAGSPAIKK | |
| | GILQTVKVVDELVKVMGRHKPENIVIEMARENQTTQKGQKNSRERMKRIEEGIKELGSQILKEHPVENTQLQNEKLYLYYLQNGRDMYVDQELDINRLSDYD | |
| | VDHIVPQSFLKDDSIDNKVLTRSDKARGKSDNVPSEEVVKKMKNYWRQLLNAKLITQRKFDNLTKAERGGLSELDKAGFIKRQLVETRQITKHVAQILDSRM | |
| | NTKYDENDKLIREVKVITLKSKLVSDFRKDFQFYKVREINNYHHAHDAYLNAVVGTALIKKYPKLESEFVYGDYKVYDVRKMIAKSEQEIGKATAKYFFYSNIMN | |
| | FFKTEITLANGEIRKRPLIETNGETGEIVWDKGRDFATVRKVLSMPQVNIVKKTEVQTGGFSKESILPKRNSDKLIARKKDWDPKKYGGFDSPTVAYSVLVVAK | |
| | VEKGKSKKLKSVKELLGITIMERSSFEKNPIDFLEAKGYKEVKKDLIIKLPKYSLFELENGRKRMLASAGELQKGNELALPSKYVNFLYLASHYEKLKGSPEDNEQK | |
| | QLFVEQHKHYLDEIIEQISEFSKRVILADANLDKVLSAYNKHRDKPIREQAENIIHLFTLTNLGAPAAFKYFDTTIDRKRYTSTKEVLDATLIHQSITGLYETRIDLSQ | |
| | LGGDKRTADGSEFESPKKKAKVE | |
| PL12071 | MPAAKRVKLDGGTLNIEDEHRLHETSKEPDVSLGSTWLSDFPQAWAETGGMGLAVRQAPLIIPLKATSTPVSIKQYPMSQEARLGIKPHIQRLLDQGILVPCQ | 16,134 |
| | SPWNTPLLPVKKPGTNDYRPVQDLREVNKRVEDIHPTVPNPYNLLSGLPPSHQWYTVLDLKDAFFCLRLHPTSQPLFAFEWRDPEMGISGQLTWTRLPQGF | |
| | KNSPTLFNEALHRDLADFRIQHPDLILLQYVDDLLLAATSELDCQQGTRALLQTLGNLGYRASAKKAQICQKQVKYLGYLLKEGQRWLTEARKETVMGQPTPK | |
| | TPRQLREFLGKAGFCRLFIPGFAEMAAPLYPLTKPGTLFNWGPDQQKAYQEIKQALLTAPALGLPDLTKPFELFVDEKQGYAKGVLTQKLGPWRRPVAYLSKK | |
| | LDPVAAGWPPCLRMVAAIAVLTKDAGKLTMGQPLVILAPHAVEALVKQPPDRWLSNARMTHYQALLLDTDRVQFGPVVALNPATLLPLPEEGLQHNCLDI | |
| | LAEAHGTRPDLTDQPLPDADHTWYTDGSSLLQEGQRKAGAAVTTETEVIWAKALPAGTSAQRAELIALTQALKMAEGKKLNVYTDSRYAFATAHIHGEIYRR | |
| | RGWLTSEGKEIKNKDEILALLKALFLPKRLSIIHCPGHQKGHSAEARGNRMADQAARKAAITETPDTSTLLGSSGSSGSSGSSGSSGSSMASNFTQFVLVDNG | |
| | GTGDVTVAPSNFANGIAEWISSNSRSQAYKVTCSVRQSSAQNRKYTIKVEVPKGAWRSYLNMELTIPIFATNSDCELIVKAMQGLLKDGNPIPSAIAANSGIY | |
| | GGSGGSMASNFTQFVLVDNGGTGDVTVAPSNFANGIAEWISSNSRSQAYKVTCSVRQSSAQNRKYTIKVEVPKGAWRSYLNMELTIPIFATNSDCELIVKA | |
| | MQGLLKDGNPIPSAIAANSGIYGGGSGGGSGGGSGGGSMASNFTQFVLVDNGGTGDVTVAPSNFANGIAEWISSNSRSQAYKVTCSVRQSSAQNRKYTIK | |
| | VEVPKGAWRSYLNMELTIPIFATNSDCELIVKAMQGLLKDGNPIPSAIAANSGIYGGSGGSMASNFTQFVLVDNGGTGDVTVAPSNFANGIAEWISSNSRSQ | |
| | AYKVTCSVRQSSAQNRKYTIKVEVPKGAWRSYLNMELTIPIFATNSDCELIVKAMQGLLKDGNPIPSAIAANSGIYGSSGSSGSSGSSGSSGSSDKKYSIGLDIGT | |
| | NSVGWAVITDEYKVPSKKFKVLGNTDRHSIKKNLIGALLFDSGETAEATRLKRTARRRYTRRKNRICYLQEIFSNEMAKVDDSFFHRLEESFLVEEDKKHERHPI | |
| | FGNIVDEVAYHEKYPTIYHLRKKLVDSTDKADLRLIYLALAHMIKFRGHFLIEGDLNPDNSDVDKLFIQLVQTYNQLFEENPINASGVDAKAILSARLSKSRRLEN | |
| | LIAQLPGEKKNGLFGNLIALSLGLTPNFKSNFDLAEDAKLQLSKDTYDDDLDNLLAQIGDQYADLFLAAKNLSDAILLSDILRVNTEITKAPLSASMIKRYDEHHQ | |
| | DLTLLKALVRQQLPEKYKEIFFDQSKNGYAGYIDGGASQEEFYKFIKPILEKMDGTEELLVKLNREDLLRKQRTFDNGSIPHQIHLGELHAILRRQEDFYPFLKDN | |
| | REKIEKILTFRIPYYVGPLARGNSRFAWMTRKSEETITPWNFEEVVDKGASAQSFIERMTNFDKNLPNEKVLPKHSLLYEYFTVYNELTKVKYVTEGMRKPAFLS | |
| | GEQKKAIVDLLFKTNRKVTVKQLKEDYFKKIECFDSVEISGVEDRFNASLGTYHDLLKIIKDKDFLDNEENEDILEDIVLTLTLFEDREMIEERLKTYAHLFDDKVM | |
| | KQLKRRRYTGWGRLSRKLINGIRDKQSGKTILDFLKSDGFANRNFMQLIHDDSLTFKEDIQKAQVSGQGDSLHEHIANLAGSPAIKKGILQTVKVVDELVKVM | |
| | GRHKPENIVIEMARENQTTQKGQKNSRERMKRIEEGIKELGSQILKEHPVENTQLQNEKLYLYYLQNGRDMYVDQELDINRLSDYDVDHIVPQSFLKDDSID | |
| | NKVLTRSDKARGKSDNVPSEEVVKKMKNYWRQLLNAKLITQRKFDNLTKAERGGLSELDKAGFIKRQLVETRQITKHVAQILDSRMNTKYDENDKLIREVKVI | |
| | TLKSKLVSDFRKDFQFYKVREINNYHHAHDAYLNAVVGTALIKKYPKLESEFVYGDYKVYDVRKMIAKSEQEIGKATAKYFFYSNIMNFFKTEITLANGEIRKRPL | |
| | IETNGETGEIVWDKGRDFATVRKVLSMPQVNIVKKTEVQTGGFSKESILPKRNSDKLIARKKDWDPKKYGGFDSPTVAYSVLVVAKVEKGKSKKLKSVKELLGI | |
| | TIMERSSFEKNPIDFLEAKGYKEVKKDLIIKLPKYSLFELENGRKRMLASAGELQKGNELALPSKYVNFLYLASHYEKLKGSPEDNEQKQLFVEQHKHYLDEIIEQI | |
| | SEFSKRVILADANLDKVLSAYNKHRDKPIREQAENIIHLFTLTNLGAPAAFKYFDTTIDRKRYTSTKEVLDATLIHQSITGLYETRIDLSQLGGDKRTADGSEFESPK | |
| | KKAKVE | |
| PL12072 | MPAAKRVKLDGGTLNIEDEHRLHETSKEPDVSLGSTWLSDFPQAWAETGGMGLAVRQAPLIIPLKATSTPVSIKQYPMSQEARLGIKPHIQRLLDQGILVPCQ | 16,135 |
| | SPWNTPLLPVKKPGTNDYRPVQDLREVNKRVEDIHPTVPNPYNLLSGLPPSHQWYTVLDLKDAFFCLRLHPTSQPLFAFEWRDPEMGISGQLTWTRLPQGF | |
| | KNSPTLFNEALHRDLADFRIQHPDLILLQYVDDLLLAATSELDCQQGTRALLQTLGNLGYRASAKKAQICQKQVKYLGYLLKEGQRWLTEARKETVMGQPTPK | |
| | TPRQLREFLGKAGFCRLFIPGFAEMAAPLYPLTKPGTLFNWGPDQQKAYQEIKQALLTAPALGLPDLTKPFELFVDEKQGYAKGVLTQKLGPWRRPVAYLSKK | |
| | LDPVAAGWPPCLRMVAAIAVLTKDAGKLTMGQPLVILAPHAVEALVKQPPDRWLSNARMTHYQALLLDTDRVQFGPVVALNPATLLPLPEEGLQHNCLDI | |
| | LAEAHGTRPDLTDQPLPDADHTWYTDGSSLLQEGQRKAGAAVTTETEVIWAKALPAGTSAQRAELIALTQALKMAEGKKLNVYTDSRYAFATAHIHGEIYRR | |
| | RGWLTSEGKEIKNKDEILALLKALFLPKRLSIIHCPGHQKGHSAEARGNRMADQAARKAAITETPDTSTLLGSSGSSGSSGSSGSSGSSMASNFTQFVLVDNG | |
| | GTGDVTVAPSNFANGIAEWISSNSRSQAYKVTCSVRQSSAQNRKYTIKVEVPKGAWRSYLNMELTIPIFATNSDCELIVKAMQGLLKDGNPIPSAIAANSGIY | |
| | GGSGGSMASNFTQFVLVDNGGTGDVTVAPSNFANGIAEWISSNSRSQAYKVTCSVRQSSAQNRKYTIKVEVPKGAWRSYLNMELTIPIFATNSDCELIVKA | |
| | MQGLLKDGNPIPSAIAANSGIYGGGSGGGSGGGSGGGSMASNFTQFVLVDNGGTGDVTVAPSNFANGIAEWISSNSRSQAYKVTCSVRQSSAQNRKYTIK | |
| | VEVPKGAWRSYLNMELTIPIFATNSDCELIVKAMQGLLKDGNPIPSAIAANSGIYGGSGGSMASNFTQFVLVDNGGTGDVTVAPSNFANGIAEWISSNSRSQ | |
| | AYKVTCSVRQSSAQNRKYTIKVEVPKGAWRSYLNMELTIPIFATNSDCELIVKAMQGLLKDGNPIPSAIAANSGIYGSSGGGEAAAKDKKYSIGLDIGTNSVG | |
| | WAVITDEYKVPSKKFKVLGNTDRHSIKKNLIGALLFDSGETAEATRLKRTARRRYTRRKNRICYLQEIFSNEMAKVDDSFFHRLEESFLVEEDKKHERHPIFGNIV | |
| | DEVAYHEKYPTIYHLRKKLVDSTDKADLRLIYLALAHMIKFRGHFLIEGDLNPDNSDVDKLFIQLVQTYNQLFEENPINASGVDAKAILSARLSKSRRLENLIAQLP | |
| | GEKKNGLFGNLIALSLGLTPNFKSNFDLAEDAKLQLSKDTYDDDLDNLLAQIGDQYADLFLAAKNLSDAILLSDILRVNTEITKAPLSASMIKRYDEHHQDLTLLK | |
| | ALVRQQLPEKYKEIFFDQSKNGYAGYIDGGASQEEFYKFIKPILEKMDGTEELLVKLNREDLLRKQRTFDNGSIPHQIHLGELHAILRRQEDFYPFLKDNREKIEKI | |
| | LTFRIPYYVGPLARGNSRFAWMTRKSEETITPWNFEEVVDKGASAQSFIERMTNFDKNLPNEKVLPKHSLLYEYFTVYNELTKVKYVTEGMRKPAFLSGEQKK | |
| | AIVDLLFKTNRKVTVKQLKEDYFKKIECFDSVEISGVEDRFNASLGTYHDLLKIIKDKDFLDNEENEDILEDIVLTLTLFEDREMIEERLKTYAHLFDDKVMKQLKR | |
| | RRYTGWGRLSRKLINGIRDKQSGKTILDFLKSDGFANRNFMQLIHDDSLTFKEDIQKAQVSGQGDSLHEHIANLAGSPAIKKGILQTVKVVDELVKVMGRHKP | |
| | ENIVIEMARENQTTQKGQKNSRERMKRIEEGIKELGSQILKEHPVENTQLQNEKLYLYYLQNGRDMYVDQELDINRLSDYDVDHIVPQSFLKDDSIDNKVLTR | |
| | SDKARGKSDNVPSEEVVKKMKNYWRQLLNAKLITQRKFDNLTKAERGGLSELDKAGFIKRQLVETRQITKHVAQILDSRMNTKYDENDKLIREVKVITLKSKLV | |
| | SDFRKDFQFYKVREINNYHHAHDAYLNAVVGTALIKKYPKLESEFVYGDYKVYDVRKMIAKSEQEIGKATAKYFFYSNIMNFFKTEITLANGEIRKRPLIETNGET | |
| | GEIVWDKGRDFATVRKVLSMPQVNIVKKTEVQTGGFSKESILPKRNSDKLIARKKDWDPKKYGGFDSPTVAYSVLVVAKVEKGKSKKLKSVKELLGITIMERSS | |
| | FEKNPIDFLEAKGYKEVKKDLIIKLPKYSLFELENGRKRMLASAGELQKGNELALPSKYVNFLYLASHYEKLKGSPEDNEQKQLFVEQHKHYLDEIIEQISEFSKRVI | |
| | LADANLDKVLSAYNKHRDKPIREQAENIIHLFTLTNLGAPAAFKYFDTTIDRKRYTSTKEVLDATLIHQSITGLYETRIDLSQLGGDKRTADGSEFESPKKKAKVE | |
| PL12073 | MPAAKRVKLDGGTLNIEDEHRLHETSKEPDVSLGSTWLSDFPQAWAETGGMGLAVRQAPLIIPLKATSTPVSIKQYPMSQEARLGIKPHIQRLLDQGILVPCQ | 16,136 |
| | SPWNTPLLPVKKPGTNDYRPVQDLREVNKRVEDIHPTVPNPYNLLSGLPPSHQWYTVLDLKDAFFCLRLHPTSQPLFAFEWRDPEMGISGQLTWTRLPQGF | |
| | KNSPTLFNEALHRDLADFRIQHPDLILLQYVDDLLLAATSELDCQQGTRALLQTLGNLGYRASAKKAQICQKQVKYLGYLLKEGQRWLTEARKETVMGQPTPK | |
| | TPRQLREFLGKAGFCRLFIPGFAEMAAPLYPLTKPGTLFNWGPDQQKAYQEIKQALLTAPALGLPDLTKPFELFVDEKQGYAKGVLTQKLGPWRRPVAYLSKK | |
| | LDPVAAGWPPCLRMVAAIAVLTKDAGKLTMGQPLVILAPHAVEALVKQPPDRWLSNARMTHYQALLLDTDRVQFGPVVALNPATLLPLPEEGLQHNCLDI | |
| | LAEAHGTRPDLTDQPLPDADHTWYTDGSSLLQEGQRKAGAAVTTETEVIWAKALPAGTSAQRAELIALTQALKMAEGKKLNVYTDSRYAFATAHIHGEIYRR | |
| | RGWLTSEGKEIKNKDEILALLKALFLPKRLSIIHCPGHQKGHSAEARGNRMADQAARKAAITETPDTSTLLGSSGGGEAAAKMASNFTQFVLVDNGGTGDVT | |
| | VAPSNFANGIAEWISSNSRSQAYKVTCSVRQSSAQNRKYTIKVEVPKGAWRSYLNMELTIPIFATNSDCELIVKAMQGLLKDGNPIPSAIAANSGIYAEAAAKE | |
| | AAAKEAAAKEAAAKALEAEAAAKEAAAKEAAAKEAAAKADKKYSIGLDIGTNSVGWAVITDEYKVPSKKFKVLGNTDRHSIKKNLIGALLFDSGETAEATRLKR | |
| | TARRRYTRRKNRICYLQEIFSNEMAKVDDSFFHRLEESFLVEEDKKHERHPIFGNIVDEVAYHEKYPTIYHLRKKLVDSTDKADLRLIYLALAHMIKFRGHFLIEG | |
| | DLNPDNSDVDKLFIQLVQTYNQLFEENPINASGVDAKAILSARLSKSRRLENLIAQLPGEKKNGLFGNLIALSLGLTPNFKSNFDLAEDAKLQLSKDTYDDDLDN | |
| | LLAQIGDQYADLFLAAKNLSDAILLSDILRVNTEITKAPLSASMIKRYDEHHQDLTLLKALVRQQLPEKYKEIFFDQSKNGYAGYIDGGASQEEFYKFIKPILEKMD | |
| | GTEELLVKLNREDLLRKQRTFDNGSIPHQIHLGELHAILRRQEDFYPFLKDNREKIEKILTFRIPYYVGPLARGNSRFAWMTRKSEETITPWNFEEVVDKGASAQ | |
| | SFIERMTNFDKNLPNEKVLPKHSLLYEYFTVYNELTKVKYVTEGMRKPAFLSGEQKKAIVDLLFKTNRKVTVKQLKEDYFKKIECFDSVEISGVEDRFNASLGTYH | |
| | DLLKIIKDKDFLDNEENEDILEDIVLTLTLFEDREMIEERLKTYAHLFDDKVMKQLKRRRYTGWGRLSRKLINGIRDKQSGKTILDFLKSDGFANRNFMQLIHDD | |
| | SLTFKEDIQKAQVSGQGDSLHEHIANLAGSPAIKKGILQTVKVVDELVKVMGRHKPENIVIEMARENQTTQKGQKNSRERMKRIEEGIKELGSQILKEHPVEN | |
| | TQLQNEKLYLYYLQNGRDMYVDQELDINRLSDYDVDHIVPQSFLKDDSIDNKVLTRSDKARGKSDNVPSEEVVKKMKNYWRQLLNAKLITQRKFDNLTKAER | |
| | GGLSELDKAGFIKRQLVETRQITKHVAQILDSRMNTKYDENDKLIREVKVITLKSKLVSDFRKDFQFYKVREINNYHHAHDAYLNAVVGTALIKKYPKLESEFVY | |
| | GDYKVYDVRKMIAKSEQEIGKATAKYFFYSNIMNFFKTEITLANGEIRKRPLIETNGETGEIVWDKGRDFATVRKVLSMPQVNIVKKTEVQTGGFSKESILPKR | |
| | NSDKLIARKKDWDPKKYGGFDSPTVAYSVLVVAKVEKGKSKKLKSVKELLGITIMERSSFEKNPIDFLEAKGYKEVKKDLIIKLPKYSLFELENGRKRMLASAGEL | |
| | QKGNELALPSKYVNFLYLASHYEKLKGSPEDNEQKQLFVEQHKHYLDEIIEQISEFSKRVILADANLDKVLSAYNKHRDKPIREQAENIIHLFTLTNLGAPAAFKY | |
| | FDTTIDRKRYTSTKEVLDATLIHQSITGLYETRIDLSQLGGDKRTADGSEFESPKKKAKVE | |
| PL12074 | MPAAKRVKLDGGTLNIEDEHRLHETSKEPDVSLGSTWLSDFPQAWAETGGMGLAVRQAPLIIPLKATSTPVSIKQYPMSQEARLGIKPHIQRLLDQGILVPCQ | 16,137 |
| | SPWNTPLLPVKKPGTNDYRPVQDLREVNKRVEDIHPTVPNPYNLLSGLPPSHQWYTVLDLKDAFFCLRLHPTSQPLFAFEWRDPEMGISGQLTWTRLPQGF | |
| | KNSPTLFNEALHRDLADFRIQHPDLILLQYVDDLLLAATSELDCQQGTRALLQTLGNLGYRASAKKAQICQKQVKYLGYLLKEGQRWLTEARKETVMGQPTPK | |
| | TPRQLREFLGKAGFCRLFIPGFAEMAAPLYPLTKPGTLFNWGPDQQKAYQEIKQALLTAPALGLPDLTKPFELFVDEKQGYAKGVLTQKLGPWRRPVAYLSKK | |
| | LDPVAAGWPPCLRMVAAIAVLTKDAGKLTMGQPLVILAPHAVEALVKQPPDRWLSNARMTHYQALLLDTDRVQFGPVVALNPATLLPLPEEGLQHNCLDI | |
| | LAEAHGTRPDLTDQPLPDADHTWYTDGSSLLQEGQRKAGAAVTTETEVIWAKALPAGTSAQRAELIALTQALKMAEGKKLNVYTDSRYAFATAHIHGEIYRR | |
| | RGWLTSEGKEIKNKDEILALLKALFLPKRLSIIHCPGHQKGHSAEARGNRMADQAARKAAITETPDTSTLLGSSGGGEAAAKMASNFTQFVLVDNGGTGDVT | |
| | VAPSNFANGIAEWISSNSRSQAYKVTCSVRQSSAQNRKYTIKVEVPKGAWRSYLNMELTIPIFATNSDCELIVKAMQGLLKDGNPIPSAIAANSGIYSGGSSGG | |
| | SSGSETPGTSESATPESSGGSSGGSSDKKYSIGLDIGTNSVGWAVITDEYKVPSKKFKVLGNTDRHSIKKNLIGALLFDSGETAEATRLKRTARRRYTRRKNRICY | |
| | LQEIFSNEMAKVDDSFFHRLEESFLVEEDKKHERHPIFGNIVDEVAYHEKYPTIYHLRKKLVDSTDKADLRLIYLALAHMIKFRGHFLIEGDLNPDNSDVDKLFIQ | |
| | LVQTYNQLFEENPINASGVDAKAILSARLSKSRRLENLIAQLPGEKKNGLFGNLIALSLGLTPNFKSNFDLAEDAKLQLSKDTYDDDLDNLLAQIGDQYADLFLA | |
| | AKNLSDAILLSDILRVNTEITKAPLSASMIKRYDEHHQDLTLLKALVRQQLPEKYKEIFFDQSKNGYAGYIDGGASQEEFYKFIKPILEKMDGTEELLVKLNREDLL | |
| | RKQRTFDNGSIPHQIHLGELHAILRRQEDFYPFLKDNREKIEKILTFRIPYYVGPLARGNSRFAWMTRKSEETITPWNFEEVVDKGASAQSFIERMTNFDKNLP | |
| | NEKVLPKHSLLYEYFTVYNELTKVKYVTEGMRKPAFLSGEQKKAIVDLLFKTNRKVTVKQLKEDYFKKIECFDSVEISGVEDRFNASLGTYHDLLKIIKDKDFLDNE | |
| | ENEDILEDIVLTLTLFEDREMIEERLKTYAHLFDDKVMKQLKRRRYTGWGRLSRKLINGIRDKQSGKTILDFLKSDGFANRNFMQLIHDDSLTFKEDIQKAQVS | |
| | GQGDSLHEHIANLAGSPAIKKGILQTVKVVDELVKVMGRHKPENIVIEMARENQTTQKGQKNSRERMKRIEEGIKELGSQILKEHPVENTQLQNEKLYLYYLQ | |
| | NGRDMYVDQELDINRLSDYDVDHIVPQSFLKDDSIDNKVLTRSDKARGKSDNVPSEEVVKKMKNYWRQLLNAKLITQRKFDNLTKAERGGLSELDKAGFIKR | |
| | QLVETRQITKHVAQILDSRMNTKYDENDKLIREVKVITLKSKLVSDFRKDFQFYKVREINNYHHAHDAYLNAVVGTALIKKYPKLESEFVYGDYKVYDVRKMIA | |
| | KSEQEIGKATAKYFFYSNIMNFFKTEITLANGEIRKRPLIETNGETGEIVWDKGRDFATVRKVLSMPQVNIVKKTEVQTGGFSKESILPKRNSDKLIARKKDWDP | |
| | KKYGGFDSPTVAYSVLVVAKVEKGKSKKLKSVKELLGITIMERSSFEKNPIDFLEAKGYKEVKKDLIIKLPKYSLFELENGRKRMLASAGELQKGNELALPSKYVNF | |
| | LYLASHYEKLKGSPEDNEQKQLFVEQHKHYLDEIIEQISEFSKRVILADANLDKVLSAYNKHRDKPIREQAENIIHLFTLTNLGAPAAFKYFDTTIDRKRYTSTKEVL | |
| | DATLIHQSITGLYETRIDLSQLGGDKRTADGSEFESPKKKAKVE | |
| PL12075 | MPAAKRVKLDGGTLNIEDEHRLHETSKEPDVSLGSTWLSDFPQAWAETGGMGLAVRQAPLIIPLKATSTPVSIKQYPMSQEARLGIKPHIQRLLDQGILVPCQ | 16,138 |
| | SPWNTPLLPVKKPGTNDYRPVQDLREVNKRVEDIHPTVPNPYNLLSGLPPSHQWYTVLDLKDAFFCLRLHPTSQPLFAFEWRDPEMGISGQLTWTRLPQGF | |
| | KNSPTLFNEALHRDLADFRIQHPDLILLQYVDDLLLAATSELDCQQGTRALLQTLGNLGYRASAKKAQICQKQVKYLGYLLKEGQRWLTEARKETVMGQPTPK | |
| | TPRQLREFLGKAGFCRLFIPGFAEMAAPLYPLTKPGTLFNWGPDQQKAYQEIKQALLTAPALGLPDLTKPFELFVDEKQGYAKGVLTQKLGPWRRPVAYLSKK | |
| | LDPVAAGWPPCLRMVAAIAVLTKDAGKLTMGQPLVILAPHAVEALVKQPPDRWLSNARMTHYQALLLDTDRVQFGPVVALNPATLLPLPEEGLQHNCLDI | |
| | LAEAHGTRPDLTDQPLPDADHTWYTDGSSLLQEGQRKAGAAVTTETEVIWAKALPAGTSAQRAELIALTQALKMAEGKKLNVYTDSRYAFATAHIHGEIYRR | |
| | RGWLTSEGKEIKNKDEILALLKALFLPKRLSIIHCPGHQKGHSAEARGNRMADQAARKAAITETPDTSTLLGSSGGGEAAAKMASNFTQFVLVDNGGTGDVT | |
| | VAPSNFANGIAEWISSNSRSQAYKVTCSVRQSSAQNRKYTIKVEVPKGAWRSYLNMELTIPIFATNSDCELIVKAMQGLLKDGNPIPSAIAANSGIYGSSGSSG | |
| | SSGSSGSSGSSDKKYSIGLDIGTNSVGWAVITDEYKVPSKKFKVLGNTDRHSIKKNLIGALLFDSGETAEATRLKRTARRRYTRRKNRICYLQEIFSNEMAKVDDS | |
| | FFHRLEESFLVEEDKKHERHPIFGNIVDEVAYHEKYPTIYHLRKKLVDSTDKADLRLIYLALAHMIKFRGHFLIEGDLNPDNSDVDKLFIQLVQTYNQLFEENPIN | |
| | ASGVDAKAILSARLSKSRRLENLIAQLPGEKKNGLFGNLIALSLGLTPNFKSNFDLAEDAKLQLSKDTYDDDLDNLLAQIGDQYADLFLAAKNLSDAILLSDILRV | |
| | NTEITKAPLSASMIKRYDEHHQDLTLLKALVRQQLPEKYKEIFFDQSKNGYAGYIDGGASQEEFYKFIKPILEKMDGTEELLVKLNREDLLRKQRTFDNGSIPHQI | |
| | HLGELHAILRRQEDFYPFLKDNREKIEKILTFRIPYYVGPLARGNSRFAWMTRKSEETITPWNFEEVVDKGASAQSFIERMTNFDKNLPNEKVLPKHSLLYEYFT | |
| | VYNELTKVKYVTEGMRKPAFLSGEQKKAIVDLLFKTNRKVTVKQLKEDYFKKIECFDSVEISGVEDRFNASLGTYHDLLKIIKDKDFLDNEENEDILEDIVLTLTLFE | |
| | DREMIEERLKTYAHLFDDKVMKQLKRRRYTGWGRLSRKLINGIRDKQSGKTILDFLKSDGFANRNFMQLIHDDSLTFKEDIQKAQVSGQGDSLHEHIANLAG | |
| | SPAIKKGILQTVKVVDELVKVMGRHKPENIVIEMARENQTTQKGQKNSRERMKRIEEGIKELGSQILKEHPVENTQLQNEKLYLYYLQNGRDMYVDQELDIN | |
| | RLSDYDVDHIVPQSFLKDDSIDNKVLTRSDKARGKSDNVPSEEVVKKMKNYWRQLLNAKLITQRKFDNLTKAERGGLSELDKAGFIKRQLVETRQITKHVAQI | |
| | LDSRMNTKYDENDKLIREVKVITLKSKLVSDFRKDFQFYKVREINNYHHAHDAYLNAVVGTALIKKYPKLESEFVYGDYKVYDVRKMIAKSEQEIGKATAKYFFY | |
| | SNIMNFFKTEITLANGEIRKRPLIETNGETGEIVWDKGRDFATVRKVLSMPQVNIVKKTEVQTGGFSKESILPKRNSDKLIARKKDWDPKKYGGFDSPTVAYSV | |
| | LVVAKVEKGKSKKLKSVKELLGITIMERSSFEKNPIDFLEAKGYKEVKKDLIIKLPKYSLFELENGRKRMLASAGELQKGNELALPSKYVNFLYLASHYEKLKGSPED | |
| | NEQKQLFVEQHKHYLDEIIEQISEFSKRVILADANLDKVLSAYNKHRDKPIREQAENIIHLFTLTNLGAPAAFKYFDTTIDRKRYTSTKEVLDATLIHQSITGLYETRI | |
| | DLSQLGGDKRTADGSEFESPKKKAKVE | |
| PL12076 | MPAAKRVKLDGGTLNIEDEHRLHETSKEPDVSLGSTWLSDFPQAWAETGGMGLAVRQAPLIIPLKATSTPVSIKQYPMSQEARLGIKPHIQRLLDQGILVPCQ | 16,139 |
| | SPWNTPLLPVKKPGTNDYRPVQDLREVNKRVEDIHPTVPNPYNLLSGLPPSHQWYTVLDLKDAFFCLRLHPTSQPLFAFEWRDPEMGISGQLTWTRLPQGF | |
| | KNSPTLFNEALHRDLADFRIQHPDLILLQYVDDLLLAATSELDCQQGTRALLQTLGNLGYRASAKKAQICQKQVKYLGYLLKEGQRWLTEARKETVMGQPTPK | |
| | TPRQLREFLGKAGFCRLFIPGFAEMAAPLYPLTKPGTLFNWGPDQQKAYQEIKQALLTAPALGLPDLTKPFELFVDEKQGYAKGVLTQKLGPWRRPVAYLSKK | |
| | LDPVAAGWPPCLRMVAAIAVLTKDAGKLTMGQPLVILAPHAVEALVKQPPDRWLSNARMTHYQALLLDTDRVQFGPVVALNPATLLPLPEEGLQHNCLDI | |
| | LAEAHGTRPDLTDQPLPDADHTWYTDGSSLLQEGQRKAGAAVTTETEVIWAKALPAGTSAQRAELIALTQALKMAEGKKLNVYTDSRYAFATAHIHGEIYRR | |
| | RGWLTSEGKEIKNKDEILALLKALFLPKRLSIIHCPGHQKGHSAEARGNRMADQAARKAAITETPDTSTLLGSSGGGEAAAKMASNFTQFVLVDNGGTGDVT | |
| | VAPSNFANGIAEWISSNSRSQAYKVTCSVRQSSAQNRKYTIKVEVPKGAWRSYLNMELTIPIFATNSDCELIVKAMQGLLKDGNPIPSAIAANSGIYGSSGGGE | |
| | AAAKDKKYSIGLDIGTNSVGWAVITDEYKVPSKKFKVLGNTDRHSIKKNLIGALLFDSGETAEATRLKRTARRRYTRRKNRICYLQEIFSNEMAKVDDSFFHRLE | |
| | ESFLVEEDKKHERHPIFGNIVDEVAYHEKYPTIYHLRKKLVDSTDKADLRLIYLALAHMIKFRGHFLIEGDLNPDNSDVDKLFIQLVQTYNQLFEENPINASGVDA | |
| | KAILSARLSKSRRLENLIAQLPGEKKNGLFGNLIALSLGLTPNFKSNFDLAEDAKLQLSKDTYDDDLDNLLAQIGDQYADLFLAAKNLSDAILLSDILRVNTEITKA | |
| | PLSASMIKRYDEHHQDLTLLKALVRQQLPEKYKEIFFDQSKNGYAGYIDGGASQEEFYKFIKPILEKMDGTEELLVKLNREDLLRKQRTFDNGSIPHQIHLGELH | |
| | AILRRQEDFYPFLKDNREKIEKILTFRIPYYVGPLARGNSRFAWMTRKSEETITPWNFEEVVDKGASAQSFIERMTNFDKNLPNEKVLPKHSLLYEYFTVYNELT | |
| | KVKYVTEGMRKPAFLSGEQKKAIVDLLFKTNRKVTVKQLKEDYFKKIECFDSVEISGVEDRFNASLGTYHDLLKIIKDKDFLDNEENEDILEDIVLTLTLFEDREMI | |
| | EERLKTYAHLFDDKVMKQLKRRRYTGWGRLSRKLINGIRDKQSGKTILDFLKSDGFANRNFMQLIHDDSLTFKEDIQKAQVSGQGDSLHEHIANLAGSPAIKK | |
| | GILQTVKVVDELVKVMGRHKPENIVIEMARENQTTQKGQKNSRERMKRIEEGIKELGSQILKEHPVENTQLQNEKLYLYYLQNGRDMYVDQELDINRLSDYD | |
| | VDHIVPQSFLKDDSIDNKVLTRSDKARGKSDNVPSEEVVKKMKNYWRQLLNAKLITQRKFDNLTKAERGGLSELDKAGFIKRQLVETRQITKHVAQILDSRM | |
| | NTKYDENDKLIREVKVITLKSKLVSDFRKDFQFYKVREINNYHHAHDAYLNAVVGTALIKKYPKLESEFVYGDYKVYDVRKMIAKSEQEIGKATAKYFFYSNIMN | |
| | FFKTEITLANGEIRKRPLIETNGETGEIVWDKGRDFATVRKVLSMPQVNIVKKTEVQTGGFSKESILPKRNSDKLIARKKDWDPKKYGGFDSPTVAYSVLVVAK | |
| | VEKGKSKKLKSVKELLGITIMERSSFEKNPIDFLEAKGYKEVKKDLIIKLPKYSLFELENGRKRMLASAGELQKGNELALPSKYVNFLYLASHYEKLKGSPEDNEQK | |
| | QLFVEQHKHYLDEIIEQISEFSKRVILADANLDKVLSAYNKHRDKPIREQAENIIHLFTLTNLGAPAAFKYFDTTIDRKRYTSTKEVLDATLIHQSITGLYETRIDLSQ | |
| | LGGDKRTADGSEFESPKKKAKVE | |
| PL12077 | MPAAKRVKLDGGTLNIEDEHRLHETSKEPDVSLGSTWLSDFPQAWAETGGMGLAVRQAPLIIPLKATSTPVSIKQYPMSQEARLGIKPHIQRLLDQGILVPCQ | 16,140 |
| | SPWNTPLLPVKKPGTNDYRPVQDLREVNKRVEDIHPTVPNPYNLLSGLPPSHQWYTVLDLKDAFFCLRLHPTSQPLFAFEWRDPEMGISGQLTWTRLPQGF | |
| | KNSPTLFNEALHRDLADFRIQHPDLILLQYVDDLLLAATSELDCQQGTRALLQTLGNLGYRASAKKAQICQKQVKYLGYLLKEGQRWLTEARKETVMGQPTPK | |
| | TPRQLREFLGKAGFCRLFIPGFAEMAAPLYPLTKPGTLFNWGPDQQKAYQEIKQALLTAPALGLPDLTKPFELFVDEKQGYAKGVLTQKLGPWRRPVAYLSKK | |
| | LDPVAAGWPPCLRMVAAIAVLTKDAGKLTMGQPLVILAPHAVEALVKQPPDRWLSNARMTHYQALLLDTDRVQFGPVVALNPATLLPLPEEGLQHNCLDI | |
| | LAEAHGTRPDLTDQPLPDADHTWYTDGSSLLQEGQRKAGAAVTTETEVIWAKALPAGTSAQRAELIALTQALKMAEGKKLNVYTDSRYAFATAHIHGEIYRR | |
| | RGWLTSEGKEIKNKDEILALLKALFLPKRLSIIHCPGHQKGHSAEARGNRMADQAARKAAITETPDTSTLLGSSGGGEAAAKMASNFTQFVLVDNGGTGDVT | |
| | VAPSNFANGIAEWISSNSRSQAYKVTCSVRQSSAQNRKYTIKVEVPKGAWRSYLNMELTIPIFATNSDCELIVKAMQGLLKDGNPIPSAIAANSGIYGGSGGS | |
| | MASNFTQFVLVDNGGTGDVTVAPSNFANGIAEWISSNSRSQAYKVTCSVRQSSAQNRKYTIKVEVPKGAWRSYLNMELTIPIFATNSDCELIVKAMQGLLK | |
| | DGNPIPSAIAANSGIYAEAAAKEAAAKEAAAKEAAAKALEAEAAAKEAAAKEAAAKEAAAKADKKYSIGLDIGTNSVGWAVITDEYKVPSKKFKVLGNTDRHS | |
| | IKKNLIGALLFDSGETAEATRLKRTARRRYTRRKNRICYLQEIFSNEMAKVDDSFFHRLEESFLVEEDKKHERHPIFGNIVDEVAYHEKYPTIYHLRKKLVDSTDKA | |
| | DLRLIYLALAHMIKFRGHFLIEGDLNPDNSDVDKLFIQLVQTYNQLFEENPINASGVDAKAILSARLSKSRRLENLIAQLPGEKKNGLFGNLIALSLGLTPNFKSNF | |
| | DLAEDAKLQLSKDTYDDDLDNLLAQIGDQYADLFLAAKNLSDAILLSDILRVNTEITKAPLSASMIKRYDEHHQDLTLLKALVRQQLPEKYKEIFFDQSKNGYAG | |
| | YIDGGASQEEFYKFIKPILEKMDGTEELLVKLNREDLLRKQRTFDNGSIPHQIHLGELHAILRRQEDFYPFLKDNREKIEKILTFRIPYYVGPLARGNSRFAWMTR | |
| | KSEETITPWNFEEVVDKGASAQSFIERMTNFDKNLPNEKVLPKHSLLYEYFTVYNELTKVKYVTEGMRKPAFLSGEQKKAIVDLLFKTNRKVTVKQLKEDYFKKI | |
| | ECFDSVEISGVEDRFNASLGTYHDLLKIIKDKDFLDNEENEDILEDIVLTLTLFEDREMIEERLKTYAHLFDDKVMKQLKRRRYTGWGRLSRKLINGIRDKQSGKT | |
| | ILDFLKSDGFANRNFMQLIHDDSLTFKEDIQKAQVSGQGDSLHEHIANLAGSPAIKKGILQTVKVVDELVKVMGRHKPENIVIEMARENQTTQKGQKNSRER | |
| | MKRIEEGIKELGSQILKEHPVENTQLQNEKLYLYYLQNGRDMYVDQELDINRLSDYDVDHIVPQSFLKDDSIDNKVLTRSDKARGKSDNVPSEEVVKKMKNY | |
| | WRQLLNAKLITQRKFDNLTKAERGGLSELDKAGFIKRQLVETRQITKHVAQILDSRMNTKYDENDKLIREVKVITLKSKLVSDFRKDFQFYKVREINNYHHAHD | |
| | AYLNAVVGTALIKKYPKLESEFVYGDYKVYDVRKMIAKSEQEIGKATAKYFFYSNIMNFFKTEITLANGEIRKRPLIETNGETGEIVWDKGRDFATVRKVLSMPQ | |
| | VNIVKKTEVQTGGFSKESILPKRNSDKLIARKKDWDPKKYGGFDSPTVAYSVLVVAKVEKGKSKKLKSVKELLGITIMERSSFEKNPIDFLEAKGYKEVKKDLIIKL | |
| | PKYSLFELENGRKRMLASAGELQKGNELALPSKYVNFLYLASHYEKLKGSPEDNEQKQLFVEQHKHYLDEIIEQISEFSKRVILADANLDKVLSAYNKHRDKPIRE | |
| | QAENIIHLFTLTNLGAPAAFKYFDTTIDRKRYTSTKEVLDATLIHQSITGLYETRIDLSQLGGDKRTADGSEFESPKKKAKVE | |
| PL12078 | MPAAKRVKLDGGTLNIEDEHRLHETSKEPDVSLGSTWLSDFPQAWAETGGMGLAVRQAPLIIPLKATSTPVSIKQYPMSQEARLGIKPHIQRLLDQGILVPCQ | 16,141 |
| | SPWNTPLLPVKKPGTNDYRPVQDLREVNKRVEDIHPTVPNPYNLLSGLPPSHQWYTVLDLKDAFFCLRLHPTSQPLFAFEWRDPEMGISGQLTWTRLPQGF | |
| | KNSPTLFNEALHRDLADFRIQHPDLILLQYVDDLLLAATSELDCQQGTRALLQTLGNLGYRASAKKAQICQKQVKYLGYLLKEGQRWLTEARKETVMGQPTPK | |
| | TPRQLREFLGKAGFCRLFIPGFAEMAAPLYPLTKPGTLFNWGPDQQKAYQEIKQALLTAPALGLPDLTKPFELFVDEKQGYAKGVLTQKLGPWRRPVAYLSKK | |
| | LDPVAAGWPPCLRMVAAIAVLTKDAGKLTMGQPLVILAPHAVEALVKQPPDRWLSNARMTHYQALLLDTDRVQFGPVVALNPATLLPLPEEGLQHNCLDI | |
| | LAEAHGTRPDLTDQPLPDADHTWYTDGSSLLQEGQRKAGAAVTTETEVIWAKALPAGTSAQRAELIALTQALKMAEGKKLNVYTDSRYAFATAHIHGEIYRR | |
| | RGWLTSEGKEIKNKDEILALLKALFLPKRLSIIHCPGHQKGHSAEARGNRMADQAARKAAITETPDTSTLLGSSGGGEAAAKMASNFTQFVLVDNGGTGDVT | |
| | VAPSNFANGIAEWISSNSRSQAYKVTCSVRQSSAQNRKYTIKVEVPKGAWRSYLNMELTIPIFATNSDCELIVKAMQGLLKDGNPIPSAIAANSGIYGGSGGS | |
| | MASNFTQFVLVDNGGTGDVTVAPSNFANGIAEWISSNSRSQAYKVTCSVRQSSAQNRKYTIKVEVPKGAWRSYLNMELTIPIFATNSDCELIVKAMQGLLK | |
| | DGNPIPSAIAANSGIYSGGSSGGSSGSETPGTSESATPESSGGSSGGSSDKKYSIGLDIGTNSVGWAVITDEYKVPSKKFKVLGNTDRHSIKKNLIGALLFDSGET | |
| | AEATRLKRTARRRYTRRKNRICYLQEIFSNEMAKVDDSFFHRLEESFLVEEDKKHERHPIFGNIVDEVAYHEKYPTIYHLRKKLVDSTDKADLRLIYLALAHMIKF | |
| | RGHFLIEGDLNPDNSDVDKLFIQLVQTYNQLFEENPINASGVDAKAILSARLSKSRRLENLIAQLPGEKKNGLFGNLIALSLGLTPNFKSNFDLAEDAKLQLSKDT | |
| | YDDDLDNLLAQIGDQYADLFLAAKNLSDAILLSDILRVNTEITKAPLSASMIKRYDEHHQDLTLLKALVRQQLPEKYKEIFFDQSKNGYAGYIDGGASQEEFYKFI | |
| | KPILEKMDGTEELLVKLNREDLLRKQRTFDNGSIPHQIHLGELHAILRRQEDFYPFLKDNREKIEKILTFRIPYYVGPLARGNSRFAWMTRKSEETITPWNFEEVV | |
| | DKGASAQSFIERMTNFDKNLPNEKVLPKHSLLYEYFTVYNELTKVKYVTEGMRKPAFLSGEQKKAIVDLLFKTNRKVTVKQLKEDYFKKIECFDSVEISGVEDRF | |
| | NASLGTYHDLLKIIKDKDFLDNEENEDILEDIVLTLTLFEDREMIEERLKTYAHLFDDKVMKQLKRRRYTGWGRLSRKLINGIRDKQSGKTILDFLKSDGFANRNF | |
| | MQLIHDDSLTFKEDIQKAQVSGQGDSLHEHIANLAGSPAIKKGILQTVKVVDELVKVMGRHKPENIVIEMARENQTTQKGQKNSRERMKRIEEGIKELGSQIL | |
| | KEHPVENTQLQNEKLYLYYLQNGRDMYVDQELDINRLSDYDVDHIVPQSFLKDDSIDNKVLTRSDKARGKSDNVPSEEVVKKMKNYWRQLLNAKLITQRKF | |
| | DNLTKAERGGLSELDKAGFIKRQLVETRQITKHVAQILDSRMNTKYDENDKLIREVKVITLKSKLVSDFRKDFQFYKVREINNYHHAHDAYLNAVVGTALIKKYP | |
| | KLESEFVYGDYKVYDVRKMIAKSEQEIGKATAKYFFYSNIMNFFKTEITLANGEIRKRPLIETNGETGEIVWDKGRDFATVRKVLSMPQVNIVKKTEVQTGGFS | |
| | KESILPKRNSDKLIARKKDWDPKKYGGFDSPTVAYSVLVVAKVEKGKSKKLKSVKELLGITIMERSSFEKNPIDFLEAKGYKEVKKDLIIKLPKYSLFELENGRKRM | |
| | LASAGELQKGNELALPSKYVNFLYLASHYEKLKGSPEDNEQKQLFVEQHKHYLDEIIEQISEFSKRVILADANLDKVLSAYNKHRDKPIREQAENIIHLFTLTNLGA | |
| | PAAFKYFDTTIDRKRYTSTKEVLDATLIHQSITGLYETRIDLSQLGGDKRTADGSEFESPKKKAKVE | |
| PL12079 | MPAAKRVKLDGGTLNIEDEHRLHETSKEPDVSLGSTWLSDFPQAWAETGGMGLAVRQAPLIIPLKATSTPVSIKQYPMSQEARLGIKPHIQRLLDQGILVPCQ | 16,142 |
| | SPWNTPLLPVKKPGTNDYRPVQDLREVNKRVEDIHPTVPNPYNLLSGLPPSHQWYTVLDLKDAFFCLRLHPTSQPLFAFEWRDPEMGISGQLTWTRLPQGF | |
| | KNSPTLFNEALHRDLADFRIQHPDLILLQYVDDLLLAATSELDCQQGTRALLQTLGNLGYRASAKKAQICQKQVKYLGYLLKEGQRWLTEARKETVMGQPTPK | |
| | TPRQLREFLGKAGFCRLFIPGFAEMAAPLYPLTKPGTLFNWGPDQQKAYQEIKQALLTAPALGLPDLTKPFELFVDEKQGYAKGVLTQKLGPWRRPVAYLSKK | |
| | LDPVAAGWPPCLRMVAAIAVLTKDAGKLTMGQPLVILAPHAVEALVKQPPDRWLSNARMTHYQALLLDTDRVQFGPVVALNPATLLPLPEEGLQHNCLDI | |
| | LAEAHGTRPDLTDQPLPDADHTWYTDGSSLLQEGQRKAGAAVTTETEVIWAKALPAGTSAQRAELIALTQALKMAEGKKLNVYTDSRYAFATAHIHGEIYRR | |
| | RGWLTSEGKEIKNKDEILALLKALFLPKRLSIIHCPGHQKGHSAEARGNRMADQAARKAAITETPDTSTLLGSSGGGEAAAKMASNFTQFVLVDNGGTGDVT | |
| | VAPSNFANGIAEWISSNSRSQAYKVTCSVRQSSAQNRKYTIKVEVPKGAWRSYLNMELTIPIFATNSDCELIVKAMQGLLKDGNPIPSAIAANSGIYGGSGGS | |
| | MASNFTQFVLVDNGGTGDVTVAPSNFANGIAEWISSNSRSQAYKVTCSVRQSSAQNRKYTIKVEVPKGAWRSYLNMELTIPIFATNSDCELIVKAMQGLLK | |
| | DGNPIPSAIAANSGIYGSSGSSGSSGSSGSSGSSDKKYSIGLDIGTNSVGWAVITDEYKVPSKKFKVLGNTDRHSIKKNLIGALLFDSGETAEATRLKRTARRRYT | |
| | RRKNRICYLQEIFSNEMAKVDDSFFHRLEESFLVEEDKKHERHPIFGNIVDEVAYHEKYPTIYHLRKKLVDSTDKADLRLIYLALAHMIKFRGHFLIEGDLNPDNS | |
| | DVDKLFIQLVQTYNQLFEENPINASGVDAKAILSARLSKSRRLENLIAQLPGEKKNGLFGNLIALSLGLTPNFKSNFDLAEDAKLQLSKDTYDDDLDNLLAQIGD | |
| | QYADLFLAAKNLSDAILLSDILRVNTEITKAPLSASMIKRYDEHHQDLTLLKALVRQQLPEKYKEIFFDQSKNGYAGYIDGGASQEEFYKFIKPILEKMDGTEELLV | |
| | KLNREDLLRKQRTFDNGSIPHQIHLGELHAILRRQEDFYPFLKDNREKIEKILTFRIPYYVGPLARGNSRFAWMTRKSEETITPWNFEEVVDKGASAQSFIERMT | |
| | NFDKNLPNEKVLPKHSLLYEYFTVYNELTKVKYVTEGMRKPAFLSGEQKKAIVDLLFKTNRKVTVKQLKEDYFKKIECFDSVEISGVEDRFNASLGTYHDLLKIIK | |
| | DKDFLDNEENEDILEDIVLTLTLFEDREMIEERLKTYAHLFDDKVMKQLKRRRYTGWGRLSRKLINGIRDKQSGKTILDFLKSDGFANRNFMQLIHDDSLTFKE | |
| | DIQKAQVSGQGDSLHEHIANLAGSPAIKKGILQTVKVVDELVKVMGRHKPENIVIEMARENQTTQKGQKNSRERMKRIEEGIKELGSQILKEHPVENTQLQN | |
| | EKLYLYYLQNGRDMYVDQELDINRLSDYDVDHIVPQSFLKDDSIDNKVLTRSDKARGKSDNVPSEEVVKKMKNYWRQLLNAKLITQRKFDNLTKAERGGLSE | |
| | LDKAGFIKRQLVETRQITKHVAQILDSRMNTKYDENDKLIREVKVITLKSKLVSDFRKDFQFYKVREINNYHHAHDAYLNAVVGTALIKKYPKLESEFVYGDYKV | |
| | YDVRKMIAKSEQEIGKATAKYFFYSNIMNFFKTEITLANGEIRKRPLIETNGETGEIVWDKGRDFATVRKVLSMPQVNIVKKTEVQTGGFSKESILPKRNSDKLI | |
| | ARKKDWDPKKYGGFDSPTVAYSVLVVAKVEKGKSKKLKSVKELLGITIMERSSFEKNPIDFLEAKGYKEVKKDLIIKLPKYSLFELENGRKRMLASAGELQKGNEL | |
| | ALPSKYVNFLYLASHYEKLKGSPEDNEQKQLFVEQHKHYLDEIIEQISEFSKRVILADANLDKVLSAYNKHRDKPIREQAENIIHLFTLTNLGAPAAFKYFDTTIDR | |
| | KRYTSTKEVLDATLIHQSITGLYETRIDLSQLGGDKRTADGSEFESPKKKAKVE | |
| PL12080 | MPAAKRVKLDGGTLNIEDEHRLHETSKEPDVSLGSTWLSDFPQAWAETGGMGLAVRQAPLIIPLKATSTPVSIKQYPMSQEARLGIKPHIQRLLDQGILVPCQ | 16,143 |
| | SPWNTPLLPVKKPGTNDYRPVQDLREVNKRVEDIHPTVPNPYNLLSGLPPSHQWYTVLDLKDAFFCLRLHPTSQPLFAFEWRDPEMGISGQLTWTRLPQGF | |
| | KNSPTLFNEALHRDLADFRIQHPDLILLQYVDDLLLAATSELDCQQGTRALLQTLGNLGYRASAKKAQICQKQVKYLGYLLKEGQRWLTEARKETVMGQPTPK | |
| | TPRQLREFLGKAGFCRLFIPGFAEMAAPLYPLTKPGTLFNWGPDQQKAYQEIKQALLTAPALGLPDLTKPFELFVDEKQGYAKGVLTQKLGPWRRPVAYLSKK | |
| | LDPVAAGWPPCLRMVAAIAVLTKDAGKLTMGQPLVILAPHAVEALVKQPPDRWLSNARMTHYQALLLDTDRVQFGPVVALNPATLLPLPEEGLQHNCLDI | |
| | LAEAHGTRPDLTDQPLPDADHTWYTDGSSLLQEGQRKAGAAVTTETEVIWAKALPAGTSAQRAELIALTQALKMAEGKKLNVYTDSRYAFATAHIHGEIYRR | |
| | RGWLTSEGKEIKNKDEILALLKALFLPKRLSIIHCPGHQKGHSAEARGNRMADQAARKAAITETPDTSTLLGSSGGGEAAAKMASNFTQFVLVDNGGTGDVT | |
| | VAPSNFANGIAEWISSNSRSQAYKVTCSVRQSSAQNRKYTIKVEVPKGAWRSYLNMELTIPIFATNSDCELIVKAMQGLLKDGNPIPSAIAANSGIYGGSGGS | |
| | MASNFTQFVLVDNGGTGDVTVAPSNFANGIAEWISSNSRSQAYKVTCSVRQSSAQNRKYTIKVEVPKGAWRSYLNMELTIPIFATNSDCELIVKAMQGLLK | |
| | DGNPIPSAIAANSGIYGSSGGGEAAAKDKKYSIGLDIGTNSVGWAVITDEYKVPSKKFKVLGNTDRHSIKKNLIGALLFDSGETAEATRLKRTARRRYTRRKNRI | |
| | CYLQEIFSNEMAKVDDSFFHRLEESFLVEEDKKHERHPIFGNIVDEVAYHEKYPTIYHLRKKLVDSTDKADLRLIYLALAHMIKFRGHFLIEGDLNPDNSDVDKLF | |
| | IQLVQTYNQLFEENPINASGVDAKAILSARLSKSRRLENLIAQLPGEKKNGLFGNLIALSLGLTPNFKSNFDLAEDAKLQLSKDTYDDDLDNLLAQIGDQYADLFL | |
| | AAKNLSDAILLSDILRVNTEITKAPLSASMIKRYDEHHQDLTLLKALVRQQLPEKYKEIFFDQSKNGYAGYIDGGASQEEFYKFIKPILEKMDGTEELLVKLNREDL | |
| | LRKQRTFDNGSIPHQIHLGELHAILRRQEDFYPFLKDNREKIEKILTFRIPYYVGPLARGNSRFAWMTRKSEETITPWNFEEVVDKGASAQSFIERMTNFDKNL | |
| | PNEKVLPKHSLLYEYFTVYNELTKVKYVTEGMRKPAFLSGEQKKAIVDLLFKTNRKVTVKQLKEDYFKKIECFDSVEISGVEDRFNASLGTYHDLLKIIKDKDFLD | |
| | NEENEDILEDIVLTLTLFEDREMIEERLKTYAHLFDDKVMKQLKRRRYTGWGRLSRKLINGIRDKQSGKTILDFLKSDGFANRNFMQLIHDDSLTFKEDIQKAQ | |
| | VSGQGDSLHEHIANLAGSPAIKKGILQTVKVVDELVKVMGRHKPENIVIEMARENQTTQKGQKNSRERMKRIEEGIKELGSQILKEHPVENTQLQNEKLYLYY | |
| | LQNGRDMYVDQELDINRLSDYDVDHIVPQSFLKDDSIDNKVLTRSDKARGKSDNVPSEEVVKKMKNYWRQLLNAKLITQRKFDNLTKAERGGLSELDKAGFI | |
| | KRQLVETRQITKHVAQILDSRMNTKYDENDKLIREVKVITLKSKLVSDFRKDFQFYKVREINNYHHAHDAYLNAVVGTALIKKYPKLESEFVYGDYKVYDVRKM | |
| | IAKSEQEIGKATAKYFFYSNIMNFFKTEITLANGEIRKRPLIETNGETGEIVWDKGRDFATVRKVLSMPQVNIVKKTEVQTGGFSKESILPKRNSDKLIARKKDW | |
| | DPKKYGGFDSPTVAYSVLVVAKVEKGKSKKLKSVKELLGITIMERSSFEKNPIDFLEAKGYKEVKKDLIIKLPKYSLFELENGRKRMLASAGELQKGNELALPSKYV | |
| | NFLYLASHYEKLKGSPEDNEQKQLFVEQHKHYLDEIIEQISEFSKRVILADANLDKVLSAYNKHRDKPIREQAENIIHLFTLTNLGAPAAFKYFDTTIDRKRYTSTK | |
| | EVLDATLIHQSITGLYETRIDLSQLGGDKRTADGSEFESPKKKAKVE | |
| PL12081 | MPAAKRVKLDGGTLNIEDEHRLHETSKEPDVSLGSTWLSDFPQAWAETGGMGLAVRQAPLIIPLKATSTPVSIKQYPMSQEARLGIKPHIQRLLDQGILVPCQ | 16,144 |
| | SPWNTPLLPVKKPGTNDYRPVQDLREVNKRVEDIHPTVPNPYNLLSGLPPSHQWYTVLDLKDAFFCLRLHPTSQPLFAFEWRDPEMGISGQLTWTRLPQGF | |
| | KNSPTLFNEALHRDLADFRIQHPDLILLQYVDDLLLAATSELDCQQGTRALLQTLGNLGYRASAKKAQICQKQVKYLGYLLKEGQRWLTEARKETVMGQPTPK | |
| | TPRQLREFLGKAGFCRLFIPGFAEMAAPLYPLTKPGTLFNWGPDQQKAYQEIKQALLTAPALGLPDLTKPFELFVDEKQGYAKGVLTQKLGPWRRPVAYLSKK | |
| | LDPVAAGWPPCLRMVAAIAVLTKDAGKLTMGQPLVILAPHAVEALVKQPPDRWLSNARMTHYQALLLDTDRVQFGPVVALNPATLLPLPEEGLQHNCLDI | |
| | LAEAHGTRPDLTDQPLPDADHTWYTDGSSLLQEGQRKAGAAVTTETEVIWAKALPAGTSAQRAELIALTQALKMAEGKKLNVYTDSRYAFATAHIHGEIYRR | |
| | RGWLTSEGKEIKNKDEILALLKALFLPKRLSIIHCPGHQKGHSAEARGNRMADQAARKAAITETPDTSTLLGSSGGGEAAAKMASNFTQFVLVDNGGTGDVT | |
| | VAPSNFANGIAEWISSNSRSQAYKVTCSVRQSSAQNRKYTIKVEVPKGAWRSYLNMELTIPIFATNSDCELIVKAMQGLLKDGNPIPSAIAANSGIYGGSGGS | |
| | MASNFTQFVLVDNGGTGDVTVAPSNFANGIAEWISSNSRSQAYKVTCSVRQSSAQNRKYTIKVEVPKGAWRSYLNMELTIPIFATNSDCELIVKAMQGLLK | |
| | DGNPIPSAIAANSGIYGGGSGGGSGGGSGGGSMASNFTQFVLVDNGGTGDVTVAPSNFANGIAEWISSNSRSQAYKVTCSVRQSSAQNRKYTIKVEVPKG | |
| | AWRSYLNMELTIPIFATNSDCELIVKAMQGLLKDGNPIPSAIAANSGIYGGSGGSMASNFTQFVLVDNGGTGDVTVAPSNFANGIAEWISSNSRSQAYKVTC | |
| | SVRQSSAQNRKYTIKVEVPKGAWRSYLNMELTIPIFATNSDCELIVKAMQGLLKDGNPIPSAIAANSGIYAEAAAKEAAAKEAAAKEAAAKALEAEAAAKEAA | |
| | AKEAAAKEAAAKADKKYSIGLDIGTNSVGWAVITDEYKVPSKKFKVLGNTDRHSIKKNLIGALLFDSGETAEATRLKRTARRRYTRRKNRICYLQEIFSNEMAKV | |
| | DDSFFHRLEESFLVEEDKKHERHPIFGNIVDEVAYHEKYPTIYHLRKKLVDSTDKADLRLIYLALAHMIKFRGHFLIEGDLNPDNSDVDKLFIQLVQTYNQLFEEN | |
| | PINASGVDAKAILSARLSKSRRLENLIAQLPGEKKNGLFGNLIALSLGLTPNFKSNFDLAEDAKLQLSKDTYDDDLDNLLAQIGDQYADLFLAAKNLSDAILLSDIL | |
| | RVNTEITKAPLSASMIKRYDEHHQDLTLLKALVRQQLPEKYKEIFFDQSKNGYAGYIDGGASQEEFYKFIKPILEKMDGTEELLVKLNREDLLRKQRTFDNGSIP | |
| | HQIHLGELHAILRRQEDFYPFLKDNREKIEKILTFRIPYYVGPLARGNSRFAWMTRKSEETITPWNFEEVVDKGASAQSFIERMTNFDKNLPNEKVLPKHSLLYE | |
| | YFTVYNELTKVKYVTEGMRKPAFLSGEQKKAIVDLLFKTNRKVTVKQLKEDYFKKIECFDSVEISGVEDRFNASLGTYHDLLKIIKDKDFLDNEENEDILEDIVLTL | |
| | TLFEDREMIEERLKTYAHLFDDKVMKQLKRRRYTGWGRLSRKLINGIRDKQSGKTILDFLKSDGFANRNFMQLIHDDSLTFKEDIQKAQVSGQGDSLHEHIAN | |
| | LAGSPAIKKGILQTVKVVDELVKVMGRHKPENIVIEMARENQTTQKGQKNSRERMKRIEEGIKELGSQILKEHPVENTQLQNEKLYLYYLQNGRDMYVDQEL | |
| | DINRLSDYDVDHIVPQSFLKDDSIDNKVLTRSDKARGKSDNVPSEEVVKKMKNYWRQLLNAKLITQRKFDNLTKAERGGLSELDKAGFIKRQLVETRQITKHV | |
| | AQILDSRMNTKYDENDKLIREVKVITLKSKLVSDFRKDFQFYKVREINNYHHAHDAYLNAVVGTALIKKYPKLESEFVYGDYKVYDVRKMIAKSEQEIGKATAKY | |
| | FFYSNIMNFFKTEITLANGEIRKRPLIETNGETGEIVWDKGRDFATVRKVLSMPQVNIVKKTEVQTGGFSKESILPKRNSDKLIARKKDWDPKKYGGFDSPTVA | |
| | YSVLVVAKVEKGKSKKLKSVKELLGITIMERSSFEKNPIDFLEAKGYKEVKKDLIIKLPKYSLFELENGRKRMLASAGELQKGNELALPSKYVNFLYLASHYEKLKGS | |
| | PEDNEQKQLFVEQHKHYLDEIIEQISEFSKRVILADANLDKVLSAYNKHRDKPIREQAENIIHLFTLTNLGAPAAFKYFDTTIDRKRYTSTKEVLDATLIHQSITGLY | |
| | ETRIDLSQLGGDKRTADGSEFESPKKKAKVE | |
| PL12082 | MPAAKRVKLDGGTLNIEDEHRLHETSKEPDVSLGSTWLSDFPQAWAETGGMGLAVRQAPLIIPLKATSTPVSIKQYPMSQEARLGIKPHIQRLLDQGILVPCQ | 16,145 |
| | SPWNTPLLPVKKPGTNDYRPVQDLREVNKRVEDIHPTVPNPYNLLSGLPPSHQWYTVLDLKDAFFCLRLHPTSQPLFAFEWRDPEMGISGQLTWTRLPQGF | |
| | KNSPTLFNEALHRDLADFRIQHPDLILLQYVDDLLLAATSELDCQQGTRALLQTLGNLGYRASAKKAQICQKQVKYLGYLLKEGQRWLTEARKETVMGQPTPK | |
| | TPRQLREFLGKAGFCRLFIPGFAEMAAPLYPLTKPGTLFNWGPDQQKAYQEIKQALLTAPALGLPDLTKPFELFVDEKQGYAKGVLTQKLGPWRRPVAYLSKK | |
| | LDPVAAGWPPCLRMVAAIAVLTKDAGKLTMGQPLVILAPHAVEALVKQPPDRWLSNARMTHYQALLLDTDRVQFGPVVALNPATLLPLPEEGLQHNCLDI | |
| | LAEAHGTRPDLTDQPLPDADHTWYTDGSSLLQEGQRKAGAAVTTETEVIWAKALPAGTSAQRAELIALTQALKMAEGKKLNVYTDSRYAFATAHIHGEIYRR | |
| | RGWLTSEGKEIKNKDEILALLKALFLPKRLSIIHCPGHQKGHSAEARGNRMADQAARKAAITETPDTSTLLGSSGGGEAAAKMASNFTQFVLVDNGGTGDVT | |
| | VAPSNFANGIAEWISSNSRSQAYKVTCSVRQSSAQNRKYTIKVEVPKGAWRSYLNMELTIPIFATNSDCELIVKAMQGLLKDGNPIPSAIAANSGIYGGSGGS | |
| | MASNFTQFVLVDNGGTGDVTVAPSNFANGIAEWISSNSRSQAYKVTCSVRQSSAQNRKYTIKVEVPKGAWRSYLNMELTIPIFATNSDCELIVKAMQGLLK | |
| | DGNPIPSAIAANSGIYGGGSGGGSGGGSGGGSMASNFTQFVLVDNGGTGDVTVAPSNFANGIAEWISSNSRSQAYKVTCSVRQSSAQNRKYTIKVEVPKG | |
| | AWRSYLNMELTIPIFATNSDCELIVKAMQGLLKDGNPIPSAIAANSGIYGGSGGSMASNFTQFVLVDNGGTGDVTVAPSNFANGIAEWISSNSRSQAYKVTC | |
| | SVRQSSAQNRKYTIKVEVPKGAWRSYLNMELTIPIFATNSDCELIVKAMQGLLKDGNPIPSAIAANSGIYSGGSSGGSSGSETPGTSESATPESSGGSSGGSSD | |
| | KKYSIGLDIGTNSVGWAVITDEYKVPSKKFKVLGNTDRHSIKKNLIGALLFDSGETAEATRLKRTARRRYTRRKNRICYLQEIFSNEMAKVDDSFFHRLEESFLVE | |
| | EDKKHERHPIFGNIVDEVAYHEKYPTIYHLRKKLVDSTDKADLRLIYLALAHMIKFRGHFLIEGDLNPDNSDVDKLFIQLVQTYNQLFEENPINASGVDAKAILSA | |
| | RLSKSRRLENLIAQLPGEKKNGLFGNLIALSLGLTPNFKSNFDLAEDAKLQLSKDTYDDDLDNLLAQIGDQYADLFLAAKNLSDAILLSDILRVNTEITKAPLSAS | |
| | MIKRYDEHHQDLTLLKALVRQQLPEKYKEIFFDQSKNGYAGYIDGGASQEEFYKFIKPILEKMDGTEELLVKLNREDLLRKQRTFDNGSIPHQIHLGELHAILRR | |
| | QEDFYPFLKDNREKIEKILTFRIPYYVGPLARGNSRFAWMTRKSEETITPWNFEEVVDKGASAQSFIERMTNFDKNLPNEKVLPKHSLLYEYFTVYNELTKVKYV | |
| | TEGMRKPAFLSGEQKKAIVDLLFKTNRKVTVKQLKEDYFKKIECFDSVEISGVEDRFNASLGTYHDLLKIIKDKDFLDNEENEDILEDIVLTLTLFEDREMIEERLKT | |
| | YAHLFDDKVMKQLKRRRYTGWGRLSRKLINGIRDKQSGKTILDFLKSDGFANRNFMQLIHDDSLTFKEDIQKAQVSGQGDSLHEHIANLAGSPAIKKGILQTV | |
| | KVVDELVKVMGRHKPENIVIEMARENQTTQKGQKNSRERMKRIEEGIKELGSQILKEHPVENTQLQNEKLYLYYLQNGRDMYVDQELDINRLSDYDVDHIV | |
| | PQSFLKDDSIDNKVLTRSDKARGKSDNVPSEEVVKKMKNYWRQLLNAKLITQRKFDNLTKAERGGLSELDKAGFIKRQLVETRQITKHVAQILDSRMNTKYDE | |
| | NDKLIREVKVITLKSKLVSDFRKDFQFYKVREINNYHHAHDAYLNAVVGTALIKKYPKLESEFVYGDYKVYDVRKMIAKSEQEIGKATAKYFFYSNIMNFFKTEIT | |
| | LANGEIRKRPLIETNGETGEIVWDKGRDFATVRKVLSMPQVNIVKKTEVQTGGFSKESILPKRNSDKLIARKKDWDPKKYGGFDSPTVAYSVLVVAKVEKGKS | |
| | KKLKSVKELLGITIMERSSFEKNPIDFLEAKGYKEVKKDLIIKLPKYSLFELENGRKRMLASAGELQKGNELALPSKYVNFLYLASHYEKLKGSPEDNEQKQLFVEQ | |
| | HKHYLDEIIEQISEFSKRVILADANLDKVLSAYNKHRDKPIREQAENIIHLFTLTNLGAPAAFKYFDTTIDRKRYTSTKEVLDATLIHQSITGLYETRIDLSQLGGDKR | |
| | TADGSEFESPKKKAKVE | |
| PL12083 | MPAAKRVKLDGGTLNIEDEHRLHETSKEPDVSLGSTWLSDFPQAWAETGGMGLAVRQAPLIIPLKATSTPVSIKQYPMSQEARLGIKPHIQRLLDQGILVPCQ | 16,146 |
| | SPWNTPLLPVKKPGTNDYRPVQDLREVNKRVEDIHPTVPNPYNLLSGLPPSHQWYTVLDLKDAFFCLRLHPTSQPLFAFEWRDPEMGISGQLTWTRLPQGF | |
| | KNSPTLFNEALHRDLADFRIQHPDLILLQYVDDLLLAATSELDCQQGTRALLQTLGNLGYRASAKKAQICQKQVKYLGYLLKEGQRWLTEARKETVMGQPTPK | |
| | TPRQLREFLGKAGFCRLFIPGFAEMAAPLYPLTKPGTLFNWGPDQQKAYQEIKQALLTAPALGLPDLTKPFELFVDEKQGYAKGVLTQKLGPWRRPVAYLSKK | |
| | LDPVAAGWPPCLRMVAAIAVLTKDAGKLTMGQPLVILAPHAVEALVKQPPDRWLSNARMTHYQALLLDTDRVQFGPVVALNPATLLPLPEEGLQHNCLDI | |
| | LAEAHGTRPDLTDQPLPDADHTWYTDGSSLLQEGQRKAGAAVTTETEVIWAKALPAGTSAQRAELIALTQALKMAEGKKLNVYTDSRYAFATAHIHGEIYRR | |
| | RGWLTSEGKEIKNKDEILALLKALFLPKRLSIIHCPGHQKGHSAEARGNRMADQAARKAAITETPDTSTLLGSSGGGEAAAKMASNFTQFVLVDNGGTGDVT | |
| | VAPSNFANGIAEWISSNSRSQAYKVTCSVRQSSAQNRKYTIKVEVPKGAWRSYLNMELTIPIFATNSDCELIVKAMQGLLKDGNPIPSAIAANSGIYGGSGGS | |
| | MASNFTQFVLVDNGGTGDVTVAPSNFANGIAEWISSNSRSQAYKVTCSVRQSSAQNRKYTIKVEVPKGAWRSYLNMELTIPIFATNSDCELIVKAMQGLLK | |
| | DGNPIPSAIAANSGIYGGGSGGGSGGGSGGGSMASNFTQFVLVDNGGTGDVTVAPSNFANGIAEWISSNSRSQAYKVTCSVRQSSAQNRKYTIKVEVPKG | |
| | AWRSYLNMELTIPIFATNSDCELIVKAMQGLLKDGNPIPSAIAANSGIYGGSGGSMASNFTQFVLVDNGGTGDVTVAPSNFANGIAEWISSNSRSQAYKVTC | |
| | SVRQSSAQNRKYTIKVEVPKGAWRSYLNMELTIPIFATNSDCELIVKAMQGLLKDGNPIPSAIAANSGIYGSSGSSGSSGSSGSSGSSDKKYSIGLDIGTNSVG | |
| | WAVITDEYKVPSKKFKVLGNTDRHSIKKNLIGALLFDSGETAEATRLKRTARRRYTRRKNRICYLQEIFSNEMAKVDDSFFHRLEESFLVEEDKKHERHPIFGNIV | |
| | DEVAYHEKYPTIYHLRKKLVDSTDKADLRLIYLALAHMIKFRGHFLIEGDLNPDNSDVDKLFIQLVQTYNQLFEENPINASGVDAKAILSARLSKSRRLENLIAQLP | |
| | GEKKNGLFGNLIALSLGLTPNFKSNFDLAEDAKLQLSKDTYDDDLDNLLAQIGDQYADLFLAAKNLSDAILLSDILRVNTEITKAPLSASMIKRYDEHHQDLTLLK | |
| | ALVRQQLPEKYKEIFFDQSKNGYAGYIDGGASQEEFYKFIKPILEKMDGTEELLVKLNREDLLRKQRTFDNGSIPHQIHLGELHAILRRQEDFYPFLKDNREKIEKI | |
| | LTFRIPYYVGPLARGNSRFAWMTRKSEETITPWNFEEVVDKGASAQSFIERMTNFDKNLPNEKVLPKHSLLYEYFTVYNELTKVKYVTEGMRKPAFLSGEQKK | |
| | AIVDLLFKTNRKVTVKQLKEDYFKKIECFDSVEISGVEDRFNASLGTYHDLLKIIKDKDFLDNEENEDILEDIVLTLTLFEDREMIEERLKTYAHLFDDKVMKQLKR | |
| | RRYTGWGRLSRKLINGIRDKQSGKTILDFLKSDGFANRNFMQLIHDDSLTFKEDIQKAQVSGQGDSLHEHIANLAGSPAIKKGILQTVKVVDELVKVMGRHKP | |
| | ENIVIEMARENQTTQKGQKNSRERMKRIEEGIKELGSQILKEHPVENTQLQNEKLYLYYLQNGRDMYVDQELDINRLSDYDVDHIVPQSFLKDDSIDNKVLTR | |
| | SDKARGKSDNVPSEEVVKKMKNYWRQLLNAKLITQRKFDNLTKAERGGLSELDKAGFIKRQLVETRQITKHVAQILDSRMNTKYDENDKLIREVKVITLKSKLV | |
| | SDFRKDFQFYKVREINNYHHAHDAYLNAVVGTALIKKYPKLESEFVYGDYKVYDVRKMIAKSEQEIGKATAKYFFYSNIMNFFKTEITLANGEIRKRPLIETNGET | |
| | GEIVWDKGRDFATVRKVLSMPQVNIVKKTEVQTGGFSKESILPKRNSDKLIARKKDWDPKKYGGFDSPTVAYSVLVVAKVEKGKSKKLKSVKELLGITIMERSS | |
| | FEKNPIDFLEAKGYKEVKKDLIIKLPKYSLFELENGRKRMLASAGELQKGNELALPSKYVNFLYLASHYEKLKGSPEDNEQKQLFVEQHKHYLDEIIEQISEFSKRVI | |
| | LADANLDKVLSAYNKHRDKPIREQAENIIHLFTLTNLGAPAAFKYFDTTIDRKRYTSTKEVLDATLIHQSITGLYETRIDLSQLGGDKRTADGSEFESPKKKAKVE | |
| PL12084 | MPAAKRVKLDGGTLNIEDEHRLHETSKEPDVSLGSTWLSDFPQAWAETGGMGLAVRQAPLIIPLKATSTPVSIKQYPMSQEARLGIKPHIQRLLDQGILVPCQ | 16,147 |
| | SPWNTPLLPVKKPGTNDYRPVQDLREVNKRVEDIHPTVPNPYNLLSGLPPSHQWYTVLDLKDAFFCLRLHPTSQPLFAFEWRDPEMGISGQLTWTRLPQGF | |
| | KNSPTLFNEALHRDLADFRIQHPDLILLQYVDDLLLAATSELDCQQGTRALLQTLGNLGYRASAKKAQICQKQVKYLGYLLKEGQRWLTEARKETVMGQPTPK | |
| | TPRQLREFLGKAGFCRLFIPGFAEMAAPLYPLTKPGTLFNWGPDQQKAYQEIKQALLTAPALGLPDLTKPFELFVDEKQGYAKGVLTQKLGPWRRPVAYLSKK | |
| | LDPVAAGWPPCLRMVAAIAVLTKDAGKLTMGQPLVILAPHAVEALVKQPPDRWLSNARMTHYQALLLDTDRVQFGPVVALNPATLLPLPEEGLQHNCLDI | |
| | LAEAHGTRPDLTDQPLPDADHTWYTDGSSLLQEGQRKAGAAVTTETEVIWAKALPAGTSAQRAELIALTQALKMAEGKKLNVYTDSRYAFATAHIHGEIYRR | |
| | RGWLTSEGKEIKNKDEILALLKALFLPKRLSIIHCPGHQKGHSAEARGNRMADQAARKAAITETPDTSTLLGSSGGGEAAAKMASNFTQFVLVDNGGTGDVT | |
| | VAPSNFANGIAEWISSNSRSQAYKVTCSVRQSSAQNRKYTIKVEVPKGAWRSYLNMELTIPIFATNSDCELIVKAMQGLLKDGNPIPSAIAANSGIYGGSGGS | |
| | MASNFTQFVLVDNGGTGDVTVAPSNFANGIAEWISSNSRSQAYKVTCSVRQSSAQNRKYTIKVEVPKGAWRSYLNMELTIPIFATNSDCELIVKAMQGLLK | |
| | DGNPIPSAIAANSGIYGGGSGGGSGGGSGGGSMASNFTQFVLVDNGGTGDVTVAPSNFANGIAEWISSNSRSQAYKVTCSVRQSSAQNRKYTIKVEVPKG | |
| | AWRSYLNMELTIPIFATNSDCELIVKAMQGLLKDGNPIPSAIAANSGIYGGSGGSMASNFTQFVLVDNGGTGDVTVAPSNFANGIAEWISSNSRSQAYKVTC | |
| | SVRQSSAQNRKYTIKVEVPKGAWRSYLNMELTIPIFATNSDCELIVKAMQGLLKDGNPIPSAIAANSGIYGSSGGGEAAAKDKKYSIGLDIGTNSVGWAVITDE | |
| | YKVPSKKFKVLGNTDRHSIKKNLIGALLFDSGETAEATRLKRTARRRYTRRKNRICYLQEIFSNEMAKVDDSFFHRLEESFLVEEDKKHERHPIFGNIVDEVAYHE | |
| | KYPTIYHLRKKLVDSTDKADLRLIYLALAHMIKFRGHFLIEGDLNPDNSDVDKLFIQLVQTYNQLFEENPINASGVDAKAILSARLSKSRRLENLIAQLPGEKKNGL | |
| | FGNLIALSLGLTPNFKSNFDLAEDAKLQLSKDTYDDDLDNLLAQIGDQYADLFLAAKNLSDAILLSDILRVNTEITKAPLSASMIKRYDEHHQDLTLLKALVRQQL | |
| | PEKYKEIFFDQSKNGYAGYIDGGASQEEFYKFIKPILEKMDGTEELLVKLNREDLLRKQRTFDNGSIPHQIHLGELHAILRRQEDFYPFLKDNREKIEKILTFRIPYY | |
| | VGPLARGNSRFAWMTRKSEETITPWNFEEVVDKGASAQSFIERMTNFDKNLPNEKVLPKHSLLYEYFTVYNELTKVKYVTEGMRKPAFLSGEQKKAIVDLLFK | |
| | TNRKVTVKQLKEDYFKKIECFDSVEISGVEDRFNASLGTYHDLLKIIKDKDFLDNEENEDILEDIVLTLTLFEDREMIEERLKTYAHLFDDKVMKQLKRRRYTGWG | |
| | RLSRKLINGIRDKQSGKTILDFLKSDGFANRNFMQLIHDDSLTFKEDIQKAQVSGQGDSLHEHIANLAGSPAIKKGILQTVKVVDELVKVMGRHKPENIVIEMA | |
| | RENQTTQKGQKNSRERMKRIEEGIKELGSQILKEHPVENTQLQNEKLYLYYLQNGRDMYVDQELDINRLSDYDVDHIVPQSFLKDDSIDNKVLTRSDKARGKS | |
| | DNVPSEEVVKKMKNYWRQLLNAKLITQRKFDNLTKAERGGLSELDKAGFIKRQLVETRQITKHVAQILDSRMNTKYDENDKLIREVKVITLKSKLVSDFRKDFQ | |
| | FYKVREINNYHHAHDAYLNAVVGTALIKKYPKLESEFVYGDYKVYDVRKMIAKSEQEIGKATAKYFFYSNIMNFFKTEITLANGEIRKRPLIETNGETGEIVWDK | |
| | GRDFATVRKVLSMPQVNIVKKTEVQTGGFSKESILPKRNSDKLIARKKDWDPKKYGGFDSPTVAYSVLVVAKVEKGKSKKLKSVKELLGITIMERSSFEKNPIDF | |
| | LEAKGYKEVKKDLIIKLPKYSLFELENGRKRMLASAGELQKGNELALPSKYVNFLYLASHYEKLKGSPEDNEQKQLFVEQHKHYLDEIIEQISEFSKRVILADANLD | |
| | KVLSAYNKHRDKPIREQAENIIHLFTLTNLGAPAAFKYFDTTIDRKRYTSTKEVLDATLIHQSITGLYETRIDLSQLGGDKRTADGSEFESPKKKAKVE | |
| PL12109 | MPAAKRVKLDGGTAPLEEEYRLFLEAPIQNVTLLEQWKREIPKVWAEINPPGLASTQAPIHVQLLSTALPVRVRQYPITLEAKRSLRETIRKFRAAGILRPVHSP | 16,148 |
| | WNTPLLPVRKSGTSEYRMVQDLREVNKRVETIHPTVPNPYTLLSLLPPDRIWYSVLDLKDAFFCIPLAPESQLIFAFEWADAEEGESGQLTWTRLPQGFKNSPT | |
| | LFNEALNRDLQGFRLDHPSVSLLQYVDDLLIAADTQAACLSATRDLLMTLAELGYRVSGKKAQLCQEEVTYLGFKIHKGSRSLSNSRTQAILQIPVPKTKRQVRE | |
| | FLGKIGYCRLFIPGFAELAQPLYAATRPGNDPLVWGEKEEEAFQSLKLALTQPPALALPSLDKPFQLFVEETSGAAKGVLTQALGPWKRPVAYLSKRLDPVAAG | |
| | WPRCLRAIAAAALLTREASKLTFGQDIEITSSHNLESLLRSPPDKWLTNARITQYQVLLLDPPRVRFKQTAALNPATLLPETDDTLPIHHCLDTLDSLTSTRPDLT | |
| | DQPLAQAEATLFTDGSSYIRDGKRYAGAAVVTLDSVIWAEPLPIGTSAQKAELIALTKALEWSKDKSVNIYTDSRYAFATLHVHGMIYRERGWLTAGGKAIKN | |
| | APEILALLTAVWLPKRVAVMHCKGHQKDDAPTSTGNRRADEVAREVAIRPLSTQATISAEAAAKEAAAKEAAAKEAAAKALEAEAAAKEAAAKEAAAKEAA | |
| | AKAMASNFTQFVLVDNGGTGDVTVAPSNFANGIAEWISSNSRSQAYKVTCSVRQSSAQNRKYTIKVEVPKGAWRSYLNMELTIPIFATNSDCELIVKAMQG | |
| | LLKDGNPIPSAIAANSGIYAEAAAKEAAAKEAAAKEAAAKALEAEAAAKEAAAKEAAAKEAAAKADKKYSIGLDIGTNSVGWAVITDEYKVPSKKFKVLGNTD | |
| | RHSIKKNLIGALLFDSGETAEATRLKRTARRRYTRRKNRICYLQEIFSNEMAKVDDSFFHRLEESFLVEEDKKHERHPIFGNIVDEVAYHEKYPTIYHLRKKLVDST | |
| | DKADLRLIYLALAHMIKFRGHFLIEGDLNPDNSDVDKLFIQLVQTYNQLFEENPINASGVDAKAILSARLSKSRRLENLIAQLPGEKKNGLFGNLIALSLGLTPNF | |
| | KSNFDLAEDAKLQLSKDTYDDDLDNLLAQIGDQYADLFLAAKNLSDAILLSDILRVNTEITKAPLSASMIKRYDEHHQDLTLLKALVRQQLPEKYKEIFFDQSKN | |
| | GYAGYIDGGASQEEFYKFIKPILEKMDGTEELLVKLNREDLLRKQRTFDNGSIPHQIHLGELHAILRRQEDFYPFLKDNREKIEKILTFRIPYYVGPLARGNSRFA | |
| | WMTRKSEETITPWNFEEVVDKGASAQSFIERMTNFDKNLPNEKVLPKHSLLYEYFTVYNELTKVKYVTEGMRKPAFLSGEQKKAIVDLLFKTNRKVTVKQLKE | |
| | DYFKKIECFDSVEISGVEDRFNASLGTYHDLLKIIKDKDFLDNEENEDILEDIVLTLTLFEDREMIEERLKTYAHLFDDKVMKQLKRRRYTGWGRLSRKLINGIRDK | |
| | QSGKTILDFLKSDGFANRNFMQLIHDDSLTFKEDIQKAQVSGQGDSLHEHIANLAGSPAIKKGILQTVKVVDELVKVMGRHKPENIVIEMARENQTTQKGQK | |
| | NSRERMKRIEEGIKELGSQILKEHPVENTQLQNEKLYLYYLQNGRDMYVDQELDINRLSDYDVDHIVPQSFLKDDSIDNKVLTRSDKARGKSDNVPSEEVVKK | |
| | MKNYWRQLLNAKLITQRKFDNLTKAERGGLSELDKAGFIKRQLVETRQITKHVAQILDSRMNTKYDENDKLIREVKVITLKSKLVSDFRKDFQFYKVREINNYH | |
| | HAHDAYLNAVVGTALIKKYPKLESEFVYGDYKVYDVRKMIAKSEQEIGKATAKYFFYSNIMNFFKTEITLANGEIRKRPLIETNGETGEIVWDKGRDFATVRKVL | |
| | SMPQVNIVKKTEVQTGGFSKESILPKRNSDKLIARKKDWDPKKYGGFDSPTVAYSVLVVAKVEKGKSKKLKSVKELLGITIMERSSFEKNPIDFLEAKGYKEVKK | |
| | DLIIKLPKYSLFELENGRKRMLASAGELQKGNELALPSKYVNFLYLASHYEKLKGSPEDNEQKQLFVEQHKHYLDEIIEQISEFSKRVILADANLDKVLSAYNKHR | |
| | DKPIREQAENIIHLFTLTNLGAPAAFKYFDTTIDRKRYTSTKEVLDATLIHQSITGLYETRIDLSQLGGDKRTADGSEFESPKKKAKVE | |
| PL12110 | MPAAKRVKLDGGTAPLEEEYRLFLEAPIQNVTLLEQWKREIPKVWAEINPPGLASTQAPIHVQLLSTALPVRVRQYPITLEAKRSLRETIRKFRAAGILRPVHSP | 16,149 |
| | WNTPLLPVRKSGTSEYRMVQDLREVNKRVETIHPTVPNPYTLLSLLPPDRIWYSVLDLKDAFFCIPLAPESQLIFAFEWADAEEGESGQLTWTRLPQGFKNSPT | |
| | LFNEALNRDLQGFRLDHPSVSLLQYVDDLLIAADTQAACLSATRDLLMTLAELGYRVSGKKAQLCQEEVTYLGFKIHKGSRSLSNSRTQAILQIPVPKTKRQVRE | |
| | FLGKIGYCRLFIPGFAELAQPLYAATRPGNDPLVWGEKEEEAFQSLKLALTQPPALALPSLDKPFQLFVEETSGAAKGVLTQALGPWKRPVAYLSKRLDPVAAG | |
| | WPRCLRAIAAAALLTREASKLTFGQDIEITSSHNLESLLRSPPDKWLTNARITQYQVLLLDPPRVRFKQTAALNPATLLPETDDTLPIHHCLDTLDSLTSTRPDLT | |
| | DQPLAQAEATLFTDGSSYIRDGKRYAGAAVVTLDSVIWAEPLPIGTSAQKAELIALTKALEWSKDKSVNIYTDSRYAFATLHVHGMIYRERGWLTAGGKAIKN | |
| | APEILALLTAVWLPKRVAVMHCKGHQKDDAPTSTGNRRADEVAREVAIRPLSTQATISAEAAAKEAAAKEAAAKEAAAKALEAEAAAKEAAAKEAAAKEAA | |
| | AKAMASNFTQFVLVDNGGTGDVTVAPSNFANGIAEWISSNSRSQAYKVTCSVRQSSAQNRKYTIKVEVPKGAWRSYLNMELTIPIFATNSDCELIVKAMQG | |
| | LLKDGNPIPSAIAANSGIYSGGSSGGSSGSETPGTSESATPESSGGSSGGSSDKKYSIGLDIGTNSVGWAVITDEYKVPSKKFKVLGNTDRHSIKKNLIGALLFDS | |
| | GETAEATRLKRTARRRYTRRKNRICYLQEIFSNEMAKVDDSFFHRLEESFLVEEDKKHERHPIFGNIVDEVAYHEKYPTIYHLRKKLVDSTDKADLRLIYLALAHM | |
| | IKFRGHFLIEGDLNPDNSDVDKLFIQLVQTYNQLFEENPINASGVDAKAILSARLSKSRRLENLIAQLPGEKKNGLFGNLIALSLGLTPNFKSNFDLAEDAKLQLSK | |
| | DTYDDDLDNLLAQIGDQYADLFLAAKNLSDAILLSDILRVNTEITKAPLSASMIKRYDEHHQDLTLLKALVRQQLPEKYKEIFFDQSKNGYAGYIDGGASQEEFY | |
| | KFIKPILEKMDGTEELLVKLNREDLLRKQRTFDNGSIPHQIHLGELHAILRRQEDFYPFLKDNREKIEKILTFRIPYYVGPLARGNSRFAWMTRKSEETITPWNFE | |
| | EVVDKGASAQSFIERMTNFDKNLPNEKVLPKHSLLYEYFTVYNELTKVKYVTEGMRKPAFLSGEQKKAIVDLLFKTNRKVTVKQLKEDYFKKIECFDSVEISGVE | |
| | DRFNASLGTYHDLLKIIKDKDFLDNEENEDILEDIVLTLTLFEDREMIEERLKTYAHLFDDKVMKQLKRRRYTGWGRLSRKLINGIRDKQSGKTILDFLKSDGFAN | |
| | RNFMQLIHDDSLTFKEDIQKAQVSGQGDSLHEHIANLAGSPAIKKGILQTVKVVDELVKVMGRHKPENIVIEMARENQTTQKGQKNSRERMKRIEEGIKELG | |
| | SQILKEHPVENTQLQNEKLYLYYLQNGRDMYVDQELDINRLSDYDVDHIVPQSFLKDDSIDNKVLTRSDKARGKSDNVPSEEVVKKMKNYWRQLLNAKLITQ | |
| | RKFDNLTKAERGGLSELDKAGFIKRQLVETRQITKHVAQILDSRMNTKYDENDKLIREVKVITLKSKLVSDFRKDFQFYKVREINNYHHAHDAYLNAVVGTALIK | |
| | KYPKLESEFVYGDYKVYDVRKMIAKSEQEIGKATAKYFFYSNIMNFFKTEITLANGEIRKRPLIETNGETGEIVWDKGRDFATVRKVLSMPQVNIVKKTEVQTG | |
| | GFSKESILPKRNSDKLIARKKDWDPKKYGGFDSPTVAYSVLVVAKVEKGKSKKLKSVKELLGITIMERSSFEKNPIDFLEAKGYKEVKKDLIIKLPKYSLFELENGRK | |
| | RMLASAGELQKGNELALPSKYVNFLYLASHYEKLKGSPEDNEQKQLFVEQHKHYLDEIIEQISEFSKRVILADANLDKVLSAYNKHRDKPIREQAENIIHLFTLTN | |
| | LGAPAAFKYFDTTIDRKRYTSTKEVLDATLIHQSITGLYETRIDLSQLGGDKRTADGSEFESPKKKAKVE | |
| PL12111 | MPAAKRVKLDGGTAPLEEEYRLFLEAPIQNVTLLEQWKREIPKVWAEINPPGLASTQAPIHVQLLSTALPVRVRQYPITLEAKRSLRETIRKFRAAGILRPVHSP | 16,150 |
| | WNTPLLPVRKSGTSEYRMVQDLREVNKRVETIHPTVPNPYTLLSLLPPDRIWYSVLDLKDAFFCIPLAPESQLIFAFEWADAEEGESGQLTWTRLPQGFKNSPT | |
| | LFNEALNRDLQGFRLDHPSVSLLQYVDDLLIAADTQAACLSATRDLLMTLAELGYRVSGKKAQLCQEEVTYLGFKIHKGSRSLSNSRTQAILQIPVPKTKRQVRE | |
| | FLGKIGYCRLFIPGFAELAQPLYAATRPGNDPLVWGEKEEEAFQSLKLALTQPPALALPSLDKPFQLFVEETSGAAKGVLTQALGPWKRPVAYLSKRLDPVAAG | |
| | WPRCLRAIAAAALLTREASKLTFGQDIEITSSHNLESLLRSPPDKWLTNARITQYQVLLLDPPRVRFKQTAALNPATLLPETDDTLPIHHCLDTLDSLTSTRPDLT | |
| | DQPLAQAEATLFTDGSSYIRDGKRYAGAAVVTLDSVIWAEPLPIGTSAQKAELIALTKALEWSKDKSVNIYTDSRYAFATLHVHGMIYRERGWLTAGGKAIKN | |
| | APEILALLTAVWLPKRVAVMHCKGHQKDDAPTSTGNRRADEVAREVAIRPLSTQATISAEAAAKEAAAKEAAAKEAAAKALEAEAAAKEAAAKEAAAKEAA | |
| | AKAMASNFTQFVLVDNGGTGDVTVAPSNFANGIAEWISSNSRSQAYKVTCSVRQSSAQNRKYTIKVEVPKGAWRSYLNMELTIPIFATNSDCELIVKAMQG | |
| | LLKDGNPIPSAIAANSGIYGSSGSSGSSGSSGSSGSSDKKYSIGLDIGTNSVGWAVITDEYKVPSKKFKVLGNTDRHSIKKNLIGALLFDSGETAEATRLKRTARRR | |
| | YTRRKNRICYLQEIFSNEMAKVDDSFFHRLEESFLVEEDKKHERHPIFGNIVDEVAYHEKYPTIYHLRKKLVDSTDKADLRLIYLALAHMIKFRGHFLIEGDLNPD | |
| | NSDVDKLFIQLVQTYNQLFEENPINASGVDAKAILSARLSKSRRLENLIAQLPGEKKNGLFGNLIALSLGLTPNFKSNFDLAEDAKLQLSKDTYDDDLDNLLAQIG | |
| | DQYADLFLAAKNLSDAILLSDILRVNTEITKAPLSASMIKRYDEHHQDLTLLKALVRQQLPEKYKEIFFDQSKNGYAGYIDGGASQEEFYKFIKPILEKMDGTEELL | |
| | VKLNREDLLRKQRTFDNGSIPHQIHLGELHAILRRQEDFYPFLKDNREKIEKILTFRIPYYVGPLARGNSRFAWMTRKSEETITPWNFEEVVDKGASAQSFIERM | |
| | TNFDKNLPNEKVLPKHSLLYEYFTVYNELTKVKYVTEGMRKPAFLSGEQKKAIVDLLFKTNRKVTVKQLKEDYFKKIECFDSVEISGVEDRFNASLGTYHDLLKIIK | |
| | DKDFLDNEENEDILEDIVLTLTLFEDREMIEERLKTYAHLFDDKVMKQLKRRRYTGWGRLSRKLINGIRDKQSGKTILDFLKSDGFANRNFMQLIHDDSLTFKE | |
| | DIQKAQVSGQGDSLHEHIANLAGSPAIKKGILQTVKVVDELVKVMGRHKPENIVIEMARENQTTQKGQKNSRERMKRIEEGIKELGSQILKEHPVENTQLQN | |
| | EKLYLYYLQNGRDMYVDQELDINRLSDYDVDHIVPQSFLKDDSIDNKVLTRSDKARGKSDNVPSEEVVKKMKNYWRQLLNAKLITQRKFDNLTKAERGGLSE | |
| | LDKAGFIKRQLVETRQITKHVAQILDSRMNTKYDENDKLIREVKVITLKSKLVSDFRKDFQFYKVREINNYHHAHDAYLNAVVGTALIKKYPKLESEFVYGDYKV | |
| | YDVRKMIAKSEQEIGKATAKYFFYSNIMNFFKTEITLANGEIRKRPLIETNGETGEIVWDKGRDFATVRKVLSMPQVNIVKKTEVQTGGFSKESILPKRNSDKLI | |
| | ARKKDWDPKKYGGFDSPTVAYSVLVVAKVEKGKSKKLKSVKELLGITIMERSSFEKNPIDFLEAKGYKEVKKDLIIKLPKYSLFELENGRKRMLASAGELQKGNEL | |
| | ALPSKYVNFLYLASHYEKLKGSPEDNEQKQLFVEQHKHYLDEIIEQISEFSKRVILADANLDKVLSAYNKHRDKPIREQAENIIHLFTLTNLGAPAAFKYFDTTIDR | |
| | KRYTSTKEVLDATLIHQSITGLYETRIDLSQLGGDKRTADGSEFESPKKKAKVE | |
| PL12112 | MPAAKRVKLDGGTAPLEEEYRLFLEAPIQNVTLLEQWKREIPKVWAEINPPGLASTQAPIHVQLLSTALPVRVRQYPITLEAKRSLRETIRKFRAAGILRPVHSP | 16,151 |
| | WNTPLLPVRKSGTSEYRMVQDLREVNKRVETIHPTVPNPYTLLSLLPPDRIWYSVLDLKDAFFCIPLAPESQLIFAFEWADAEEGESGQLTWTRLPQGFKNSPT | |
| | LFNEALNRDLQGFRLDHPSVSLLQYVDDLLIAADTQAACLSATRDLLMTLAELGYRVSGKKAQLCQEEVTYLGFKIHKGSRSLSNSRTQAILQIPVPKTKRQVRE | |
| | FLGKIGYCRLFIPGFAELAQPLYAATRPGNDPLVWGEKEEEAFQSLKLALTQPPALALPSLDKPFQLFVEETSGAAKGVLTQALGPWKRPVAYLSKRLDPVAAG | |
| | WPRCLRAIAAAALLTREASKLTFGQDIEITSSHNLESLLRSPPDKWLTNARITQYQVLLLDPPRVRFKQTAALNPATLLPETDDTLPIHHCLDTLDSLTSTRPDLT | |
| | DQPLAQAEATLFTDGSSYIRDGKRYAGAAVVTLDSVIWAEPLPIGTSAQKAELIALTKALEWSKDKSVNIYTDSRYAFATLHVHGMIYRERGWLTAGGKAIKN | |
| | APEILALLTAVWLPKRVAVMHCKGHQKDDAPTSTGNRRADEVAREVAIRPLSTQATISAEAAAKEAAAKEAAAKEAAAKALEAEAAAKEAAAKEAAAKEAA | |
| | AKAMASNFTQFVLVDNGGTGDVTVAPSNFANGIAEWISSNSRSQAYKVTCSVRQSSAQNRKYTIKVEVPKGAWRSYLNMELTIPIFATNSDCELIVKAMQG | |
| | LLKDGNPIPSAIAANSGIYGSSGGGEAAAKDKKYSIGLDIGTNSVGWAVITDEYKVPSKKFKVLGNTDRHSIKKNLIGALLFDSGETAEATRLKRTARRRYTRRK | |
| | NRICYLQEIFSNEMAKVDDSFFHRLEESFLVEEDKKHERHPIFGNIVDEVAYHEKYPTIYHLRKKLVDSTDKADLRLIYLALAHMIKFRGHFLIEGDLNPDNSDVD | |
| | KLFIQLVQTYNQLFEENPINASGVDAKAILSARLSKSRRLENLIAQLPGEKKNGLFGNLIALSLGLTPNFKSNFDLAEDAKLQLSKDTYDDDLDNLLAQIGDQYA | |
| | DLFLAAKNLSDAILLSDILRVNTEITKAPLSASMIKRYDEHHQDLTLLKALVRQQLPEKYKEIFFDQSKNGYAGYIDGGASQEEFYKFIKPILEKMDGTEELLVKLN | |
| | REDLLRKQRTFDNGSIPHQIHLGELHAILRRQEDFYPFLKDNREKIEKILTFRIPYYVGPLARGNSRFAWMTRKSEETITPWNFEEVVDKGASAQSFIERMTNFD | |
| | KNLPNEKVLPKHSLLYEYFTVYNELTKVKYVTEGMRKPAFLSGEQKKAIVDLLFKTNRKVTVKQLKEDYFKKIECFDSVEISGVEDRFNASLGTYHDLLKIIKDKDF | |
| | LDNEENEDILEDIVLTLTLFEDREMIEERLKTYAHLFDDKVMKQLKRRRYTGWGRLSRKLINGIRDKQSGKTILDFLKSDGFANRNFMQLIHDDSLTFKEDIQKA | |
| | QVSGQGDSLHEHIANLAGSPAIKKGILQTVKVVDELVKVMGRHKPENIVIEMARENQTTQKGQKNSRERMKRIEEGIKELGSQILKEHPVENTQLQNEKLYLY | |
| | YLQNGRDMYVDQELDINRLSDYDVDHIVPQSFLKDDSIDNKVLTRSDKARGKSDNVPSEEVVKKMKNYWRQLLNAKLITQRKFDNLTKAERGGLSELDKAG | |
| | FIKRQLVETRQITKHVAQILDSRMNTKYDENDKLIREVKVITLKSKLVSDFRKDFQFYKVREINNYHHAHDAYLNAVVGTALIKKYPKLESEFVYGDYKVYDVRK | |
| | MIAKSEQEIGKATAKYFFYSNIMNFFKTEITLANGEIRKRPLIETNGETGEIVWDKGRDFATVRKVLSMPQVNIVKKTEVQTGGFSKESILPKRNSDKLIARKKD | |
| | WDPKKYGGFDSPTVAYSVLVVAKVEKGKSKKLKSVKELLGITIMERSSFEKNPIDFLEAKGYKEVKKDLIIKLPKYSLFELENGRKRMLASAGELQKGNELALPSK | |
| | YVNFLYLASHYEKLKGSPEDNEQKQLFVEQHKHYLDEIIEQISEFSKRVILADANLDKVLSAYNKHRDKPIREQAENIIHLFTLTNLGAPAAFKYFDTTIDRKRYTS | |
| | TKEVLDATLIHQSITGLYETRIDLSQLGGDKRTADGSEFESPKKKAKVE | |
| PL12113 | MPAAKRVKLDGGTAPLEEEYRLFLEAPIQNVTLLEQWKREIPKVWAEINPPGLASTQAPIHVQLLSTALPVRVRQYPITLEAKRSLRETIRKFRAAGILRPVHSP | 16,152 |
| | WNTPLLPVRKSGTSEYRMVQDLREVNKRVETIHPTVPNPYTLLSLLPPDRIWYSVLDLKDAFFCIPLAPESQLIFAFEWADAEEGESGQLTWTRLPQGFKNSPT | |
| | LFNEALNRDLQGFRLDHPSVSLLQYVDDLLIAADTQAACLSATRDLLMTLAELGYRVSGKKAQLCQEEVTYLGFKIHKGSRSLSNSRTQAILQIPVPKTKRQVRE | |
| | FLGKIGYCRLFIPGFAELAQPLYAATRPGNDPLVWGEKEEEAFQSLKLALTQPPALALPSLDKPFQLFVEETSGAAKGVLTQALGPWKRPVAYLSKRLDPVAAG | |
| | WPRCLRAIAAAALLTREASKLTFGQDIEITSSHNLESLLRSPPDKWLTNARITQYQVLLLDPPRVRFKQTAALNPATLLPETDDTLPIHHCLDTLDSLTSTRPDLT | |
| | DQPLAQAEATLFTDGSSYIRDGKRYAGAAVVTLDSVIWAEPLPIGTSAQKAELIALTKALEWSKDKSVNIYTDSRYAFATLHVHGMIYRERGWLTAGGKAIKN | |
| | APEILALLTAVWLPKRVAVMHCKGHQKDDAPTSTGNRRADEVAREVAIRPLSTQATISAEAAAKEAAAKEAAAKEAAAKALEAEAAAKEAAAKEAAAKEAA | |
| | AKAMASNFTQFVLVDNGGTGDVTVAPSNFANGIAEWISSNSRSQAYKVTCSVRQSSAQNRKYTIKVEVPKGAWRSYLNMELTIPIFATNSDCELIVKAMQG | |
| | LLKDGNPIPSAIAANSGIYGGSGGSMASNFTQFVLVDNGGTGDVTVAPSNFANGIAEWISSNSRSQAYKVTCSVRQSSAQNRKYTIKVEVPKGAWRSYLNM | |
| | ELTIPIFATNSDCELIVKAMQGLLKDGNPIPSAIAANSGIYAEAAAKEAAAKEAAAKEAAAKALEAEAAAKEAAAKEAAAKEAAAKADKKYSIGLDIGTNSVGW | |
| | AVITDEYKVPSKKFKVLGNTDRHSIKKNLIGALLFDSGETAEATRLKRTARRRYTRRKNRICYLQEIFSNEMAKVDDSFFHRLEESFLVEEDKKHERHPIFGNIVD | |
| | EVAYHEKYPTIYHLRKKLVDSTDKADLRLIYLALAHMIKFRGHFLIEGDLNPDNSDVDKLFIQLVQTYNQLFEENPINASGVDAKAILSARLSKSRRLENLIAQLP | |
| | GEKKNGLFGNLIALSLGLTPNFKSNFDLAEDAKLQLSKDTYDDDLDNLLAQIGDQYADLFLAAKNLSDAILLSDILRVNTEITKAPLSASMIKRYDEHHQDLTLLK | |
| | ALVRQQLPEKYKEIFFDQSKNGYAGYIDGGASQEEFYKFIKPILEKMDGTEELLVKLNREDLLRKQRTFDNGSIPHQIHLGELHAILRRQEDFYPFLKDNREKIEKI | |
| | LTFRIPYYVGPLARGNSRFAWMTRKSEETITPWNFEEVVDKGASAQSFIERMTNFDKNLPNEKVLPKHSLLYEYFTVYNELTKVKYVTEGMRKPAFLSGEQKK | |
| | AIVDLLFKTNRKVTVKQLKEDYFKKIECFDSVEISGVEDRFNASLGTYHDLLKIIKDKDFLDNEENEDILEDIVLTLTLFEDREMIEERLKTYAHLFDDKVMKQLKR | |
| | RRYTGWGRLSRKLINGIRDKQSGKTILDFLKSDGFANRNFMQLIHDDSLTFKEDIQKAQVSGQGDSLHEHIANLAGSPAIKKGILQTVKVVDELVKVMGRHKP | |
| | ENIVIEMARENQTTQKGQKNSRERMKRIEEGIKELGSQILKEHPVENTQLQNEKLYLYYLQNGRDMYVDQELDINRLSDYDVDHIVPQSFLKDDSIDNKVLTR | |
| | SDKARGKSDNVPSEEVVKKMKNYWRQLLNAKLITQRKFDNLTKAERGGLSELDKAGFIKRQLVETRQITKHVAQILDSRMNTKYDENDKLIREVKVITLKSKLV | |
| | SDFRKDFQFYKVREINNYHHAHDAYLNAVVGTALIKKYPKLESEFVYGDYKVYDVRKMIAKSEQEIGKATAKYFFYSNIMNFFKTEITLANGEIRKRPLIETNGET | |
| | GEIVWDKGRDFATVRKVLSMPQVNIVKKTEVQTGGFSKESILPKRNSDKLIARKKDWDPKKYGGFDSPTVAYSVLVVAKVEKGKSKKLKSVKELLGITIMERSS | |
| | FEKNPIDFLEAKGYKEVKKDLIIKLPKYSLFELENGRKRMLASAGELQKGNELALPSKYVNFLYLASHYEKLKGSPEDNEQKQLFVEQHKHYLDEIIEQISEFSKRVI | |
| | LADANLDKVLSAYNKHRDKPIREQAENIIHLFTLTNLGAPAAFKYFDTTIDRKRYTSTKEVLDATLIHQSITGLYETRIDLSQLGGDKRTADGSEFESPKKKAKVE | |
| PL12114 | MPAAKRVKLDGGTAPLEEEYRLFLEAPIQNVTLLEQWKREIPKVWAEINPPGLASTQAPIHVQLLSTALPVRVRQYPITLEAKRSLRETIRKFRAAGILRPVHSP | 16,153 |
| | WNTPLLPVRKSGTSEYRMVQDLREVNKRVETIHPTVPNPYTLLSLLPPDRIWYSVLDLKDAFFCIPLAPESQLIFAFEWADAEEGESGQLTWTRLPQGFKNSPT | |
| | LFNEALNRDLQGFRLDHPSVSLLQYVDDLLIAADTQAACLSATRDLLMTLAELGYRVSGKKAQLCQEEVTYLGFKIHKGSRSLSNSRTQAILQIPVPKTKRQVRE | |
| | FLGKIGYCRLFIPGFAELAQPLYAATRPGNDPLVWGEKEEEAFQSLKLALTQPPALALPSLDKPFQLFVEETSGAAKGVLTQALGPWKRPVAYLSKRLDPVAAG | |
| | WPRCLRAIAAAALLTREASKLTFGQDIEITSSHNLESLLRSPPDKWLTNARITQYQVLLLDPPRVRFKQTAALNPATLLPETDDTLPIHHCLDTLDSLTSTRPDLT | |
| | DQPLAQAEATLFTDGSSYIRDGKRYAGAAVVTLDSVIWAEPLPIGTSAQKAELIALTKALEWSKDKSVNIYTDSRYAFATLHVHGMIYRERGWLTAGGKAIKN | |
| | APEILALLTAVWLPKRVAVMHCKGHQKDDAPTSTGNRRADEVAREVAIRPLSTQATISAEAAAKEAAAKEAAAKEAAAKALEAEAAAKEAAAKEAAAKEAA | |
| | AKAMASNFTQFVLVDNGGTGDVTVAPSNFANGIAEWISSNSRSQAYKVTCSVRQSSAQNRKYTIKVEVPKGAWRSYLNMELTIPIFATNSDCELIVKAMQG | |
| | LLKDGNPIPSAIAANSGIYGGSGGSMASNFTQFVLVDNGGTGDVTVAPSNFANGIAEWISSNSRSQAYKVTCSVRQSSAQNRKYTIKVEVPKGAWRSYLNM | |
| | ELTIPIFATNSDCELIVKAMQGLLKDGNPIPSAIAANSGIYSGGSSGGSSGSETPGTSESATPESSGGSSGGSSDKKYSIGLDIGTNSVGWAVITDEYKVPSKKFK | |
| | VLGNTDRHSIKKNLIGALLFDSGETAEATRLKRTARRRYTRRKNRICYLQEIFSNEMAKVDDSFFHRLEESFLVEEDKKHERHPIFGNIVDEVAYHEKYPTIYHLR | |
| | KKLVDSTDKADLRLIYLALAHMIKFRGHFLIEGDLNPDNSDVDKLFIQLVQTYNQLFEENPINASGVDAKAILSARLSKSRRLENLIAQLPGEKKNGLFGNLIALSL | |
| | GLTPNFKSNFDLAEDAKLQLSKDTYDDDLDNLLAQIGDQYADLFLAAKNLSDAILLSDILRVNTEITKAPLSASMIKRYDEHHQDLTLLKALVRQQLPEKYKEIFF | |
| | DQSKNGYAGYIDGGASQEEFYKFIKPILEKMDGTEELLVKLNREDLLRKQRTFDNGSIPHQIHLGELHAILRRQEDFYPFLKDNREKIEKILTFRIPYYVGPLARG | |
| | NSRFAWMTRKSEETITPWNFEEVVDKGASAQSFIERMTNFDKNLPNEKVLPKHSLLYEYFTVYNELTKVKYVTEGMRKPAFLSGEQKKAIVDLLFKTNRKVTV | |
| | KQLKEDYFKKIECFDSVEISGVEDRFNASLGTYHDLLKIIKDKDFLDNEENEDILEDIVLTLTLFEDREMIEERLKTYAHLFDDKVMKQLKRRRYTGWGRLSRKLIN | |
| | GIRDKQSGKTILDFLKSDGFANRNFMQLIHDDSLTFKEDIQKAQVSGQGDSLHEHIANLAGSPAIKKGILQTVKVVDELVKVMGRHKPENIVIEMARENQTT | |
| | QKGQKNSRERMKRIEEGIKELGSQILKEHPVENTQLQNEKLYLYYLQNGRDMYVDQELDINRLSDYDVDHIVPQSFLKDDSIDNKVLTRSDKARGKSDNVPSE | |
| | EVVKKMKNYWRQLLNAKLITQRKFDNLTKAERGGLSELDKAGFIKRQLVETRQITKHVAQILDSRMNTKYDENDKLIREVKVITLKSKLVSDFRKDFQFYKVRE | |
| | INNYHHAHDAYLNAVVGTALIKKYPKLESEFVYGDYKVYDVRKMIAKSEQEIGKATAKYFFYSNIMNFFKTEITLANGEIRKRPLIETNGETGEIVWDKGRDFAT | |
| | VRKVLSMPQVNIVKKTEVQTGGFSKESILPKRNSDKLIARKKDWDPKKYGGFDSPTVAYSVLVVAKVEKGKSKKLKSVKELLGITIMERSSFEKNPIDFLEAKGY | |
| | KEVKKDLIIKLPKYSLFELENGRKRMLASAGELQKGNELALPSKYVNFLYLASHYEKLKGSPEDNEQKQLFVEQHKHYLDEIIEQISEFSKRVILADANLDKVLSAY | |
| | NKHRDKPIREQAENIIHLFTLTNLGAPAAFKYFDTTIDRKRYTSTKEVLDATLIHQSITGLYETRIDLSQLGGDKRTADGSEFESPKKKAKVE | |
| PL12115 | MPAAKRVKLDGGTAPLEEEYRLFLEAPIQNVTLLEQWKREIPKVWAEINPPGLASTQAPIHVQLLSTALPVRVRQYPITLEAKRSLRETIRKFRAAGILRPVHSP | 16,154 |
| | WNTPLLPVRKSGTSEYRMVQDLREVNKRVETIHPTVPNPYTLLSLLPPDRIWYSVLDLKDAFFCIPLAPESQLIFAFEWADAEEGESGQLTWTRLPQGFKNSPT | |
| | LFNEALNRDLQGFRLDHPSVSLLQYVDDLLIAADTQAACLSATRDLLMTLAELGYRVSGKKAQLCQEEVTYLGFKIHKGSRSLSNSRTQAILQIPVPKTKRQVRE | |
| | FLGKIGYCRLFIPGFAELAQPLYAATRPGNDPLVWGEKEEEAFQSLKLALTQPPALALPSLDKPFQLFVEETSGAAKGVLTQALGPWKRPVAYLSKRLDPVAAG | |
| | WPRCLRAIAAAALLTREASKLTFGQDIEITSSHNLESLLRSPPDKWLTNARITQYQVLLLDPPRVRFKQTAALNPATLLPETDDTLPIHHCLDTLDSLTSTRPDLT | |
| | DQPLAQAEATLFTDGSSYIRDGKRYAGAAVVTLDSVIWAEPLPIGTSAQKAELIALTKALEWSKDKSVNIYTDSRYAFATLHVHGMIYRERGWLTAGGKAIKN | |
| | APEILALLTAVWLPKRVAVMHCKGHQKDDAPTSTGNRRADEVAREVAIRPLSTQATISAEAAAKEAAAKEAAAKEAAAKALEAEAAAKEAAAKEAAAKEAA | |
| | AKAMASNFTQFVLVDNGGTGDVTVAPSNFANGIAEWISSNSRSQAYKVTCSVRQSSAQNRKYTIKVEVPKGAWRSYLNMELTIPIFATNSDCELIVKAMQG | |
| | LLKDGNPIPSAIAANSGIYGGSGGSMASNFTQFVLVDNGGTGDVTVAPSNFANGIAEWISSNSRSQAYKVTCSVRQSSAQNRKYTIKVEVPKGAWRSYLNM | |
| | ELTIPIFATNSDCELIVKAMQGLLKDGNPIPSAIAANSGIYGSSGSSGSSGSSGSSGSSDKKYSIGLDIGTNSVGWAVITDEYKVPSKKFKVLGNTDRHSIKKNLIG | |
| | ALLFDSGETAEATRLKRTARRRYTRRKNRICYLQEIFSNEMAKVDDSFFHRLEESFLVEEDKKHERHPIFGNIVDEVAYHEKYPTIYHLRKKLVDSTDKADLRLIYL | |
| | ALAHMIKFRGHFLIEGDLNPDNSDVDKLFIQLVQTYNQLFEENPINASGVDAKAILSARLSKSRRLENLIAQLPGEKKNGLFGNLIALSLGLTPNFKSNFDLAED | |
| | AKLQLSKDTYDDDLDNLLAQIGDQYADLFLAAKNLSDAILLSDILRVNTEITKAPLSASMIKRYDEHHQDLTLLKALVRQQLPEKYKEIFFDQSKNGYAGYIDGG | |
| | ASQEEFYKFIKPILEKMDGTEELLVKLNREDLLRKQRTFDNGSIPHQIHLGELHAILRRQEDFYPFLKDNREKIEKILTFRIPYYVGPLARGNSRFAWMTRKSEETI | |
| | TPWNFEEVVDKGASAQSFIERMTNFDKNLPNEKVLPKHSLLYEYFTVYNELTKVKYVTEGMRKPAFLSGEQKKAIVDLLFKTNRKVTVKQLKEDYFKKIECFDS | |
| | VEISGVEDRFNASLGTYHDLLKIIKDKDFLDNEENEDILEDIVLTLTLFEDREMIEERLKTYAHLFDDKVMKQLKRRRYTGWGRLSRKLINGIRDKQSGKTILDFLK | |
| | SDGFANRNFMQLIHDDSLTFKEDIQKAQVSGQGDSLHEHIANLAGSPAIKKGILQTVKVVDELVKVMGRHKPENIVIEMARENQTTQKGQKNSRERMKRIE | |
| | EGIKELGSQILKEHPVENTQLQNEKLYLYYLQNGRDMYVDQELDINRLSDYDVDHIVPQSFLKDDSIDNKVLTRSDKARGKSDNVPSEEVVKKMKNYWRQLL | |
| | NAKLITQRKFDNLTKAERGGLSELDKAGFIKRQLVETRQITKHVAQILDSRMNTKYDENDKLIREVKVITLKSKLVSDFRKDFQFYKVREINNYHHAHDAYLNA | |
| | VVGTALIKKYPKLESEFVYGDYKVYDVRKMIAKSEQEIGKATAKYFFYSNIMNFFKTEITLANGEIRKRPLIETNGETGEIVWDKGRDFATVRKVLSMPQVNIVK | |
| | KTEVQTGGFSKESILPKRNSDKLIARKKDWDPKKYGGFDSPTVAYSVLVVAKVEKGKSKKLKSVKELLGITIMERSSFEKNPIDFLEAKGYKEVKKDLIIKLPKYSLF | |
| | ELENGRKRMLASAGELQKGNELALPSKYVNFLYLASHYEKLKGSPEDNEQKQLFVEQHKHYLDEIIEQISEFSKRVILADANLDKVLSAYNKHRDKPIREQAENII | |
| | HLFTLTNLGAPAAFKYFDTTIDRKRYTSTKEVLDATLIHQSITGLYETRIDLSQLGGDKRTADGSEFESPKKKAKVE | |
| PL12116 | MPAAKRVKLDGGTAPLEEEYRLFLEAPIQNVTLLEQWKREIPKVWAEINPPGLASTQAPIHVQLLSTALPVRVRQYPITLEAKRSLRETIRKFRAAGILRPVHSP | 16,155 |
| | WNTPLLPVRKSGTSEYRMVQDLREVNKRVETIHPTVPNPYTLLSLLPPDRIWYSVLDLKDAFFCIPLAPESQLIFAFEWADAEEGESGQLTWTRLPQGFKNSPT | |
| | LFNEALNRDLQGFRLDHPSVSLLQYVDDLLIAADTQAACLSATRDLLMTLAELGYRVSGKKAQLCQEEVTYLGFKIHKGSRSLSNSRTQAILQIPVPKTKRQVRE | |
| | FLGKIGYCRLFIPGFAELAQPLYAATRPGNDPLVWGEKEEEAFQSLKLALTQPPALALPSLDKPFQLFVEETSGAAKGVLTQALGPWKRPVAYLSKRLDPVAAG | |
| | WPRCLRAIAAAALLTREASKLTFGQDIEITSSHNLESLLRSPPDKWLTNARITQYQVLLLDPPRVRFKQTAALNPATLLPETDDTLPIHHCLDTLDSLTSTRPDLT | |
| | DQPLAQAEATLFTDGSSYIRDGKRYAGAAVVTLDSVIWAEPLPIGTSAQKAELIALTKALEWSKDKSVNIYTDSRYAFATLHVHGMIYRERGWLTAGGKAIKN | |
| | APEILALLTAVWLPKRVAVMHCKGHQKDDAPTSTGNRRADEVAREVAIRPLSTQATISAEAAAKEAAAKEAAAKEAAAKALEAEAAAKEAAAKEAAAKEAA | |
| | AKAMASNFTQFVLVDNGGTGDVTVAPSNFANGIAEWISSNSRSQAYKVTCSVRQSSAQNRKYTIKVEVPKGAWRSYLNMELTIPIFATNSDCELIVKAMQG | |
| | LLKDGNPIPSAIAANSGIYGGSGGSMASNFTQFVLVDNGGTGDVTVAPSNFANGIAEWISSNSRSQAYKVTCSVRQSSAQNRKYTIKVEVPKGAWRSYLNM | |
| | ELTIPIFATNSDCELIVKAMQGLLKDGNPIPSAIAANSGIYGSSGGGEAAAKDKKYSIGLDIGTNSVGWAVITDEYKVPSKKFKVLGNTDRHSIKKNLIGALLFDS | |
| | GETAEATRLKRTARRRYTRRKNRICYLQEIFSNEMAKVDDSFFHRLEESFLVEEDKKHERHPIFGNIVDEVAYHEKYPTIYHLRKKLVDSTDKADLRLIYLALAHM | |
| | IKFRGHFLIEGDLNPDNSDVDKLFIQLVQTYNQLFEENPINASGVDAKAILSARLSKSRRLENLIAQLPGEKKNGLFGNLIALSLGLTPNFKSNFDLAEDAKLQLSK | |
| | DTYDDDLDNLLAQIGDQYADLFLAAKNLSDAILLSDILRVNTEITKAPLSASMIKRYDEHHQDLTLLKALVRQQLPEKYKEIFFDQSKNGYAGYIDGGASQEEFY | |
| | KFIKPILEKMDGTEELLVKLNREDLLRKQRTFDNGSIPHQIHLGELHAILRRQEDFYPFLKDNREKIEKILTFRIPYYVGPLARGNSRFAWMTRKSEETITPWNFE | |
| | EVVDKGASAQSFIERMTNFDKNLPNEKVLPKHSLLYEYFTVYNELTKVKYVTEGMRKPAFLSGEQKKAIVDLLFKTNRKVTVKQLKEDYFKKIECFDSVEISGVE | |
| | DRFNASLGTYHDLLKIIKDKDFLDNEENEDILEDIVLTLTLFEDREMIEERLKTYAHLFDDKVMKQLKRRRYTGWGRLSRKLINGIRDKQSGKTILDFLKSDGFAN | |
| | RNFMQLIHDDSLTFKEDIQKAQVSGQGDSLHEHIANLAGSPAIKKGILQTVKVVDELVKVMGRHKPENIVIEMARENQTTQKGQKNSRERMKRIEEGIKELG | |
| | SQILKEHPVENTQLQNEKLYLYYLQNGRDMYVDQELDINRLSDYDVDHIVPQSFLKDDSIDNKVLTRSDKARGKSDNVPSEEVVKKMKNYWRQLLNAKLITQ | |
| | RKFDNLTKAERGGLSELDKAGFIKRQLVETRQITKHVAQILDSRMNTKYDENDKLIREVKVITLKSKLVSDFRKDFQFYKVREINNYHHAHDAYLNAVVGTALIK | |
| | KYPKLESEFVYGDYKVYDVRKMIAKSEQEIGKATAKYFFYSNIMNFFKTEITLANGEIRKRPLIETNGETGEIVWDKGRDFATVRKVLSMPQVNIVKKTEVQTG | |
| | GFSKESILPKRNSDKLIARKKDWDPKKYGGFDSPTVAYSVLVVAKVEKGKSKKLKSVKELLGITIMERSSFEKNPIDFLEAKGYKEVKKDLIIKLPKYSLFELENGRK | |
| | RMLASAGELQKGNELALPSKYVNFLYLASHYEKLKGSPEDNEQKQLFVEQHKHYLDEIIEQISEFSKRVILADANLDKVLSAYNKHRDKPIREQAENIIHLFTLTN | |
| | LGAPAAFKYFDTTIDRKRYTSTKEVLDATLIHQSITGLYETRIDLSQLGGDKRTADGSEFESPKKKAKVE | |
| PL12117 | MPAAKRVKLDGGTAPLEEEYRLFLEAPIQNVTLLEQWKREIPKVWAEINPPGLASTQAPIHVQLLSTALPVRVRQYPITLEAKRSLRETIRKFRAAGILRPVHSP | 16,156 |
| | WNTPLLPVRKSGTSEYRMVQDLREVNKRVETIHPTVPNPYTLLSLLPPDRIWYSVLDLKDAFFCIPLAPESQLIFAFEWADAEEGESGQLTWTRLPQGFKNSPT | |
| | LFNEALNRDLQGFRLDHPSVSLLQYVDDLLIAADTQAACLSATRDLLMTLAELGYRVSGKKAQLCQEEVTYLGFKIHKGSRSLSNSRTQAILQIPVPKTKRQVRE | |
| | FLGKIGYCRLFIPGFAELAQPLYAATRPGNDPLVWGEKEEEAFQSLKLALTQPPALALPSLDKPFQLFVEETSGAAKGVLTQALGPWKRPVAYLSKRLDPVAAG | |
| | WPRCLRAIAAAALLTREASKLTFGQDIEITSSHNLESLLRSPPDKWLTNARITQYQVLLLDPPRVRFKQTAALNPATLLPETDDTLPIHHCLDTLDSLTSTRPDLT | |
| | DQPLAQAEATLFTDGSSYIRDGKRYAGAAVVTLDSVIWAEPLPIGTSAQKAELIALTKALEWSKDKSVNIYTDSRYAFATLHVHGMIYRERGWLTAGGKAIKN | |
| | APEILALLTAVWLPKRVAVMHCKGHQKDDAPTSTGNRRADEVAREVAIRPLSTQATISAEAAAKEAAAKEAAAKEAAAKALEAEAAAKEAAAKEAAAKEAA | |
| | AKAMASNFTQFVLVDNGGTGDVTVAPSNFANGIAEWISSNSRSQAYKVTCSVRQSSAQNRKYTIKVEVPKGAWRSYLNMELTIPIFATNSDCELIVKAMQG | |
| | LLKDGNPIPSAIAANSGIYGGSGGSMASNFTQFVLVDNGGTGDVTVAPSNFANGIAEWISSNSRSQAYKVTCSVRQSSAQNRKYTIKVEVPKGAWRSYLNM | |
| | ELTIPIFATNSDCELIVKAMQGLLKDGNPIPSAIAANSGIYGGGSGGGSGGGSGGGSMASNFTQFVLVDNGGTGDVTVAPSNFANGIAEWISSNSRSQAYKV | |
| | TCSVRQSSAQNRKYTIKVEVPKGAWRSYLNMELTIPIFATNSDCELIVKAMQGLLKDGNPIPSAIAANSGIYGGSGGSMASNFTQFVLVDNGGTGDVTVAPS | |
| | NFANGIAEWISSNSRSQAYKVTCSVRQSSAQNRKYTIKVEVPKGAWRSYLNMELTIPIFATNSDCELIVKAMQGLLKDGNPIPSAIAANSGIYAEAAAKEAAAK | |
| | EAAAKEAAAKALEAEAAAKEAAAKEAAAKEAAAKADKKYSIGLDIGTNSVGWAVITDEYKVPSKKFKVLGNTDRHSIKKNLIGALLFDSGETAEATRLKRTARR | |
| | RYTRRKNRICYLQEIFSNEMAKVDDSFFHRLEESFLVEEDKKHERHPIFGNIVDEVAYHEKYPTIYHLRKKLVDSTDKADLRLIYLALAHMIKFRGHFLIEGDLNP | |
| | DNSDVDKLFIQLVQTYNQLFEENPINASGVDAKAILSARLSKSRRLENLIAQLPGEKKNGLFGNLIALSLGLTPNFKSNFDLAEDAKLQLSKDTYDDDLDNLLAQI | |
| | GDQYADLFLAAKNLSDAILLSDILRVNTEITKAPLSASMIKRYDEHHQDLTLLKALVRQQLPEKYKEIFFDQSKNGYAGYIDGGASQEEFYKFIKPILEKMDGTEE | |
| | LLVKLNREDLLRKQRTFDNGSIPHQIHLGELHAILRRQEDFYPFLKDNREKIEKILTFRIPYYVGPLARGNSRFAWMTRKSEETITPWNFEEVVDKGASAQSFIER | |
| | MTNFDKNLPNEKVLPKHSLLYEYFTVYNELTKVKYVTEGMRKPAFLSGEQKKAIVDLLFKTNRKVTVKQLKEDYFKKIECFDSVEISGVEDRFNASLGTYHDLLKI | |
| | IKDKDFLDNEENEDILEDIVLTLTLFEDREMIEERLKTYAHLFDDKVMKQLKRRRYTGWGRLSRKLINGIRDKQSGKTILDFLKSDGFANRNFMQLIHDDSLTFK | |
| | EDIQKAQVSGQGDSLHEHIANLAGSPAIKKGILQTVKVVDELVKVMGRHKPENIVIEMARENQTTQKGQKNSRERMKRIEEGIKELGSQILKEHPVENTQLQ | |
| | NEKLYLYYLQNGRDMYVDQELDINRLSDYDVDHIVPQSFLKDDSIDNKVLTRSDKARGKSDNVPSEEVVKKMKNYWRQLLNAKLITQRKFDNLTKAERGGLS | |
| | ELDKAGFIKRQLVETRQITKHVAQILDSRMNTKYDENDKLIREVKVITLKSKLVSDFRKDFQFYKVREINNYHHAHDAYLNAVVGTALIKKYPKLESEFVYGDYK | |
| | VYDVRKMIAKSEQEIGKATAKYFFYSNIMNFFKTEITLANGEIRKRPLIETNGETGEIVWDKGRDFATVRKVLSMPQVNIVKKTEVQTGGFSKESILPKRNSDKL | |
| | IARKKDWDPKKYGGFDSPTVAYSVLVVAKVEKGKSKKLKSVKELLGITIMERSSFEKNPIDFLEAKGYKEVKKDLIIKLPKYSLFELENGRKRMLASAGELQKGNE | |
| | LALPSKYVNFLYLASHYEKLKGSPEDNEQKQLFVEQHKHYLDEIIEQISEFSKRVILADANLDKVLSAYNKHRDKPIREQAENIIHLFTLTNLGAPAAFKYFDTTID | |
| | RKRYTSTKEVLDATLIHQSITGLYETRIDLSQLGGDKRTADGSEFESPKKKAKVE | |
| PL12118 | MPAAKRVKLDGGTAPLEEEYRLFLEAPIQNVTLLEQWKREIPKVWAEINPPGLASTQAPIHVQLLSTALPVRVRQYPITLEAKRSLRETIRKFRAAGILRPVHSP | 16,157 |
| | WNTPLLPVRKSGTSEYRMVQDLREVNKRVETIHPTVPNPYTLLSLLPPDRIWYSVLDLKDAFFCIPLAPESQLIFAFEWADAEEGESGQLTWTRLPQGFKNSPT | |
| | LFNEALNRDLQGFRLDHPSVSLLQYVDDLLIAADTQAACLSATRDLLMTLAELGYRVSGKKAQLCQEEVTYLGFKIHKGSRSLSNSRTQAILQIPVPKTKRQVRE | |
| | FLGKIGYCRLFIPGFAELAQPLYAATRPGNDPLVWGEKEEEAFQSLKLALTQPPALALPSLDKPFQLFVEETSGAAKGVLTQALGPWKRPVAYLSKRLDPVAAG | |
| | WPRCLRAIAAAALLTREASKLTFGQDIEITSSHNLESLLRSPPDKWLTNARITQYQVLLLDPPRVRFKQTAALNPATLLPETDDTLPIHHCLDTLDSLTSTRPDLT | |
| | DQPLAQAEATLFTDGSSYIRDGKRYAGAAVVTLDSVIWAEPLPIGTSAQKAELIALTKALEWSKDKSVNIYTDSRYAFATLHVHGMIYRERGWLTAGGKAIKN | |
| | APEILALLTAVWLPKRVAVMHCKGHQKDDAPTSTGNRRADEVAREVAIRPLSTQATISAEAAAKEAAAKEAAAKEAAAKALEAEAAAKEAAAKEAAAKEAA | |
| | AKAMASNFTQFVLVDNGGTGDVTVAPSNFANGIAEWISSNSRSQAYKVTCSVRQSSAQNRKYTIKVEVPKGAWRSYLNMELTIPIFATNSDCELIVKAMQG | |
| | LLKDGNPIPSAIAANSGIYGGSGGSMASNFTQFVLVDNGGTGDVTVAPSNFANGIAEWISSNSRSQAYKVTCSVRQSSAQNRKYTIKVEVPKGAWRSYLNM | |
| | ELTIPIFATNSDCELIVKAMQGLLKDGNPIPSAIAANSGIYGGGSGGGSGGGSGGGSMASNFTQFVLVDNGGTGDVTVAPSNFANGIAEWISSNSRSQAYKV | |
| | TCSVRQSSAQNRKYTIKVEVPKGAWRSYLNMELTIPIFATNSDCELIVKAMQGLLKDGNPIPSAIAANSGIYGGSGGSMASNFTQFVLVDNGGTGDVTVAPS | |
| | NFANGIAEWISSNSRSQAYKVTCSVRQSSAQNRKYTIKVEVPKGAWRSYLNMELTIPIFATNSDCELIVKAMQGLLKDGNPIPSAIAANSGIYSGGSSGGSSGS | |
| | ETPGTSESATPESSGGSSGGSSDKKYSIGLDIGTNSVGWAVITDEYKVPSKKFKVLGNTDRHSIKKNLIGALLFDSGETAEATRLKRTARRRYTRRKNRICYLQEIF | |
| | SNEMAKVDDSFFHRLEESFLVEEDKKHERHPIFGNIVDEVAYHEKYPTIYHLRKKLVDSTDKADLRLIYLALAHMIKFRGHFLIEGDLNPDNSDVDKLFIQLVQT | |
| | YNQLFEENPINASGVDAKAILSARLSKSRRLENLIAQLPGEKKNGLFGNLIALSLGLTPNFKSNFDLAEDAKLQLSKDTYDDDLDNLLAQIGDQYADLFLAAKNL | |
| | SDAILLSDILRVNTEITKAPLSASMIKRYDEHHQDLTLLKALVRQQLPEKYKEIFFDQSKNGYAGYIDGGASQEEFYKFIKPILEKMDGTEELLVKLNREDLLRKQR | |
| | TFDNGSIPHQIHLGELHAILRRQEDFYPFLKDNREKIEKILTFRIPYYVGPLARGNSRFAWMTRKSEETITPWNFEEVVDKGASAQSFIERMTNFDKNLPNEKVL | |
| | PKHSLLYEYFTVYNELTKVKYVTEGMRKPAFLSGEQKKAIVDLLFKTNRKVTVKQLKEDYFKKIECFDSVEISGVEDRFNASLGTYHDLLKIIKDKDFLDNEENEDI | |
| | LEDIVLTLTLFEDREMIEERLKTYAHLFDDKVMKQLKRRRYTGWGRLSRKLINGIRDKQSGKTILDFLKSDGFANRNFMQLIHDDSLTFKEDIQKAQVSGQGDS | |
| | LHEHIANLAGSPAIKKGILQTVKVVDELVKVMGRHKPENIVIEMARENQTTQKGQKNSRERMKRIEEGIKELGSQILKEHPVENTQLQNEKLYLYYLQNGRD | |
| | MYVDQELDINRLSDYDVDHIVPQSFLKDDSIDNKVLTRSDKARGKSDNVPSEEVVKKMKNYWRQLLNAKLITQRKFDNLTKAERGGLSELDKAGFIKRQLVE | |
| | TRQITKHVAQILDSRMNTKYDENDKLIREVKVITLKSKLVSDFRKDFQFYKVREINNYHHAHDAYLNAVVGTALIKKYPKLESEFVYGDYKVYDVRKMIAKSEQ | |
| | EIGKATAKYFFYSNIMNFFKTEITLANGEIRKRPLIETNGETGEIVWDKGRDFATVRKVLSMPQVNIVKKTEVQTGGFSKESILPKRNSDKLIARKKDWDPKKYG | |
| | GFDSPTVAYSVLVVAKVEKGKSKKLKSVKELLGITIMERSSFEKNPIDFLEAKGYKEVKKDLIIKLPKYSLFELENGRKRMLASAGELQKGNELALPSKYVNFLYLA | |
| | SHYEKLKGSPEDNEQKQLFVEQHKHYLDEIIEQISEFSKRVILADANLDKVLSAYNKHRDKPIREQAENIIHLFTLTNLGAPAAFKYFDTTIDRKRYTSTKEVLDAT | |
| | LIHQSITGLYETRIDLSQLGGDKRTADGSEFESPKKKAKVE | |
| PL12119 | MPAAKRVKLDGGTAPLEEEYRLFLEAPIQNVTLLEQWKREIPKVWAEINPPGLASTQAPIHVQLLSTALPVRVRQYPITLEAKRSLRETIRKFRAAGILRPVHSP | 16,158 |
| | WNTPLLPVRKSGTSEYRMVQDLREVNKRVETIHPTVPNPYTLLSLLPPDRIWYSVLDLKDAFFCIPLAPESQLIFAFEWADAEEGESGQLTWTRLPQGFKNSPT | |
| | LFNEALNRDLQGFRLDHPSVSLLQYVDDLLIAADTQAACLSATRDLLMTLAELGYRVSGKKAQLCQEEVTYLGFKIHKGSRSLSNSRTQAILQIPVPKTKRQVRE | |
| | FLGKIGYCRLFIPGFAELAQPLYAATRPGNDPLVWGEKEEEAFQSLKLALTQPPALALPSLDKPFQLFVEETSGAAKGVLTQALGPWKRPVAYLSKRLDPVAAG | |
| | WPRCLRAIAAAALLTREASKLTFGQDIEITSSHNLESLLRSPPDKWLTNARITQYQVLLLDPPRVRFKQTAALNPATLLPETDDTLPIHHCLDTLDSLTSTRPDLT | |
| | DQPLAQAEATLFTDGSSYIRDGKRYAGAAVVTLDSVIWAEPLPIGTSAQKAELIALTKALEWSKDKSVNIYTDSRYAFATLHVHGMIYRERGWLTAGGKAIKN | |
| | APEILALLTAVWLPKRVAVMHCKGHQKDDAPTSTGNRRADEVAREVAIRPLSTQATISAEAAAKEAAAKEAAAKEAAAKALEAEAAAKEAAAKEAAAKEAA | |
| | AKAMASNFTQFVLVDNGGTGDVTVAPSNFANGIAEWISSNSRSQAYKVTCSVRQSSAQNRKYTIKVEVPKGAWRSYLNMELTIPIFATNSDCELIVKAMQG | |
| | LLKDGNPIPSAIAANSGIYGGSGGSMASNFTQFVLVDNGGTGDVTVAPSNFANGIAEWISSNSRSQAYKVTCSVRQSSAQNRKYTIKVEVPKGAWRSYLNM | |
| | ELTIPIFATNSDCELIVKAMQGLLKDGNPIPSAIAANSGIYGGGSGGGSGGGSGGGSMASNFTQFVLVDNGGTGDVTVAPSNFANGIAEWISSNSRSQAYKV | |
| | TCSVRQSSAQNRKYTIKVEVPKGAWRSYLNMELTIPIFATNSDCELIVKAMQGLLKDGNPIPSAIAANSGIYGGSGGSMASNFTQFVLVDNGGTGDVTVAPS | |
| | NFANGIAEWISSNSRSQAYKVTCSVRQSSAQNRKYTIKVEVPKGAWRSYLNMELTIPIFATNSDCELIVKAMQGLLKDGNPIPSAIAANSGIYGSSGSSGSSGS | |
| | SGSSGSSDKKYSIGLDIGTNSVGWAVITDEYKVPSKKFKVLGNTDRHSIKKNLIGALLFDSGETAEATRLKRTARRRYTRRKNRICYLQEIFSNEMAKVDDSFFH | |
| | RLEESFLVEEDKKHERHPIFGNIVDEVAYHEKYPTIYHLRKKLVDSTDKADLRLIYLALAHMIKFRGHFLIEGDLNPDNSDVDKLFIQLVQTYNQLFEENPINASG | |
| | VDAKAILSARLSKSRRLENLIAQLPGEKKNGLFGNLIALSLGLTPNFKSNFDLAEDAKLQLSKDTYDDDLDNLLAQIGDQYADLFLAAKNLSDAILLSDILRVNTEI | |
| | TKAPLSASMIKRYDEHHQDLTLLKALVRQQLPEKYKEIFFDQSKNGYAGYIDGGASQEEFYKFIKPILEKMDGTEELLVKLNREDLLRKQRTFDNGSIPHQIHLG | |
| | ELHAILRRQEDFYPFLKDNREKIEKILTFRIPYYVGPLARGNSRFAWMTRKSEETITPWNFEEVVDKGASAQSFIERMTNFDKNLPNEKVLPKHSLLYEYFTVYN | |
| | ELTKVKYVTEGMRKPAFLSGEQKKAIVDLLFKTNRKVTVKQLKEDYFKKIECFDSVEISGVEDRFNASLGTYHDLLKIIKDKDFLDNEENEDILEDIVLTLTLFEDRE | |
| | MIEERLKTYAHLFDDKVMKQLKRRRYTGWGRLSRKLINGIRDKQSGKTILDFLKSDGFANRNFMQLIHDDSLTFKEDIQKAQVSGQGDSLHEHIANLAGSPAI | |
| | KKGILQTVKVVDELVKVMGRHKPENIVIEMARENQTTQKGQKNSRERMKRIEEGIKELGSQILKEHPVENTQLQNEKLYLYYLQNGRDMYVDQELDINRLSD | |
| | YDVDHIVPQSFLKDDSIDNKVLTRSDKARGKSDNVPSEEVVKKMKNYWRQLLNAKLITQRKFDNLTKAERGGLSELDKAGFIKRQLVETRQITKHVAQILDSR | |
| | MNTKYDENDKLIREVKVITLKSKLVSDFRKDFQFYKVREINNYHHAHDAYLNAVVGTALIKKYPKLESEFVYGDYKVYDVRKMIAKSEQEIGKATAKYFFYSNI | |
| | MNFFKTEITLANGEIRKRPLIETNGETGEIVWDKGRDFATVRKVLSMPQVNIVKKTEVQTGGFSKESILPKRNSDKLIARKKDWDPKKYGGFDSPTVAYSVLVV | |
| | AKVEKGKSKKLKSVKELLGITIMERSSFEKNPIDFLEAKGYKEVKKDLIIKLPKYSLFELENGRKRMLASAGELQKGNELALPSKYVNFLYLASHYEKLKGSPEDNE | |
| | QKQLFVEQHKHYLDEIIEQISEFSKRVILADANLDKVLSAYNKHRDKPIREQAENIIHLFTLTNLGAPAAFKYFDTTIDRKRYTSTKEVLDATLIHQSITGLYETRIDL | |
| | SQLGGDKRTADGSEFESPKKKAKVE | |
| PL12120 | MPAAKRVKLDGGTAPLEEEYRLFLEAPIQNVTLLEQWKREIPKVWAEINPPGLASTQAPIHVQLLSTALPVRVRQYPITLEAKRSLRETIRKFRAAGILRPVHSP | 16,159 |
| | WNTPLLPVRKSGTSEYRMVQDLREVNKRVETIHPTVPNPYTLLSLLPPDRIWYSVLDLKDAFFCIPLAPESQLIFAFEWADAEEGESGQLTWTRLPQGFKNSPT | |
| | LFNEALNRDLQGFRLDHPSVSLLQYVDDLLIAADTQAACLSATRDLLMTLAELGYRVSGKKAQLCQEEVTYLGFKIHKGSRSLSNSRTQAILQIPVPKTKRQVRE | |
| | FLGKIGYCRLFIPGFAELAQPLYAATRPGNDPLVWGEKEEEAFQSLKLALTQPPALALPSLDKPFQLFVEETSGAAKGVLTQALGPWKRPVAYLSKRLDPVAAG | |
| | WPRCLRAIAAAALLTREASKLTFGQDIEITSSHNLESLLRSPPDKWLTNARITQYQVLLLDPPRVRFKQTAALNPATLLPETDDTLPIHHCLDTLDSLTSTRPDLT | |
| | DQPLAQAEATLFTDGSSYIRDGKRYAGAAVVTLDSVIWAEPLPIGTSAQKAELIALTKALEWSKDKSVNIYTDSRYAFATLHVHGMIYRERGWLTAGGKAIKN | |
| | APEILALLTAVWLPKRVAVMHCKGHQKDDAPTSTGNRRADEVAREVAIRPLSTQATISAEAAAKEAAAKEAAAKEAAAKALEAEAAAKEAAAKEAAAKEAA | |
| | AKAMASNFTQFVLVDNGGTGDVTVAPSNFANGIAEWISSNSRSQAYKVTCSVRQSSAQNRKYTIKVEVPKGAWRSYLNMELTIPIFATNSDCELIVKAMQG | |
| | LLKDGNPIPSAIAANSGIYGGSGGSMASNFTQFVLVDNGGTGDVTVAPSNFANGIAEWISSNSRSQAYKVTCSVRQSSAQNRKYTIKVEVPKGAWRSYLNM | |
| | ELTIPIFATNSDCELIVKAMQGLLKDGNPIPSAIAANSGIYGGGSGGGSGGGSGGGSMASNFTQFVLVDNGGTGDVTVAPSNFANGIAEWISSNSRSQAYKV | |
| | TCSVRQSSAQNRKYTIKVEVPKGAWRSYLNMELTIPIFATNSDCELIVKAMQGLLKDGNPIPSAIAANSGIYGGSGGSMASNFTQFVLVDNGGTGDVTVAPS | |
| | NFANGIAEWISSNSRSQAYKVTCSVRQSSAQNRKYTIKVEVPKGAWRSYLNMELTIPIFATNSDCELIVKAMQGLLKDGNPIPSAIAANSGIYGSSGGGEAAA | |
| | KDKKYSIGLDIGTNSVGWAVITDEYKVPSKKFKVLGNTDRHSIKKNLIGALLFDSGETAEATRLKRTARRRYTRRKNRICYLQEIFSNEMAKVDDSFFHRLEESFL | |
| | VEEDKKHERHPIFGNIVDEVAYHEKYPTIYHLRKKLVDSTDKADLRLIYLALAHMIKFRGHFLIEGDLNPDNSDVDKLFIQLVQTYNQLFEENPINASGVDAKAIL | |
| | SARLSKSRRLENLIAQLPGEKKNGLFGNLIALSLGLTPNFKSNFDLAEDAKLQLSKDTYDDDLDNLLAQIGDQYADLFLAAKNLSDAILLSDILRVNTEITKAPLSA | |
| | SMIKRYDEHHQDLTLLKALVRQQLPEKYKEIFFDQSKNGYAGYIDGGASQEEFYKFIKPILEKMDGTEELLVKLNREDLLRKQRTFDNGSIPHQIHLGELHAILRR | |
| | QEDFYPFLKDNREKIEKILTFRIPYYVGPLARGNSRFAWMTRKSEETITPWNFEEVVDKGASAQSFIERMTNFDKNLPNEKVLPKHSLLYEYFTVYNELTKVKYV | |
| | TEGMRKPAFLSGEQKKAIVDLLFKTNRKVTVKQLKEDYFKKIECFDSVEISGVEDRFNASLGTYHDLLKIIKDKDFLDNEENEDILEDIVLTLTLFEDREMIEERLKT | |
| | YAHLFDDKVMKQLKRRRYTGWGRLSRKLINGIRDKQSGKTILDFLKSDGFANRNFMQLIHDDSLTFKEDIQKAQVSGQGDSLHEHIANLAGSPAIKKGILQTV | |
| | KVVDELVKVMGRHKPENIVIEMARENQTTQKGQKNSRERMKRIEEGIKELGSQILKEHPVENTQLQNEKLYLYYLQNGRDMYVDQELDINRLSDYDVDHIV | |
| | PQSFLKDDSIDNKVLTRSDKARGKSDNVPSEEVVKKMKNYWRQLLNAKLITQRKFDNLTKAERGGLSELDKAGFIKRQLVETRQITKHVAQILDSRMNTKYDE | |
| | NDKLIREVKVITLKSKLVSDFRKDFQFYKVREINNYHHAHDAYLNAVVGTALIKKYPKLESEFVYGDYKVYDVRKMIAKSEQEIGKATAKYFFYSNIMNFFKTEIT | |
| | LANGEIRKRPLIETNGETGEIVWDKGRDFATVRKVLSMPQVNIVKKTEVQTGGFSKESILPKRNSDKLIARKKDWDPKKYGGFDSPTVAYSVLVVAKVEKGKS | |
| | KKLKSVKELLGITIMERSSFEKNPIDFLEAKGYKEVKKDLIIKLPKYSLFELENGRKRMLASAGELQKGNELALPSKYVNFLYLASHYEKLKGSPEDNEQKQLFVEQ | |
| | HKHYLDEIIEQISEFSKRVILADANLDKVLSAYNKHRDKPIREQAENIIHLFTLTNLGAPAAFKYFDTTIDRKRYTSTKEVLDATLIHQSITGLYETRIDLSQLGGDKR | |
| | TADGSEFESPKKKAKVE | |
| PL12121 | MPAAKRVKLDGGTAPLEEEYRLFLEAPIQNVTLLEQWKREIPKVWAEINPPGLASTQAPIHVQLLSTALPVRVRQYPITLEAKRSLRETIRKFRAAGILRPVHSP | 16,160 |
| | WNTPLLPVRKSGTSEYRMVQDLREVNKRVETIHPTVPNPYTLLSLLPPDRIWYSVLDLKDAFFCIPLAPESQLIFAFEWADAEEGESGQLTWTRLPQGFKNSPT | |
| | LFNEALNRDLQGFRLDHPSVSLLQYVDDLLIAADTQAACLSATRDLLMTLAELGYRVSGKKAQLCQEEVTYLGFKIHKGSRSLSNSRTQAILQIPVPKTKRQVRE | |
| | FLGKIGYCRLFIPGFAELAQPLYAATRPGNDPLVWGEKEEEAFQSLKLALTQPPALALPSLDKPFQLFVEETSGAAKGVLTQALGPWKRPVAYLSKRLDPVAAG | |
| | WPRCLRAIAAAALLTREASKLTFGQDIEITSSHNLESLLRSPPDKWLTNARITQYQVLLLDPPRVRFKQTAALNPATLLPETDDTLPIHHCLDTLDSLTSTRPDLT | |
| | DQPLAQAEATLFTDGSSYIRDGKRYAGAAVVTLDSVIWAEPLPIGTSAQKAELIALTKALEWSKDKSVNIYTDSRYAFATLHVHGMIYRERGWLTAGGKAIKN | |
| | APEILALLTAVWLPKRVAVMHCKGHQKDDAPTSTGNRRADEVAREVAIRPLSTQATISSGGSSGGSSGSETPGTSESATPESSGGSSGGSSMASNFTQFVLV | |
| | DNGGTGDVTVAPSNFANGIAEWISSNSRSQAYKVTCSVRQSSAQNRKYTIKVEVPKGAWRSYLNMELTIPIFATNSDCELIVKAMQGLLKDGNPIPSAIAANS | |
| | GIYAEAAAKEAAAKEAAAKEAAAKALEAEAAAKEAAAKEAAAKEAAAKADKKYSIGLDIGTNSVGWAVITDEYKVPSKKFKVLGNTDRHSIKKNLIGALLFDSG | |
| | ETAEATRLKRTARRRYTRRKNRICYLQEIFSNEMAKVDDSFFHRLEESFLVEEDKKHERHPIFGNIVDEVAYHEKYPTIYHLRKKLVDSTDKADLRLIYLALAHMI | |
| | KFRGHFLIEGDLNPDNSDVDKLFIQLVQTYNQLFEENPINASGVDAKAILSARLSKSRRLENLIAQLPGEKKNGLFGNLIALSLGLTPNFKSNFDLAEDAKLQLSK | |
| | DTYDDDLDNLLAQIGDQYADLFLAAKNLSDAILLSDILRVNTEITKAPLSASMIKRYDEHHQDLTLLKALVRQQLPEKYKEIFFDQSKNGYAGYIDGGASQEEFY | |
| | KFIKPILEKMDGTEELLVKLNREDLLRKQRTFDNGSIPHQIHLGELHAILRRQEDFYPFLKDNREKIEKILTFRIPYYVGPLARGNSRFAWMTRKSEETITPWNFE | |
| | EVVDKGASAQSFIERMTNFDKNLPNEKVLPKHSLLYEYFTVYNELTKVKYVTEGMRKPAFLSGEQKKAIVDLLFKTNRKVTVKQLKEDYFKKIECFDSVEISGVE | |
| | DRFNASLGTYHDLLKIIKDKDFLDNEENEDILEDIVLTLTLFEDREMIEERLKTYAHLFDDKVMKQLKRRRYTGWGRLSRKLINGIRDKQSGKTILDFLKSDGFAN | |
| | RNFMQLIHDDSLTFKEDIQKAQVSGQGDSLHEHIANLAGSPAIKKGILQTVKVVDELVKVMGRHKPENIVIEMARENQTTQKGQKNSRERMKRIEEGIKELG | |
| | SQILKEHPVENTQLQNEKLYLYYLQNGRDMYVDQELDINRLSDYDVDHIVPQSFLKDDSIDNKVLTRSDKARGKSDNVPSEEVVKKMKNYWRQLLNAKLITQ | |
| | RKFDNLTKAERGGLSELDKAGFIKRQLVETRQITKHVAQILDSRMNTKYDENDKLIREVKVITLKSKLVSDFRKDFQFYKVREINNYHHAHDAYLNAVVGTALIK | |
| | KYPKLESEFVYGDYKVYDVRKMIAKSEQEIGKATAKYFFYSNIMNFFKTEITLANGEIRKRPLIETNGETGEIVWDKGRDFATVRKVLSMPQVNIVKKTEVQTG | |
| | GFSKESILPKRNSDKLIARKKDWDPKKYGGFDSPTVAYSVLVVAKVEKGKSKKLKSVKELLGITIMERSSFEKNPIDFLEAKGYKEVKKDLIIKLPKYSLFELENGRK | |
| | RMLASAGELQKGNELALPSKYVNFLYLASHYEKLKGSPEDNEQKQLFVEQHKHYLDEIIEQISEFSKRVILADANLDKVLSAYNKHRDKPIREQAENIIHLFTLTN | |
| | LGAPAAFKYFDTTIDRKRYTSTKEVLDATLIHQSITGLYETRIDLSQLGGDKRTADGSEFESPKKKAKVE | |
| PL12122 | MPAAKRVKLDGGTAPLEEEYRLFLEAPIQNVTLLEQWKREIPKVWAEINPPGLASTQAPIHVQLLSTALPVRVRQYPITLEAKRSLRETIRKFRAAGILRPVHSP | 16,161 |
| | WNTPLLPVRKSGTSEYRMVQDLREVNKRVETIHPTVPNPYTLLSLLPPDRIWYSVLDLKDAFFCIPLAPESQLIFAFEWADAEEGESGQLTWTRLPQGFKNSPT | |
| | LFNEALNRDLQGFRLDHPSVSLLQYVDDLLIAADTQAACLSATRDLLMTLAELGYRVSGKKAQLCQEEVTYLGFKIHKGSRSLSNSRTQAILQIPVPKTKRQVRE | |
| | FLGKIGYCRLFIPGFAELAQPLYAATRPGNDPLVWGEKEEEAFQSLKLALTQPPALALPSLDKPFQLFVEETSGAAKGVLTQALGPWKRPVAYLSKRLDPVAAG | |
| | WPRCLRAIAAAALLTREASKLTFGQDIEITSSHNLESLLRSPPDKWLTNARITQYQVLLLDPPRVRFKQTAALNPATLLPETDDTLPIHHCLDTLDSLTSTRPDLT | |
| | DQPLAQAEATLFTDGSSYIRDGKRYAGAAVVTLDSVIWAEPLPIGTSAQKAELIALTKALEWSKDKSVNIYTDSRYAFATLHVHGMIYRERGWLTAGGKAIKN | |
| | APEILALLTAVWLPKRVAVMHCKGHQKDDAPTSTGNRRADEVAREVAIRPLSTQATISSGGSSGGSSGSETPGTSESATPESSGGSSGGSSMASNFTQFVLV | |
| | DNGGTGDVTVAPSNFANGIAEWISSNSRSQAYKVTCSVRQSSAQNRKYTIKVEVPKGAWRSYLNMELTIPIFATNSDCELIVKAMQGLLKDGNPIPSAIAANS | |
| | GIYSGGSSGGSSGSETPGTSESATPESSGGSSGGSSDKKYSIGLDIGTNSVGWAVITDEYKVPSKKFKVLGNTDRHSIKKNLIGALLFDSGETAEATRLKRTARRR | |
| | YTRRKNRICYLQEIFSNEMAKVDDSFFHRLEESFLVEEDKKHERHPIFGNIVDEVAYHEKYPTIYHLRKKLVDSTDKADLRLIYLALAHMIKFRGHFLIEGDLNPD | |
| | NSDVDKLFIQLVQTYNQLFEENPINASGVDAKAILSARLSKSRRLENLIAQLPGEKKNGLFGNLIALSLGLTPNFKSNFDLAEDAKLQLSKDTYDDDLDNLLAQIG | |
| | DQYADLFLAAKNLSDAILLSDILRVNTEITKAPLSASMIKRYDEHHQDLTLLKALVRQQLPEKYKEIFFDQSKNGYAGYIDGGASQEEFYKFIKPILEKMDGTEELL | |
| | VKLNREDLLRKQRTFDNGSIPHQIHLGELHAILRRQEDFYPFLKDNREKIEKILTFRIPYYVGPLARGNSRFAWMTRKSEETITPWNFEEVVDKGASAQSFIERM | |
| | TNFDKNLPNEKVLPKHSLLYEYFTVYNELTKVKYVTEGMRKPAFLSGEQKKAIVDLLFKTNRKVTVKQLKEDYFKKIECFDSVEISGVEDRFNASLGTYHDLLKIIK | |
| | DKDFLDNEENEDILEDIVLTLTLFEDREMIEERLKTYAHLFDDKVMKQLKRRRYTGWGRLSRKLINGIRDKQSGKTILDFLKSDGFANRNFMQLIHDDSLTFKE | |
| | DIQKAQVSGQGDSLHEHIANLAGSPAIKKGILQTVKVVDELVKVMGRHKPENIVIEMARENQTTQKGQKNSRERMKRIEEGIKELGSQILKEHPVENTQLQN | |
| | EKLYLYYLQNGRDMYVDQELDINRLSDYDVDHIVPQSFLKDDSIDNKVLTRSDKARGKSDNVPSEEVVKKMKNYWRQLLNAKLITQRKFDNLTKAERGGLSE | |
| | LDKAGFIKRQLVETRQITKHVAQILDSRMNTKYDENDKLIREVKVITLKSKLVSDFRKDFQFYKVREINNYHHAHDAYLNAVVGTALIKKYPKLESEFVYGDYKV | |
| | YDVRKMIAKSEQEIGKATAKYFFYSNIMNFFKTEITLANGEIRKRPLIETNGETGEIVWDKGRDFATVRKVLSMPQVNIVKKTEVQTGGFSKESILPKRNSDKLI | |
| | ARKKDWDPKKYGGFDSPTVAYSVLVVAKVEKGKSKKLKSVKELLGITIMERSSFEKNPIDFLEAKGYKEVKKDLIIKLPKYSLFELENGRKRMLASAGELQKGNEL | |
| | ALPSKYVNFLYLASHYEKLKGSPEDNEQKQLFVEQHKHYLDEIIEQISEFSKRVILADANLDKVLSAYNKHRDKPIREQAENIIHLFTLTNLGAPAAFKYFDTTIDR | |
| | KRYTSTKEVLDATLIHQSITGLYETRIDLSQLGGDKRTADGSEFESPKKKAKVE | |
| PL12123 | MPAAKRVKLDGGTAPLEEEYRLFLEAPIQNVTLLEQWKREIPKVWAEINPPGLASTQAPIHVQLLSTALPVRVRQYPITLEAKRSLRETIRKFRAAGILRPVHSP | 16,162 |
| | WNTPLLPVRKSGTSEYRMVQDLREVNKRVETIHPTVPNPYTLLSLLPPDRIWYSVLDLKDAFFCIPLAPESQLIFAFEWADAEEGESGQLTWTRLPQGFKNSPT | |
| | LFNEALNRDLQGFRLDHPSVSLLQYVDDLLIAADTQAACLSATRDLLMTLAELGYRVSGKKAQLCQEEVTYLGFKIHKGSRSLSNSRTQAILQIPVPKTKRQVRE | |
| | FLGKIGYCRLFIPGFAELAQPLYAATRPGNDPLVWGEKEEEAFQSLKLALTQPPALALPSLDKPFQLFVEETSGAAKGVLTQALGPWKRPVAYLSKRLDPVAAG | |
| | WPRCLRAIAAAALLTREASKLTFGQDIEITSSHNLESLLRSPPDKWLTNARITQYQVLLLDPPRVRFKQTAALNPATLLPETDDTLPIHHCLDTLDSLTSTRPDLT | |
| | DQPLAQAEATLFTDGSSYIRDGKRYAGAAVVTLDSVIWAEPLPIGTSAQKAELIALTKALEWSKDKSVNIYTDSRYAFATLHVHGMIYRERGWLTAGGKAIKN | |
| | APEILALLTAVWLPKRVAVMHCKGHQKDDAPTSTGNRRADEVAREVAIRPLSTQATISSGGSSGGSSGSETPGTSESATPESSGGSSGGSSMASNFTQFVLV | |
| | DNGGTGDVTVAPSNFANGIAEWISSNSRSQAYKVTCSVRQSSAQNRKYTIKVEVPKGAWRSYLNMELTIPIFATNSDCELIVKAMQGLLKDGNPIPSAIAANS | |
| | GIYGSSGSSGSSGSSGSSGSSDKKYSIGLDIGTNSVGWAVITDEYKVPSKKFKVLGNTDRHSIKKNLIGALLFDSGETAEATRLKRTARRRYTRRKNRICYLQEIFS | |
| | NEMAKVDDSFFHRLEESFLVEEDKKHERHPIFGNIVDEVAYHEKYPTIYHLRKKLVDSTDKADLRLIYLALAHMIKFRGHFLIEGDLNPDNSDVDKLFIQLVQTY | |
| | NQLFEENPINASGVDAKAILSARLSKSRRLENLIAQLPGEKKNGLFGNLIALSLGLTPNFKSNFDLAEDAKLQLSKDTYDDDLDNLLAQIGDQYADLFLAAKNLS | |
| | DAILLSDILRVNTEITKAPLSASMIKRYDEHHQDLTLLKALVRQQLPEKYKEIFFDQSKNGYAGYIDGGASQEEFYKFIKPILEKMDGTEELLVKLNREDLLRKQRT | |
| | FDNGSIPHQIHLGELHAILRRQEDFYPFLKDNREKIEKILTFRIPYYVGPLARGNSRFAWMTRKSEETITPWNFEEVVDKGASAQSFIERMTNFDKNLPNEKVLP | |
| | KHSLLYEYFTVYNELTKVKYVTEGMRKPAFLSGEQKKAIVDLLFKTNRKVTVKQLKEDYFKKIECFDSVEISGVEDRFNASLGTYHDLLKIIKDKDFLDNEENEDIL | |
| | EDIVLTLTLFEDREMIEERLKTYAHLFDDKVMKQLKRRRYTGWGRLSRKLINGIRDKQSGKTILDFLKSDGFANRNFMQLIHDDSLTFKEDIQKAQVSGQGDSL | |
| | HEHIANLAGSPAIKKGILQTVKVVDELVKVMGRHKPENIVIEMARENQTTQKGQKNSRERMKRIEEGIKELGSQILKEHPVENTQLQNEKLYLYYLQNGRDM | |
| | YVDQELDINRLSDYDVDHIVPQSFLKDDSIDNKVLTRSDKARGKSDNVPSEEVVKKMKNYWRQLLNAKLITQRKFDNLTKAERGGLSELDKAGFIKRQLVETR | |
| | QITKHVAQILDSRMNTKYDENDKLIREVKVITLKSKLVSDFRKDFQFYKVREINNYHHAHDAYLNAVVGTALIKKYPKLESEFVYGDYKVYDVRKMIAKSEQEIG | |
| | KATAKYFFYSNIMNFFKTEITLANGEIRKRPLIETNGETGEIVWDKGRDFATVRKVLSMPQVNIVKKTEVQTGGFSKESILPKRNSDKLIARKKDWDPKKYGGF | |
| | DSPTVAYSVLVVAKVEKGKSKKLKSVKELLGITIMERSSFEKNPIDFLEAKGYKEVKKDLIIKLPKYSLFELENGRKRMLASAGELQKGNELALPSKYVNFLYLASH | |
| | YEKLKGSPEDNEQKQLFVEQHKHYLDEIIEQISEFSKRVILADANLDKVLSAYNKHRDKPIREQAENIIHLFTLTNLGAPAAFKYFDTTIDRKRYTSTKEVLDATLIH | |
| | QSITGLYETRIDLSQLGGDKRTADGSEFESPKKKAKVE | |
| PL12124 | MPAAKRVKLDGGTAPLEEEYRLFLEAPIQNVTLLEQWKREIPKVWAEINPPGLASTQAPIHVQLLSTALPVRVRQYPITLEAKRSLRETIRKFRAAGILRPVHSP | 16,163 |
| | WNTPLLPVRKSGTSEYRMVQDLREVNKRVETIHPTVPNPYTLLSLLPPDRIWYSVLDLKDAFFCIPLAPESQLIFAFEWADAEEGESGQLTWTRLPQGFKNSPT | |
| | LFNEALNRDLQGFRLDHPSVSLLQYVDDLLIAADTQAACLSATRDLLMTLAELGYRVSGKKAQLCQEEVTYLGFKIHKGSRSLSNSRTQAILQIPVPKTKRQVRE | |
| | FLGKIGYCRLFIPGFAELAQPLYAATRPGNDPLVWGEKEEEAFQSLKLALTQPPALALPSLDKPFQLFVEETSGAAKGVLTQALGPWKRPVAYLSKRLDPVAAG | |
| | WPRCLRAIAAAALLTREASKLTFGQDIEITSSHNLESLLRSPPDKWLTNARITQYQVLLLDPPRVRFKQTAALNPATLLPETDDTLPIHHCLDTLDSLTSTRPDLT | |
| | DQPLAQAEATLFTDGSSYIRDGKRYAGAAVVTLDSVIWAEPLPIGTSAQKAELIALTKALEWSKDKSVNIYTDSRYAFATLHVHGMIYRERGWLTAGGKAIKN | |
| | APEILALLTAVWLPKRVAVMHCKGHQKDDAPTSTGNRRADEVAREVAIRPLSTQATISSGGSSGGSSGSETPGTSESATPESSGGSSGGSSMASNFTQFVLV | |
| | DNGGTGDVTVAPSNFANGIAEWISSNSRSQAYKVTCSVRQSSAQNRKYTIKVEVPKGAWRSYLNMELTIPIFATNSDCELIVKAMQGLLKDGNPIPSAIAANS | |
| | GIYGSSGGGEAAAKDKKYSIGLDIGTNSVGWAVITDEYKVPSKKFKVLGNTDRHSIKKNLIGALLFDSGETAEATRLKRTARRRYTRRKNRICYLQEIFSNEMAK | |
| | VDDSFFHRLEESFLVEEDKKHERHPIFGNIVDEVAYHEKYPTIYHLRKKLVDSTDKADLRLIYLALAHMIKFRGHFLIEGDLNPDNSDVDKLFIQLVQTYNQLFEE | |
| | NPINASGVDAKAILSARLSKSRRLENLIAQLPGEKKNGLFGNLIALSLGLTPNFKSNFDLAEDAKLQLSKDTYDDDLDNLLAQIGDQYADLFLAAKNLSDAILLSD | |
| | ILRVNTEITKAPLSASMIKRYDEHHQDLTLLKALVRQQLPEKYKEIFFDQSKNGYAGYIDGGASQEEFYKFIKPILEKMDGTEELLVKLNREDLLRKQRTFDNGSI | |
| | PHQIHLGELHAILRRQEDFYPFLKDNREKIEKILTFRIPYYVGPLARGNSRFAWMTRKSEETITPWNFEEVVDKGASAQSFIERMTNFDKNLPNEKVLPKHSLLY | |
| | EYFTVYNELTKVKYVTEGMRKPAFLSGEQKKAIVDLLFKTNRKVTVKQLKEDYFKKIECFDSVEISGVEDRFNASLGTYHDLLKIIKDKDFLDNEENEDILEDIVLT | |
| | LTLFEDREMIEERLKTYAHLFDDKVMKQLKRRRYTGWGRLSRKLINGIRDKQSGKTILDFLKSDGFANRNFMQLIHDDSLTFKEDIQKAQVSGQGDSLHEHIA | |
| | NLAGSPAIKKGILQTVKVVDELVKVMGRHKPENIVIEMARENQTTQKGQKNSRERMKRIEEGIKELGSQILKEHPVENTQLQNEKLYLYYLQNGRDMYVDQE | |
| | LDINRLSDYDVDHIVPQSFLKDDSIDNKVLTRSDKARGKSDNVPSEEVVKKMKNYWRQLLNAKLITQRKFDNLTKAERGGLSELDKAGFIKRQLVETRQITKH | |
| | VAQILDSRMNTKYDENDKLIREVKVITLKSKLVSDFRKDFQFYKVREINNYHHAHDAYLNAVVGTALIKKYPKLESEFVYGDYKVYDVRKMIAKSEQEIGKATA | |
| | KYFFYSNIMNFFKTEITLANGEIRKRPLIETNGETGEIVWDKGRDFATVRKVLSMPQVNIVKKTEVQTGGFSKESILPKRNSDKLIARKKDWDPKKYGGFDSPT | |
| | VAYSVLVVAKVEKGKSKKLKSVKELLGITIMERSSFEKNPIDFLEAKGYKEVKKDLIIKLPKYSLFELENGRKRMLASAGELQKGNELALPSKYVNFLYLASHYEKLK | |
| | GSPEDNEQKQLFVEQHKHYLDEIIEQISEFSKRVILADANLDKVLSAYNKHRDKPIREQAENIIHLFTLTNLGAPAAFKYFDTTIDRKRYTSTKEVLDATLIHQSIT | |
| | GLYETRIDLSQLGGDKRTADGSEFESPKKKAKVE | |
| PL12125 | MPAAKRVKLDGGTAPLEEEYRLFLEAPIQNVTLLEQWKREIPKVWAEINPPGLASTQAPIHVQLLSTALPVRVRQYPITLEAKRSLRETIRKFRAAGILRPVHSP | 16,164 |
| | WNTPLLPVRKSGTSEYRMVQDLREVNKRVETIHPTVPNPYTLLSLLPPDRIWYSVLDLKDAFFCIPLAPESQLIFAFEWADAEEGESGQLTWTRLPQGFKNSPT | |
| | LFNEALNRDLQGFRLDHPSVSLLQYVDDLLIAADTQAACLSATRDLLMTLAELGYRVSGKKAQLCQEEVTYLGFKIHKGSRSLSNSRTQAILQIPVPKTKRQVRE | |
| | FLGKIGYCRLFIPGFAELAQPLYAATRPGNDPLVWGEKEEEAFQSLKLALTQPPALALPSLDKPFQLFVEETSGAAKGVLTQALGPWKRPVAYLSKRLDPVAAG | |
| | WPRCLRAIAAAALLTREASKLTFGQDIEITSSHNLESLLRSPPDKWLTNARITQYQVLLLDPPRVRFKQTAALNPATLLPETDDTLPIHHCLDTLDSLTSTRPDLT | |
| | DQPLAQAEATLFTDGSSYIRDGKRYAGAAVVTLDSVIWAEPLPIGTSAQKAELIALTKALEWSKDKSVNIYTDSRYAFATLHVHGMIYRERGWLTAGGKAIKN | |
| | APEILALLTAVWLPKRVAVMHCKGHQKDDAPTSTGNRRADEVAREVAIRPLSTQATISSGGSSGGSSGSETPGTSESATPESSGGSSGGSSMASNFTQFVLV | |
| | DNGGTGDVTVAPSNFANGIAEWISSNSRSQAYKVTCSVRQSSAQNRKYTIKVEVPKGAWRSYLNMELTIPIFATNSDCELIVKAMQGLLKDGNPIPSAIAANS | |
| | GIYGGSGGSMASNFTQFVLVDNGGTGDVTVAPSNFANGIAEWISSNSRSQAYKVTCSVRQSSAQNRKYTIKVEVPKGAWRSYLNMELTIPIFATNSDCELIV | |
| | KAMQGLLKDGNPIPSAIAANSGIYAEAAAKEAAAKEAAAKEAAAKALEAEAAAKEAAAKEAAAKEAAAKADKKYSIGLDIGTNSVGWAVITDEYKVPSKKFK | |
| | VLGNTDRHSIKKNLIGALLFDSGETAEATRLKRTARRRYTRRKNRICYLQEIFSNEMAKVDDSFFHRLEESFLVEEDKKHERHPIFGNIVDEVAYHEKYPTIYHLR | |
| | KKLVDSTDKADLRLIYLALAHMIKFRGHFLIEGDLNPDNSDVDKLFIQLVQTYNQLFEENPINASGVDAKAILSARLSKSRRLENLIAQLPGEKKNGLFGNLIALSL | |
| | GLTPNFKSNFDLAEDAKLQLSKDTYDDDLDNLLAQIGDQYADLFLAAKNLSDAILLSDILRVNTEITKAPLSASMIKRYDEHHQDLTLLKALVRQQLPEKYKEIFF | |
| | DQSKNGYAGYIDGGASQEEFYKFIKPILEKMDGTEELLVKLNREDLLRKQRTFDNGSIPHQIHLGELHAILRRQEDFYPFLKDNREKIEKILTFRIPYYVGPLARG | |
| | NSRFAWMTRKSEETITPWNFEEVVDKGASAQSFIERMTNFDKNLPNEKVLPKHSLLYEYFTVYNELTKVKYVTEGMRKPAFLSGEQKKAIVDLLFKTNRKVTV | |
| | KQLKEDYFKKIECFDSVEISGVEDRFNASLGTYHDLLKIIKDKDFLDNEENEDILEDIVLTLTLFEDREMIEERLKTYAHLFDDKVMKQLKRRRYTGWGRLSRKLIN | |
| | GIRDKQSGKTILDFLKSDGFANRNFMQLIHDDSLTFKEDIQKAQVSGQGDSLHEHIANLAGSPAIKKGILQTVKVVDELVKVMGRHKPENIVIEMARENQTT | |
| | QKGQKNSRERMKRIEEGIKELGSQILKEHPVENTQLQNEKLYLYYLQNGRDMYVDQELDINRLSDYDVDHIVPQSFLKDDSIDNKVLTRSDKARGKSDNVPSE | |
| | EVVKKMKNYWRQLLNAKLITQRKFDNLTKAERGGLSELDKAGFIKRQLVETRQITKHVAQILDSRMNTKYDENDKLIREVKVITLKSKLVSDFRKDFQFYKVRE | |
| | INNYHHAHDAYLNAVVGTALIKKYPKLESEFVYGDYKVYDVRKMIAKSEQEIGKATAKYFFYSNIMNFFKTEITLANGEIRKRPLIETNGETGEIVWDKGRDFAT | |
| | VRKVLSMPQVNIVKKTEVQTGGFSKESILPKRNSDKLIARKKDWDPKKYGGFDSPTVAYSVLVVAKVEKGKSKKLKSVKELLGITIMERSSFEKNPIDFLEAKGY | |
| | KEVKKDLIIKLPKYSLFELENGRKRMLASAGELQKGNELALPSKYVNFLYLASHYEKLKGSPEDNEQKQLFVEQHKHYLDEIIEQISEFSKRVILADANLDKVLSAY | |
| | NKHRDKPIREQAENIIHLFTLTNLGAPAAFKYFDTTIDRKRYTSTKEVLDATLIHQSITGLYETRIDLSQLGGDKRTADGSEFESPKKKAKVE | |
| PL12126 | MPAAKRVKLDGGTAPLEEEYRLFLEAPIQNVTLLEQWKREIPKVWAEINPPGLASTQAPIHVQLLSTALPVRVRQYPITLEAKRSLRETIRKFRAAGILRPVHSP | 16,165 |
| | WNTPLLPVRKSGTSEYRMVQDLREVNKRVETIHPTVPNPYTLLSLLPPDRIWYSVLDLKDAFFCIPLAPESQLIFAFEWADAEEGESGQLTWTRLPQGFKNSPT | |
| | LFNEALNRDLQGFRLDHPSVSLLQYVDDLLIAADTQAACLSATRDLLMTLAELGYRVSGKKAQLCQEEVTYLGFKIHKGSRSLSNSRTQAILQIPVPKTKRQVRE | |
| | FLGKIGYCRLFIPGFAELAQPLYAATRPGNDPLVWGEKEEEAFQSLKLALTQPPALALPSLDKPFQLFVEETSGAAKGVLTQALGPWKRPVAYLSKRLDPVAAG | |
| | WPRCLRAIAAAALLTREASKLTFGQDIEITSSHNLESLLRSPPDKWLTNARITQYQVLLLDPPRVRFKQTAALNPATLLPETDDTLPIHHCLDTLDSLTSTRPDLT | |
| | DQPLAQAEATLFTDGSSYIRDGKRYAGAAVVTLDSVIWAEPLPIGTSAQKAELIALTKALEWSKDKSVNIYTDSRYAFATLHVHGMIYRERGWLTAGGKAIKN | |
| | APEILALLTAVWLPKRVAVMHCKGHQKDDAPTSTGNRRADEVAREVAIRPLSTQATISSGGSSGGSSGSETPGTSESATPESSGGSSGGSSMASNFTQFVLV | |
| | DNGGTGDVTVAPSNFANGIAEWISSNSRSQAYKVTCSVRQSSAQNRKYTIKVEVPKGAWRSYLNMELTIPIFATNSDCELIVKAMQGLLKDGNPIPSAIAANS | |
| | GIYGGSGGSMASNFTQFVLVDNGGTGDVTVAPSNFANGIAEWISSNSRSQAYKVTCSVRQSSAQNRKYTIKVEVPKGAWRSYLNMELTIPIFATNSDCELIV | |
| | KAMQGLLKDGNPIPSAIAANSGIYSGGSSGGSSGSETPGTSESATPESSGGSSGGSSDKKYSIGLDIGTNSVGWAVITDEYKVPSKKFKVLGNTDRHSIKKNLIG | |
| | ALLFDSGETAEATRLKRTARRRYTRRKNRICYLQEIFSNEMAKVDDSFFHRLEESFLVEEDKKHERHPIFGNIVDEVAYHEKYPTIYHLRKKLVDSTDKADLRLIYL | |
| | ALAHMIKFRGHFLIEGDLNPDNSDVDKLFIQLVQTYNQLFEENPINASGVDAKAILSARLSKSRRLENLIAQLPGEKKNGLFGNLIALSLGLTPNFKSNFDLAED | |
| | AKLQLSKDTYDDDLDNLLAQIGDQYADLFLAAKNLSDAILLSDILRVNTEITKAPLSASMIKRYDEHHQDLTLLKALVRQQLPEKYKEIFFDQSKNGYAGYIDGG | |
| | ASQEEFYKFIKPILEKMDGTEELLVKLNREDLLRKQRTFDNGSIPHQIHLGELHAILRRQEDFYPFLKDNREKIEKILTFRIPYYVGPLARGNSRFAWMTRKSEETI | |
| | TPWNFEEVVDKGASAQSFIERMTNFDKNLPNEKVLPKHSLLYEYFTVYNELTKVKYVTEGMRKPAFLSGEQKKAIVDLLFKTNRKVTVKQLKEDYFKKIECFDS | |
| | VEISGVEDRFNASLGTYHDLLKIIKDKDFLDNEENEDILEDIVLTLTLFEDREMIEERLKTYAHLFDDKVMKQLKRRRYTGWGRLSRKLINGIRDKQSGKTILDFLK | |
| | SDGFANRNFMQLIHDDSLTFKEDIQKAQVSGQGDSLHEHIANLAGSPAIKKGILQTVKVVDELVKVMGRHKPENIVIEMARENQTTQKGQKNSRERMKRIE | |
| | EGIKELGSQILKEHPVENTQLQNEKLYLYYLQNGRDMYVDQELDINRLSDYDVDHIVPQSFLKDDSIDNKVLTRSDKARGKSDNVPSEEVVKKMKNYWRQLL | |
| | NAKLITQRKFDNLTKAERGGLSELDKAGFIKRQLVETRQITKHVAQILDSRMNTKYDENDKLIREVKVITLKSKLVSDFRKDFQFYKVREINNYHHAHDAYLNA | |
| | VVGTALIKKYPKLESEFVYGDYKVYDVRKMIAKSEQEIGKATAKYFFYSNIMNFFKTEITLANGEIRKRPLIETNGETGEIVWDKGRDFATVRKVLSMPQVNIVK | |
| | KTEVQTGGFSKESILPKRNSDKLIARKKDWDPKKYGGFDSPTVAYSVLVVAKVEKGKSKKLKSVKELLGITIMERSSFEKNPIDFLEAKGYKEVKKDLIIKLPKYSLF | |
| | ELENGRKRMLASAGELQKGNELALPSKYVNFLYLASHYEKLKGSPEDNEQKQLFVEQHKHYLDEIIEQISEFSKRVILADANLDKVLSAYNKHRDKPIREQAENII | |
| | HLFTLTNLGAPAAFKYFDTTIDRKRYTSTKEVLDATLIHQSITGLYETRIDLSQLGGDKRTADGSEFESPKKKAKVE | |
| PL12127 | MPAAKRVKLDGGTAPLEEEYRLFLEAPIQNVTLLEQWKREIPKVWAEINPPGLASTQAPIHVQLLSTALPVRVRQYPITLEAKRSLRETIRKFRAAGILRPVHSP | 16,166 |
| | WNTPLLPVRKSGTSEYRMVQDLREVNKRVETIHPTVPNPYTLLSLLPPDRIWYSVLDLKDAFFCIPLAPESQLIFAFEWADAEEGESGQLTWTRLPQGFKNSPT | |
| | LFNEALNRDLQGFRLDHPSVSLLQYVDDLLIAADTQAACLSATRDLLMTLAELGYRVSGKKAQLCQEEVTYLGFKIHKGSRSLSNSRTQAILQIPVPKTKRQVRE | |
| | FLGKIGYCRLFIPGFAELAQPLYAATRPGNDPLVWGEKEEEAFQSLKLALTQPPALALPSLDKPFQLFVEETSGAAKGVLTQALGPWKRPVAYLSKRLDPVAAG | |
| | WPRCLRAIAAAALLTREASKLTFGQDIEITSSHNLESLLRSPPDKWLTNARITQYQVLLLDPPRVRFKQTAALNPATLLPETDDTLPIHHCLDTLDSLTSTRPDLT | |
| | DQPLAQAEATLFTDGSSYIRDGKRYAGAAVVTLDSVIWAEPLPIGTSAQKAELIALTKALEWSKDKSVNIYTDSRYAFATLHVHGMIYRERGWLTAGGKAIKN | |
| | APEILALLTAVWLPKRVAVMHCKGHQKDDAPTSTGNRRADEVAREVAIRPLSTQATISSGGSSGGSSGSETPGTSESATPESSGGSSGGSSMASNFTQFVLV | |
| | DNGGTGDVTVAPSNFANGIAEWISSNSRSQAYKVTCSVRQSSAQNRKYTIKVEVPKGAWRSYLNMELTIPIFATNSDCELIVKAMQGLLKDGNPIPSAIAANS | |
| | GIYGGSGGSMASNFTQFVLVDNGGTGDVTVAPSNFANGIAEWISSNSRSQAYKVTCSVRQSSAQNRKYTIKVEVPKGAWRSYLNMELTIPIFATNSDCELIV | |
| | KAMQGLLKDGNPIPSAIAANSGIYGSSGSSGSSGSSGSSGSSDKKYSIGLDIGTNSVGWAVITDEYKVPSKKFKVLGNTDRHSIKKNLIGALLFDSGETAEATRL | |
| | KRTARRRYTRRKNRICYLQEIFSNEMAKVDDSFFHRLEESFLVEEDKKHERHPIFGNIVDEVAYHEKYPTIYHLRKKLVDSTDKADLRLIYLALAHMIKFRGHFLIE | |
| | GDLNPDNSDVDKLFIQLVQTYNQLFEENPINASGVDAKAILSARLSKSRRLENLIAQLPGEKKNGLFGNLIALSLGLTPNFKSNFDLAEDAKLQLSKDTYDDDLD | |
| | NLLAQIGDQYADLFLAAKNLSDAILLSDILRVNTEITKAPLSASMIKRYDEHHQDLTLLKALVRQQLPEKYKEIFFDQSKNGYAGYIDGGASQEEFYKFIKPILEK | |
| | MDGTEELLVKLNREDLLRKQRTFDNGSIPHQIHLGELHAILRRQEDFYPFLKDNREKIEKILTFRIPYYVGPLARGNSRFAWMTRKSEETITPWNFEEVVDKGA | |
| | SAQSFIERMTNFDKNLPNEKVLPKHSLLYEYFTVYNELTKVKYVTEGMRKPAFLSGEQKKAIVDLLFKTNRKVTVKQLKEDYFKKIECFDSVEISGVEDRFNASL | |
| | GTYHDLLKIIKDKDFLDNEENEDILEDIVLTLTLFEDREMIEERLKTYAHLFDDKVMKQLKRRRYTGWGRLSRKLINGIRDKQSGKTILDFLKSDGFANRNFMQLI | |
| | HDDSLTFKEDIQKAQVSGQGDSLHEHIANLAGSPAIKKGILQTVKVVDELVKVMGRHKPENIVIEMARENQTTQKGQKNSRERMKRIEEGIKELGSQILKEHP | |
| | VENTQLQNEKLYLYYLQNGRDMYVDQELDINRLSDYDVDHIVPQSFLKDDSIDNKVLTRSDKARGKSDNVPSEEVVKKMKNYWRQLLNAKLITQRKFDNLT | |
| | KAERGGLSELDKAGFIKRQLVETRQITKHVAQILDSRMNTKYDENDKLIREVKVITLKSKLVSDFRKDFQFYKVREINNYHHAHDAYLNAVVGTALIKKYPKLES | |
| | EFVYGDYKVYDVRKMIAKSEQEIGKATAKYFFYSNIMNFFKTEITLANGEIRKRPLIETNGETGEIVWDKGRDFATVRKVLSMPQVNIVKKTEVQTGGFSKESIL | |
| | PKRNSDKLIARKKDWDPKKYGGFDSPTVAYSVLVVAKVEKGKSKKLKSVKELLGITIMERSSFEKNPIDFLEAKGYKEVKKDLIIKLPKYSLFELENGRKRMLASA | |
| | GELQKGNELALPSKYVNFLYLASHYEKLKGSPEDNEQKQLFVEQHKHYLDEIIEQISEFSKRVILADANLDKVLSAYNKHRDKPIREQAENIIHLFTLTNLGAPAA | |
| | FKYFDTTIDRKRYTSTKEVLDATLIHQSITGLYETRIDLSQLGGDKRTADGSEFESPKKKAKVE | |
| PL12128 | MPAAKRVKLDGGTAPLEEEYRLFLEAPIQNVTLLEQWKREIPKVWAEINPPGLASTQAPIHVQLLSTALPVRVRQYPITLEAKRSLRETIRKFRAAGILRPVHSP | 16,167 |
| | WNTPLLPVRKSGTSEYRMVQDLREVNKRVETIHPTVPNPYTLLSLLPPDRIWYSVLDLKDAFFCIPLAPESQLIFAFEWADAEEGESGQLTWTRLPQGFKNSPT | |
| | LFNEALNRDLQGFRLDHPSVSLLQYVDDLLIAADTQAACLSATRDLLMTLAELGYRVSGKKAQLCQEEVTYLGFKIHKGSRSLSNSRTQAILQIPVPKTKRQVRE | |
| | FLGKIGYCRLFIPGFAELAQPLYAATRPGNDPLVWGEKEEEAFQSLKLALTQPPALALPSLDKPFQLFVEETSGAAKGVLTQALGPWKRPVAYLSKRLDPVAAG | |
| | WPRCLRAIAAAALLTREASKLTFGQDIEITSSHNLESLLRSPPDKWLTNARITQYQVLLLDPPRVRFKQTAALNPATLLPETDDTLPIHHCLDTLDSLTSTRPDLT | |
| | DQPLAQAEATLFTDGSSYIRDGKRYAGAAVVTLDSVIWAEPLPIGTSAQKAELIALTKALEWSKDKSVNIYTDSRYAFATLHVHGMIYRERGWLTAGGKAIKN | |
| | APEILALLTAVWLPKRVAVMHCKGHQKDDAPTSTGNRRADEVAREVAIRPLSTQATISSGGSSGGSSGSETPGTSESATPESSGGSSGGSSMASNFTQFVLV | |
| | DNGGTGDVTVAPSNFANGIAEWISSNSRSQAYKVTCSVRQSSAQNRKYTIKVEVPKGAWRSYLNMELTIPIFATNSDCELIVKAMQGLLKDGNPIPSAIAANS | |
| | GIYGGSGGSMASNFTQFVLVDNGGTGDVTVAPSNFANGIAEWISSNSRSQAYKVTCSVRQSSAQNRKYTIKVEVPKGAWRSYLNMELTIPIFATNSDCELIV | |
| | KAMQGLLKDGNPIPSAIAANSGIYGSSGGGEAAAKDKKYSIGLDIGTNSVGWAVITDEYKVPSKKFKVLGNTDRHSIKKNLIGALLFDSGETAEATRLKRTARR | |
| | RYTRRKNRICYLQEIFSNEMAKVDDSFFHRLEESFLVEEDKKHERHPIFGNIVDEVAYHEKYPTIYHLRKKLVDSTDKADLRLIYLALAHMIKFRGHFLIEGDLNP | |
| | DNSDVDKLFIQLVQTYNQLFEENPINASGVDAKAILSARLSKSRRLENLIAQLPGEKKNGLFGNLIALSLGLTPNFKSNFDLAEDAKLQLSKDTYDDDLDNLLAQI | |
| | GDQYADLFLAAKNLSDAILLSDILRVNTEITKAPLSASMIKRYDEHHQDLTLLKALVRQQLPEKYKEIFFDQSKNGYAGYIDGGASQEEFYKFIKPILEKMDGTEE | |
| | LLVKLNREDLLRKQRTFDNGSIPHQIHLGELHAILRRQEDFYPFLKDNREKIEKILTFRIPYYVGPLARGNSRFAWMTRKSEETITPWNFEEVVDKGASAQSFIER | |
| | MTNFDKNLPNEKVLPKHSLLYEYFTVYNELTKVKYVTEGMRKPAFLSGEQKKAIVDLLFKTNRKVTVKQLKEDYFKKIECFDSVEISGVEDRFNASLGTYHDLLKI | |
| | IKDKDFLDNEENEDILEDIVLTLTLFEDREMIEERLKTYAHLFDDKVMKQLKRRRYTGWGRLSRKLINGIRDKQSGKTILDFLKSDGFANRNFMQLIHDDSLTFK | |
| | EDIQKAQVSGQGDSLHEHIANLAGSPAIKKGILQTVKVVDELVKVMGRHKPENIVIEMARENQTTQKGQKNSRERMKRIEEGIKELGSQILKEHPVENTQLQ | |
| | NEKLYLYYLQNGRDMYVDQELDINRLSDYDVDHIVPQSFLKDDSIDNKVLTRSDKARGKSDNVPSEEVVKKMKNYWRQLLNAKLITQRKFDNLTKAERGGLS | |
| | ELDKAGFIKRQLVETRQITKHVAQILDSRMNTKYDENDKLIREVKVITLKSKLVSDFRKDFQFYKVREINNYHHAHDAYLNAVVGTALIKKYPKLESEFVYGDYK | |
| | VYDVRKMIAKSEQEIGKATAKYFFYSNIMNFFKTEITLANGEIRKRPLIETNGETGEIVWDKGRDFATVRKVLSMPQVNIVKKTEVQTGGFSKESILPKRNSDKL | |
| | IARKKDWDPKKYGGFDSPTVAYSVLVVAKVEKGKSKKLKSVKELLGITIMERSSFEKNPIDFLEAKGYKEVKKDLIIKLPKYSLFELENGRKRMLASAGELQKGNE | |
| | LALPSKYVNFLYLASHYEKLKGSPEDNEQKQLFVEQHKHYLDEIIEQISEFSKRVILADANLDKVLSAYNKHRDKPIREQAENIIHLFTLTNLGAPAAFKYFDTTID | |
| | RKRYTSTKEVLDATLIHQSITGLYETRIDLSQLGGDKRTADGSEFESPKKKAKVE | |
| PL12129 | MPAAKRVKLDGGTAPLEEEYRLFLEAPIQNVTLLEQWKREIPKVWAEINPPGLASTQAPIHVQLLSTALPVRVRQYPITLEAKRSLRETIRKFRAAGILRPVHSP | 16,168 |
| | WNTPLLPVRKSGTSEYRMVQDLREVNKRVETIHPTVPNPYTLLSLLPPDRIWYSVLDLKDAFFCIPLAPESQLIFAFEWADAEEGESGQLTWTRLPQGFKNSPT | |
| | LFNEALNRDLQGFRLDHPSVSLLQYVDDLLIAADTQAACLSATRDLLMTLAELGYRVSGKKAQLCQEEVTYLGFKIHKGSRSLSNSRTQAILQIPVPKTKRQVRE | |
| | FLGKIGYCRLFIPGFAELAQPLYAATRPGNDPLVWGEKEEEAFQSLKLALTQPPALALPSLDKPFQLFVEETSGAAKGVLTQALGPWKRPVAYLSKRLDPVAAG | |
| | WPRCLRAIAAAALLTREASKLTFGQDIEITSSHNLESLLRSPPDKWLTNARITQYQVLLLDPPRVRFKQTAALNPATLLPETDDTLPIHHCLDTLDSLTSTRPDLT | |
| | DQPLAQAEATLFTDGSSYIRDGKRYAGAAVVTLDSVIWAEPLPIGTSAQKAELIALTKALEWSKDKSVNIYTDSRYAFATLHVHGMIYRERGWLTAGGKAIKN | |
| | APEILALLTAVWLPKRVAVMHCKGHQKDDAPTSTGNRRADEVAREVAIRPLSTQATISSGGSSGGSSGSETPGTSESATPESSGGSSGGSSMASNFTQFVLV | |
| | DNGGTGDVTVAPSNFANGIAEWISSNSRSQAYKVTCSVRQSSAQNRKYTIKVEVPKGAWRSYLNMELTIPIFATNSDCELIVKAMQGLLKDGNPIPSAIAANS | |
| | GIYGGSGGSMASNFTQFVLVDNGGTGDVTVAPSNFANGIAEWISSNSRSQAYKVTCSVRQSSAQNRKYTIKVEVPKGAWRSYLNMELTIPIFATNSDCELIV | |
| | KAMQGLLKDGNPIPSAIAANSGIYGGGSGGGSGGGSGGGSMASNFTQFVLVDNGGTGDVTVAPSNFANGIAEWISSNSRSQAYKVTCSVRQSSAQNRKY | |
| | TIKVEVPKGAWRSYLNMELTIPIFATNSDCELIVKAMQGLLKDGNPIPSAIAANSGIYGGSGGSMASNFTQFVLVDNGGTGDVTVAPSNFANGIAEWISSNS | |
| | RSQAYKVTCSVRQSSAQNRKYTIKVEVPKGAWRSYLNMELTIPIFATNSDCELIVKAMQGLLKDGNPIPSAIAANSGIYAEAAAKEAAAKEAAAKEAAAKALE | |
| | AEAAAKEAAAKEAAAKEAAAKADKKYSIGLDIGTNSVGWAVITDEYKVPSKKFKVLGNTDRHSIKKNLIGALLFDSGETAEATRLKRTARRRYTRRKNRICYLQE | |
| | IFSNEMAKVDDSFFHRLEESFLVEEDKKHERHPIFGNIVDEVAYHEKYPTIYHLRKKLVDSTDKADLRLIYLALAHMIKFRGHFLIEGDLNPDNSDVDKLFIQLVQ | |
| | TYNQLFEENPINASGVDAKAILSARLSKSRRLENLIAQLPGEKKNGLFGNLIALSLGLTPNFKSNFDLAEDAKLQLSKDTYDDDLDNLLAQIGDQYADLFLAAKN | |
| | LSDAILLSDILRVNTEITKAPLSASMIKRYDEHHQDLTLLKALVRQQLPEKYKEIFFDQSKNGYAGYIDGGASQEEFYKFIKPILEKMDGTEELLVKLNREDLLRKQ | |
| | RTFDNGSIPHQIHLGELHAILRRQEDFYPFLKDNREKIEKILTFRIPYYVGPLARGNSRFAWMTRKSEETITPWNFEEVVDKGASAQSFIERMTNFDKNLPNEK | |
| | VLPKHSLLYEYFTVYNELTKVKYVTEGMRKPAFLSGEQKKAIVDLLFKTNRKVTVKQLKEDYFKKIECFDSVEISGVEDRFNASLGTYHDLLKIIKDKDFLDNEENE | |
| | DILEDIVLTLTLFEDREMIEERLKTYAHLFDDKVMKQLKRRRYTGWGRLSRKLINGIRDKQSGKTILDFLKSDGFANRNFMQLIHDDSLTFKEDIQKAQVSGQG | |
| | DSLHEHIANLAGSPAIKKGILQTVKVVDELVKVMGRHKPENIVIEMARENQTTQKGQKNSRERMKRIEEGIKELGSQILKEHPVENTQLQNEKLYLYYLQNGR | |
| | DMYVDQELDINRLSDYDVDHIVPQSFLKDDSIDNKVLTRSDKARGKSDNVPSEEVVKKMKNYWRQLLNAKLITQRKFDNLTKAERGGLSELDKAGFIKRQLV | |
| | ETRQITKHVAQILDSRMNTKYDENDKLIREVKVITLKSKLVSDFRKDFQFYKVREINNYHHAHDAYLNAVVGTALIKKYPKLESEFVYGDYKVYDVRKMIAKSE | |
| | QEIGKATAKYFFYSNIMNFFKTEITLANGEIRKRPLIETNGETGEIVWDKGRDFATVRKVLSMPQVNIVKKTEVQTGGFSKESILPKRNSDKLIARKKDWDPKKY | |
| | GGFDSPTVAYSVLVVAKVEKGKSKKLKSVKELLGITIMERSSFEKNPIDFLEAKGYKEVKKDLIIKLPKYSLFELENGRKRMLASAGELQKGNELALPSKYVNFLYL | |
| | ASHYEKLKGSPEDNEQKQLFVEQHKHYLDEIIEQISEFSKRVILADANLDKVLSAYNKHRDKPIREQAENIIHLFTLTNLGAPAAFKYFDTTIDRKRYTSTKEVLDA | |
| | TLIHQSITGLYETRIDLSQLGGDKRTADGSEFESPKKKAKVE | |
| PL12130 | MPAAKRVKLDGGTAPLEEEYRLFLEAPIQNVTLLEQWKREIPKVWAEINPPGLASTQAPIHVQLLSTALPVRVRQYPITLEAKRSLRETIRKFRAAGILRPVHSP | 16,169 |
| | WNTPLLPVRKSGTSEYRMVQDLREVNKRVETIHPTVPNPYTLLSLLPPDRIWYSVLDLKDAFFCIPLAPESQLIFAFEWADAEEGESGQLTWTRLPQGFKNSPT | |
| | LFNEALNRDLQGFRLDHPSVSLLQYVDDLLIAADTQAACLSATRDLLMTLAELGYRVSGKKAQLCQEEVTYLGFKIHKGSRSLSNSRTQAILQIPVPKTKRQVRE | |
| | FLGKIGYCRLFIPGFAELAQPLYAATRPGNDPLVWGEKEEEAFQSLKLALTQPPALALPSLDKPFQLFVEETSGAAKGVLTQALGPWKRPVAYLSKRLDPVAAG | |
| | WPRCLRAIAAAALLTREASKLTFGQDIEITSSHNLESLLRSPPDKWLTNARITQYQVLLLDPPRVRFKQTAALNPATLLPETDDTLPIHHCLDTLDSLTSTRPDLT | |
| | DQPLAQAEATLFTDGSSYIRDGKRYAGAAVVTLDSVIWAEPLPIGTSAQKAELIALTKALEWSKDKSVNIYTDSRYAFATLHVHGMIYRERGWLTAGGKAIKN | |
| | APEILALLTAVWLPKRVAVMHCKGHQKDDAPTSTGNRRADEVAREVAIRPLSTQATISSGGSSGGSSGSETPGTSESATPESSGGSSGGSSMASNFTQFVLV | |
| | DNGGTGDVTVAPSNFANGIAEWISSNSRSQAYKVTCSVRQSSAQNRKYTIKVEVPKGAWRSYLNMELTIPIFATNSDCELIVKAMQGLLKDGNPIPSAIAANS | |
| | GIYGGSGGSMASNFTQFVLVDNGGTGDVTVAPSNFANGIAEWISSNSRSQAYKVTCSVRQSSAQNRKYTIKVEVPKGAWRSYLNMELTIPIFATNSDCELIV | |
| | KAMQGLLKDGNPIPSAIAANSGIYGGGSGGGSGGGSGGGSMASNFTQFVLVDNGGTGDVTVAPSNFANGIAEWISSNSRSQAYKVTCSVRQSSAQNRKY | |
| | TIKVEVPKGAWRSYLNMELTIPIFATNSDCELIVKAMQGLLKDGNPIPSAIAANSGIYGGSGGSMASNFTQFVLVDNGGTGDVTVAPSNFANGIAEWISSNS | |
| | RSQAYKVTCSVRQSSAQNRKYTIKVEVPKGAWRSYLNMELTIPIFATNSDCELIVKAMQGLLKDGNPIPSAIAANSGIYSGGSSGGSSGSETPGTSESATPESS | |
| | GGSSGGSSDKKYSIGLDIGTNSVGWAVITDEYKVPSKKFKVLGNTDRHSIKKNLIGALLFDSGETAEATRLKRTARRRYTRRKNRICYLQEIFSNEMAKVDDSFF | |
| | HRLEESFLVEEDKKHERHPIFGNIVDEVAYHEKYPTIYHLRKKLVDSTDKADLRLIYLALAHMIKFRGHFLIEGDLNPDNSDVDKLFIQLVQTYNQLFEENPINAS | |
| | GVDAKAILSARLSKSRRLENLIAQLPGEKKNGLFGNLIALSLGLTPNFKSNFDLAEDAKLQLSKDTYDDDLDNLLAQIGDQYADLFLAAKNLSDAILLSDILRVNT | |
| | EITKAPLSASMIKRYDEHHQDLTLLKALVRQQLPEKYKEIFFDQSKNGYAGYIDGGASQEEFYKFIKPILEKMDGTEELLVKLNREDLLRKQRTFDNGSIPHQIHL | |
| | GELHAILRRQEDFYPFLKDNREKIEKILTFRIPYYVGPLARGNSRFAWMTRKSEETITPWNFEEVVDKGASAQSFIERMTNFDKNLPNEKVLPKHSLLYEYFTVY | |
| | NELTKVKYVTEGMRKPAFLSGEQKKAIVDLLFKTNRKVTVKQLKEDYFKKIECFDSVEISGVEDRFNASLGTYHDLLKIIKDKDFLDNEENEDILEDIVLTLTLFED | |
| | REMIEERLKTYAHLFDDKVMKQLKRRRYTGWGRLSRKLINGIRDKQSGKTILDFLKSDGFANRNFMQLIHDDSLTFKEDIQKAQVSGQGDSLHEHIANLAGSP | |
| | AIKKGILQTVKVVDELVKVMGRHKPENIVIEMARENQTTQKGQKNSRERMKRIEEGIKELGSQILKEHPVENTQLQNEKLYLYYLQNGRDMYVDQELDINRL | |
| | SDYDVDHIVPQSFLKDDSIDNKVLTRSDKARGKSDNVPSEEVVKKMKNYWRQLLNAKLITQRKFDNLTKAERGGLSELDKAGFIKRQLVETRQITKHVAQILD | |
| | SRMNTKYDENDKLIREVKVITLKSKLVSDFRKDFQFYKVREINNYHHAHDAYLNAVVGTALIKKYPKLESEFVYGDYKVYDVRKMIAKSEQEIGKATAKYFFYSN | |
| | IMNFFKTEITLANGEIRKRPLIETNGETGEIVWDKGRDFATVRKVLSMPQVNIVKKTEVQTGGFSKESILPKRNSDKLIARKKDWDPKKYGGFDSPTVAYSVLV | |
| | VAKVEKGKSKKLKSVKELLGITIMERSSFEKNPIDFLEAKGYKEVKKDLIIKLPKYSLFELENGRKRMLASAGELQKGNELALPSKYVNFLYLASHYEKLKGSPEDN | |
| | EQKQLFVEQHKHYLDEIIEQISEFSKRVILADANLDKVLSAYNKHRDKPIREQAENIIHLFTLTNLGAPAAFKYFDTTIDRKRYTSTKEVLDATLIHQSITGLYETRID | |
| | LSQLGGDKRTADGSEFESPKKKAKVE | |
| PL12131 | MPAAKRVKLDGGTAPLEEEYRLFLEAPIQNVTLLEQWKREIPKVWAEINPPGLASTQAPIHVQLLSTALPVRVRQYPITLEAKRSLRETIRKFRAAGILRPVHSP | 16,170 |
| | WNTPLLPVRKSGTSEYRMVQDLREVNKRVETIHPTVPNPYTLLSLLPPDRIWYSVLDLKDAFFCIPLAPESQLIFAFEWADAEEGESGQLTWTRLPQGFKNSPT | |
| | LFNEALNRDLQGFRLDHPSVSLLQYVDDLLIAADTQAACLSATRDLLMTLAELGYRVSGKKAQLCQEEVTYLGFKIHKGSRSLSNSRTQAILQIPVPKTKRQVRE | |
| | FLGKIGYCRLFIPGFAELAQPLYAATRPGNDPLVWGEKEEEAFQSLKLALTQPPALALPSLDKPFQLFVEETSGAAKGVLTQALGPWKRPVAYLSKRLDPVAAG | |
| | WPRCLRAIAAAALLTREASKLTFGQDIEITSSHNLESLLRSPPDKWLTNARITQYQVLLLDPPRVRFKQTAALNPATLLPETDDTLPIHHCLDTLDSLTSTRPDLT | |
| | DQPLAQAEATLFTDGSSYIRDGKRYAGAAVVTLDSVIWAEPLPIGTSAQKAELIALTKALEWSKDKSVNIYTDSRYAFATLHVHGMIYRERGWLTAGGKAIKN | |
| | APEILALLTAVWLPKRVAVMHCKGHQKDDAPTSTGNRRADEVAREVAIRPLSTQATISSGGSSGGSSGSETPGTSESATPESSGGSSGGSSMASNFTQFVLV | |
| | DNGGTGDVTVAPSNFANGIAEWISSNSRSQAYKVTCSVRQSSAQNRKYTIKVEVPKGAWRSYLNMELTIPIFATNSDCELIVKAMQGLLKDGNPIPSAIAANS | |
| | GIYGGSGGSMASNFTQFVLVDNGGTGDVTVAPSNFANGIAEWISSNSRSQAYKVTCSVRQSSAQNRKYTIKVEVPKGAWRSYLNMELTIPIFATNSDCELIV | |
| | KAMQGLLKDGNPIPSAIAANSGIYGGGSGGGSGGGSGGGSMASNFTQFVLVDNGGTGDVTVAPSNFANGIAEWISSNSRSQAYKVTCSVRQSSAQNRKY | |
| | TIKVEVPKGAWRSYLNMELTIPIFATNSDCELIVKAMQGLLKDGNPIPSAIAANSGIYGGSGGSMASNFTQFVLVDNGGTGDVTVAPSNFANGIAEWISSNS | |
| | RSQAYKVTCSVRQSSAQNRKYTIKVEVPKGAWRSYLNMELTIPIFATNSDCELIVKAMQGLLKDGNPIPSAIAANSGIYGSSGSSGSSGSSGSSGSSDKKYSIGL | |
| | DIGTNSVGWAVITDEYKVPSKKFKVLGNTDRHSIKKNLIGALLFDSGETAEATRLKRTARRRYTRRKNRICYLQEIFSNEMAKVDDSFFHRLEESFLVEEDKKHE | |
| | RHPIFGNIVDEVAYHEKYPTIYHLRKKLVDSTDKADLRLIYLALAHMIKFRGHFLIEGDLNPDNSDVDKLFIQLVQTYNQLFEENPINASGVDAKAILSARLSKSR | |
| | RLENLIAQLPGEKKNGLFGNLIALSLGLTPNFKSNFDLAEDAKLQLSKDTYDDDLDNLLAQIGDQYADLFLAAKNLSDAILLSDILRVNTEITKAPLSASMIKRYDE | |
| | HHQDLTLLKALVRQQLPEKYKEIFFDQSKNGYAGYIDGGASQEEFYKFIKPILEKMDGTEELLVKLNREDLLRKQRTFDNGSIPHQIHLGELHAILRRQEDFYPFL | |
| | KDNREKIEKILTFRIPYYVGPLARGNSRFAWMTRKSEETITPWNFEEVVDKGASAQSFIERMTNFDKNLPNEKVLPKHSLLYEYFTVYNELTKVKYVTEGMRKP | |
| | AFLSGEQKKAIVDLLFKTNRKVTVKQLKEDYFKKIECFDSVEISGVEDRFNASLGTYHDLLKIIKDKDFLDNEENEDILEDIVLTLTLFEDREMIEERLKTYAHLFDD | |
| | KVMKQLKRRRYTGWGRLSRKLINGIRDKQSGKTILDFLKSDGFANRNFMQLIHDDSLTFKEDIQKAQVSGQGDSLHEHIANLAGSPAIKKGILQTVKVVDELV | |
| | KVMGRHKPENIVIEMARENQTTQKGQKNSRERMKRIEEGIKELGSQILKEHPVENTQLQNEKLYLYYLQNGRDMYVDQELDINRLSDYDVDHIVPQSFLKD | |
| | DSIDNKVLTRSDKARGKSDNVPSEEVVKKMKNYWRQLLNAKLITQRKFDNLTKAERGGLSELDKAGFIKRQLVETRQITKHVAQILDSRMNTKYDENDKLIRE | |
| | VKVITLKSKLVSDFRKDFQFYKVREINNYHHAHDAYLNAVVGTALIKKYPKLESEFVYGDYKVYDVRKMIAKSEQEIGKATAKYFFYSNIMNFFKTEITLANGEIR | |
| | KRPLIETNGETGEIVWDKGRDFATVRKVLSMPQVNIVKKTEVQTGGFSKESILPKRNSDKLIARKKDWDPKKYGGFDSPTVAYSVLVVAKVEKGKSKKLKSVK | |
| | ELLGITIMERSSFEKNPIDFLEAKGYKEVKKDLIIKLPKYSLFELENGRKRMLASAGELQKGNELALPSKYVNFLYLASHYEKLKGSPEDNEQKQLFVEQHKHYLD | |
| | EIIEQISEFSKRVILADANLDKVLSAYNKHRDKPIREQAENIIHLFTLTNLGAPAAFKYFDTTIDRKRYTSTKEVLDATLIHQSITGLYETRIDLSQLGGDKRTADGSE | |
| | FESPKKKAKVE | |
| PL12132 | MPAAKRVKLDGGTAPLEEEYRLFLEAPIQNVTLLEQWKREIPKVWAEINPPGLASTQAPIHVQLLSTALPVRVRQYPITLEAKRSLRETIRKFRAAGILRPVHSP | 16,171 |
| | WNTPLLPVRKSGTSEYRMVQDLREVNKRVETIHPTVPNPYTLLSLLPPDRIWYSVLDLKDAFFCIPLAPESQLIFAFEWADAEEGESGQLTWTRLPQGFKNSPT | |
| | LFNEALNRDLQGFRLDHPSVSLLQYVDDLLIAADTQAACLSATRDLLMTLAELGYRVSGKKAQLCQEEVTYLGFKIHKGSRSLSNSRTQAILQIPVPKTKRQVRE | |
| | FLGKIGYCRLFIPGFAELAQPLYAATRPGNDPLVWGEKEEEAFQSLKLALTQPPALALPSLDKPFQLFVEETSGAAKGVLTQALGPWKRPVAYLSKRLDPVAAG | |
| | WPRCLRAIAAAALLTREASKLTFGQDIEITSSHNLESLLRSPPDKWLTNARITQYQVLLLDPPRVRFKQTAALNPATLLPETDDTLPIHHCLDTLDSLTSTRPDLT | |
| | DQPLAQAEATLFTDGSSYIRDGKRYAGAAVVTLDSVIWAEPLPIGTSAQKAELIALTKALEWSKDKSVNIYTDSRYAFATLHVHGMIYRERGWLTAGGKAIKN | |
| | APEILALLTAVWLPKRVAVMHCKGHQKDDAPTSTGNRRADEVAREVAIRPLSTQATISSGGSSGGSSGSETPGTSESATPESSGGSSGGSSMASNFTQFVLV | |
| | DNGGTGDVTVAPSNFANGIAEWISSNSRSQAYKVTCSVRQSSAQNRKYTIKVEVPKGAWRSYLNMELTIPIFATNSDCELIVKAMQGLLKDGNPIPSAIAANS | |
| | GIYGGSGGSMASNFTQFVLVDNGGTGDVTVAPSNFANGIAEWISSNSRSQAYKVTCSVRQSSAQNRKYTIKVEVPKGAWRSYLNMELTIPIFATNSDCELIV | |
| | KAMQGLLKDGNPIPSAIAANSGIYGGGSGGGSGGGSGGGSMASNFTQFVLVDNGGTGDVTVAPSNFANGIAEWISSNSRSQAYKVTCSVRQSSAQNRKY | |
| | TIKVEVPKGAWRSYLNMELTIPIFATNSDCELIVKAMQGLLKDGNPIPSAIAANSGIYGGSGGSMASNFTQFVLVDNGGTGDVTVAPSNFANGIAEWISSNS | |
| | RSQAYKVTCSVRQSSAQNRKYTIKVEVPKGAWRSYLNMELTIPIFATNSDCELIVKAMQGLLKDGNPIPSAIAANSGIYGSSGGGEAAAKDKKYSIGLDIGTNS | |
| | VGWAVITDEYKVPSKKFKVLGNTDRHSIKKNLIGALLFDSGETAEATRLKRTARRRYTRRKNRICYLQEIFSNEMAKVDDSFFHRLEESFLVEEDKKHERHPIFG | |
| | NIVDEVAYHEKYPTIYHLRKKLVDSTDKADLRLIYLALAHMIKFRGHFLIEGDLNPDNSDVDKLFIQLVQTYNQLFEENPINASGVDAKAILSARLSKSRRLENLIA | |
| | QLPGEKKNGLFGNLIALSLGLTPNFKSNFDLAEDAKLQLSKDTYDDDLDNLLAQIGDQYADLFLAAKNLSDAILLSDILRVNTEITKAPLSASMIKRYDEHHQDL | |
| | TLLKALVRQQLPEKYKEIFFDQSKNGYAGYIDGGASQEEFYKFIKPILEKMDGTEELLVKLNREDLLRKQRTFDNGSIPHQIHLGELHAILRRQEDFYPFLKDNRE | |
| | KIEKILTFRIPYYVGPLARGNSRFAWMTRKSEETITPWNFEEVVDKGASAQSFIERMTNFDKNLPNEKVLPKHSLLYEYFTVYNELTKVKYVTEGMRKPAFLSG | |
| | EQKKAIVDLLFKTNRKVTVKQLKEDYFKKIECFDSVEISGVEDRFNASLGTYHDLLKIIKDKDFLDNEENEDILEDIVLTLTLFEDREMIEERLKTYAHLFDDKVMK | |
| | QLKRRRYTGWGRLSRKLINGIRDKQSGKTILDFLKSDGFANRNFMQLIHDDSLTFKEDIQKAQVSGQGDSLHEHIANLAGSPAIKKGILQTVKVVDELVKVMG | |
| | RHKPENIVIEMARENQTTQKGQKNSRERMKRIEEGIKELGSQILKEHPVENTQLQNEKLYLYYLQNGRDMYVDQELDINRLSDYDVDHIVPQSFLKDDSIDNK | |
| | VLTRSDKARGKSDNVPSEEVVKKMKNYWRQLLNAKLITQRKFDNLTKAERGGLSELDKAGFIKRQLVETRQITKHVAQILDSRMNTKYDENDKLIREVKVITL | |
| | KSKLVSDFRKDFQFYKVREINNYHHAHDAYLNAVVGTALIKKYPKLESEFVYGDYKVYDVRKMIAKSEQEIGKATAKYFFYSNIMNFFKTEITLANGEIRKRPLIE | |
| | TNGETGEIVWDKGRDFATVRKVLSMPQVNIVKKTEVQTGGFSKESILPKRNSDKLIARKKDWDPKKYGGFDSPTVAYSVLVVAKVEKGKSKKLKSVKELLGITI | |
| | MERSSFEKNPIDFLEAKGYKEVKKDLIIKLPKYSLFELENGRKRMLASAGELQKGNELALPSKYVNFLYLASHYEKLKGSPEDNEQKQLFVEQHKHYLDEIIEQISE | |
| | FSKRVILADANLDKVLSAYNKHRDKPIREQAENIIHLFTLTNLGAPAAFKYFDTTIDRKRYTSTKEVLDATLIHQSITGLYETRIDLSQLGGDKRTADGSEFESPKKK | |
| | AKVE | |
| PL12133 | MPAAKRVKLDGGTAPLEEEYRLFLEAPIQNVTLLEQWKREIPKVWAEINPPGLASTQAPIHVQLLSTALPVRVRQYPITLEAKRSLRETIRKFRAAGILRPVHSP | 16,172 |
| | WNTPLLPVRKSGTSEYRMVQDLREVNKRVETIHPTVPNPYTLLSLLPPDRIWYSVLDLKDAFFCIPLAPESQLIFAFEWADAEEGESGQLTWTRLPQGFKNSPT | |
| | LFNEALNRDLQGFRLDHPSVSLLQYVDDLLIAADTQAACLSATRDLLMTLAELGYRVSGKKAQLCQEEVTYLGFKIHKGSRSLSNSRTQAILQIPVPKTKRQVRE | |
| | FLGKIGYCRLFIPGFAELAQPLYAATRPGNDPLVWGEKEEEAFQSLKLALTQPPALALPSLDKPFQLFVEETSGAAKGVLTQALGPWKRPVAYLSKRLDPVAAG | |
| | WPRCLRAIAAAALLTREASKLTFGQDIEITSSHNLESLLRSPPDKWLTNARITQYQVLLLDPPRVRFKQTAALNPATLLPETDDTLPIHHCLDTLDSLTSTRPDLT | |
| | DQPLAQAEATLFTDGSSYIRDGKRYAGAAVVTLDSVIWAEPLPIGTSAQKAELIALTKALEWSKDKSVNIYTDSRYAFATLHVHGMIYRERGWLTAGGKAIKN | |
| | APEILALLTAVWLPKRVAVMHCKGHQKDDAPTSTGNRRADEVAREVAIRPLSTQATISGSSGSSGSSGSSGSSGSSMASNFTQFVLVDNGGTGDVTVAPSN | |
| | FANGIAEWISSNSRSQAYKVTCSVRQSSAQNRKYTIKVEVPKGAWRSYLNMELTIPIFATNSDCELIVKAMQGLLKDGNPIPSAIAANSGIYAEAAAKEAAAKE | |
| | AAAKEAAAKALEAEAAAKEAAAKEAAAKEAAAKADKKYSIGLDIGTNSVGWAVITDEYKVPSKKFKVLGNTDRHSIKKNLIGALLFDSGETAEATRLKRTARRR | |
| | YTRRKNRICYLQEIFSNEMAKVDDSFFHRLEESFLVEEDKKHERHPIFGNIVDEVAYHEKYPTIYHLRKKLVDSTDKADLRLIYLALAHMIKFRGHFLIEGDLNPD | |
| | NSDVDKLFIQLVQTYNQLFEENPINASGVDAKAILSARLSKSRRLENLIAQLPGEKKNGLFGNLIALSLGLTPNFKSNFDLAEDAKLQLSKDTYDDDLDNLLAQIG | |
| | DQYADLFLAAKNLSDAILLSDILRVNTEITKAPLSASMIKRYDEHHQDLTLLKALVRQQLPEKYKEIFFDQSKNGYAGYIDGGASQEEFYKFIKPILEKMDGTEELL | |
| | VKLNREDLLRKQRTFDNGSIPHQIHLGELHAILRRQEDFYPFLKDNREKIEKILTFRIPYYVGPLARGNSRFAWMTRKSEETITPWNFEEVVDKGASAQSFIERM | |
| | TNFDKNLPNEKVLPKHSLLYEYFTVYNELTKVKYVTEGMRKPAFLSGEQKKAIVDLLFKTNRKVTVKQLKEDYFKKIECFDSVEISGVEDRFNASLGTYHDLLKIIK | |
| | DKDFLDNEENEDILEDIVLTLTLFEDREMIEERLKTYAHLFDDKVMKQLKRRRYTGWGRLSRKLINGIRDKQSGKTILDFLKSDGFANRNFMQLIHDDSLTFKE | |
| | DIQKAQVSGQGDSLHEHIANLAGSPAIKKGILQTVKVVDELVKVMGRHKPENIVIEMARENQTTQKGQKNSRERMKRIEEGIKELGSQILKEHPVENTQLQN | |
| | EKLYLYYLQNGRDMYVDQELDINRLSDYDVDHIVPQSFLKDDSIDNKVLTRSDKARGKSDNVPSEEVVKKMKNYWRQLLNAKLITQRKFDNLTKAERGGLSE | |
| | LDKAGFIKRQLVETRQITKHVAQILDSRMNTKYDENDKLIREVKVITLKSKLVSDFRKDFQFYKVREINNYHHAHDAYLNAVVGTALIKKYPKLESEFVYGDYKV | |
| | YDVRKMIAKSEQEIGKATAKYFFYSNIMNFFKTEITLANGEIRKRPLIETNGETGEIVWDKGRDFATVRKVLSMPQVNIVKKTEVQTGGFSKESILPKRNSDKLI | |
| | ARKKDWDPKKYGGFDSPTVAYSVLVVAKVEKGKSKKLKSVKELLGITIMERSSFEKNPIDFLEAKGYKEVKKDLIIKLPKYSLFELENGRKRMLASAGELQKGNEL | |
| | ALPSKYVNFLYLASHYEKLKGSPEDNEQKQLFVEQHKHYLDEIIEQISEFSKRVILADANLDKVLSAYNKHRDKPIREQAENIIHLFTLTNLGAPAAFKYFDTTIDR | |
| | KRYTSTKEVLDATLIHQSITGLYETRIDLSQLGGDKRTADGSEFESPKKKAKVE | |
| PL12134 | MPAAKRVKLDGGTAPLEEEYRLFLEAPIQNVTLLEQWKREIPKVWAEINPPGLASTQAPIHVQLLSTALPVRVRQYPITLEAKRSLRETIRKFRAAGILRPVHSP | 16,173 |
| | WNTPLLPVRKSGTSEYRMVQDLREVNKRVETIHPTVPNPYTLLSLLPPDRIWYSVLDLKDAFFCIPLAPESQLIFAFEWADAEEGESGQLTWTRLPQGFKNSPT | |
| | LFNEALNRDLQGFRLDHPSVSLLQYVDDLLIAADTQAACLSATRDLLMTLAELGYRVSGKKAQLCQEEVTYLGFKIHKGSRSLSNSRTQAILQIPVPKTKRQVRE | |
| | FLGKIGYCRLFIPGFAELAQPLYAATRPGNDPLVWGEKEEEAFQSLKLALTQPPALALPSLDKPFQLFVEETSGAAKGVLTQALGPWKRPVAYLSKRLDPVAAG | |
| | WPRCLRAIAAAALLTREASKLTFGQDIEITSSHNLESLLRSPPDKWLTNARITQYQVLLLDPPRVRFKQTAALNPATLLPETDDTLPIHHCLDTLDSLTSTRPDLT | |
| | DQPLAQAEATLFTDGSSYIRDGKRYAGAAVVTLDSVIWAEPLPIGTSAQKAELIALTKALEWSKDKSVNIYTDSRYAFATLHVHGMIYRERGWLTAGGKAIKN | |
| | APEILALLTAVWLPKRVAVMHCKGHQKDDAPTSTGNRRADEVAREVAIRPLSTQATISGSSGSSGSSGSSGSSGSSMASNFTQFVLVDNGGTGDVTVAPSN | |
| | FANGIAEWISSNSRSQAYKVTCSVRQSSAQNRKYTIKVEVPKGAWRSYLNMELTIPIFATNSDCELIVKAMQGLLKDGNPIPSAIAANSGIYSGGSSGGSSGSE | |
| | TPGTSESATPESSGGSSGGSSDKKYSIGLDIGTNSVGWAVITDEYKVPSKKFKVLGNTDRHSIKKNLIGALLFDSGETAEATRLKRTARRRYTRRKNRICYLQEIFS | |
| | NEMAKVDDSFFHRLEESFLVEEDKKHERHPIFGNIVDEVAYHEKYPTIYHLRKKLVDSTDKADLRLIYLALAHMIKFRGHFLIEGDLNPDNSDVDKLFIQLVQTY | |
| | NQLFEENPINASGVDAKAILSARLSKSRRLENLIAQLPGEKKNGLFGNLIALSLGLTPNFKSNFDLAEDAKLQLSKDTYDDDLDNLLAQIGDQYADLFLAAKNLS | |
| | DAILLSDILRVNTEITKAPLSASMIKRYDEHHQDLTLLKALVRQQLPEKYKEIFFDQSKNGYAGYIDGGASQEEFYKFIKPILEKMDGTEELLVKLNREDLLRKQRT | |
| | FDNGSIPHQIHLGELHAILRRQEDFYPFLKDNREKIEKILTFRIPYYVGPLARGNSRFAWMTRKSEETITPWNFEEVVDKGASAQSFIERMTNFDKNLPNEKVLP | |
| | KHSLLYEYFTVYNELTKVKYVTEGMRKPAFLSGEQKKAIVDLLFKTNRKVTVKQLKEDYFKKIECFDSVEISGVEDRFNASLGTYHDLLKIIKDKDFLDNEENEDIL | |
| | EDIVLTLTLFEDREMIEERLKTYAHLFDDKVMKQLKRRRYTGWGRLSRKLINGIRDKQSGKTILDFLKSDGFANRNFMQLIHDDSLTFKEDIQKAQVSGQGDSL | |
| | HEHIANLAGSPAIKKGILQTVKVVDELVKVMGRHKPENIVIEMARENQTTQKGQKNSRERMKRIEEGIKELGSQILKEHPVENTQLQNEKLYLYYLQNGRDM | |
| | YVDQELDINRLSDYDVDHIVPQSFLKDDSIDNKVLTRSDKARGKSDNVPSEEVVKKMKNYWRQLLNAKLITQRKFDNLTKAERGGLSELDKAGFIKRQLVETR | |
| | QITKHVAQILDSRMNTKYDENDKLIREVKVITLKSKLVSDFRKDFQFYKVREINNYHHAHDAYLNAVVGTALIKKYPKLESEFVYGDYKVYDVRKMIAKSEQEIG | |
| | KATAKYFFYSNIMNFFKTEITLANGEIRKRPLIETNGETGEIVWDKGRDFATVRKVLSMPQVNIVKKTEVQTGGFSKESILPKRNSDKLIARKKDWDPKKYGGF | |
| | DSPTVAYSVLVVAKVEKGKSKKLKSVKELLGITIMERSSFEKNPIDFLEAKGYKEVKKDLIIKLPKYSLFELENGRKRMLASAGELQKGNELALPSKYVNFLYLASH | |
| | YEKLKGSPEDNEQKQLFVEQHKHYLDEIIEQISEFSKRVILADANLDKVLSAYNKHRDKPIREQAENIIHLFTLTNLGAPAAFKYFDTTIDRKRYTSTKEVLDATLIH | |
| | QSITGLYETRIDLSQLGGDKRTADGSEFESPKKKAKVE | |
| PL12135 | MPAAKRVKLDGGTAPLEEEYRLFLEAPIQNVTLLEQWKREIPKVWAEINPPGLASTQAPIHVQLLSTALPVRVRQYPITLEAKRSLRETIRKFRAAGILRPVHSP | 16,174 |
| | WNTPLLPVRKSGTSEYRMVQDLREVNKRVETIHPTVPNPYTLLSLLPPDRIWYSVLDLKDAFFCIPLAPESQLIFAFEWADAEEGESGQLTWTRLPQGFKNSPT | |
| | LFNEALNRDLQGFRLDHPSVSLLQYVDDLLIAADTQAACLSATRDLLMTLAELGYRVSGKKAQLCQEEVTYLGFKIHKGSRSLSNSRTQAILQIPVPKTKRQVRE | |
| | FLGKIGYCRLFIPGFAELAQPLYAATRPGNDPLVWGEKEEEAFQSLKLALTQPPALALPSLDKPFQLFVEETSGAAKGVLTQALGPWKRPVAYLSKRLDPVAAG | |
| | WPRCLRAIAAAALLTREASKLTFGQDIEITSSHNLESLLRSPPDKWLTNARITQYQVLLLDPPRVRFKQTAALNPATLLPETDDTLPIHHCLDTLDSLTSTRPDLT | |
| | DQPLAQAEATLFTDGSSYIRDGKRYAGAAVVTLDSVIWAEPLPIGTSAQKAELIALTKALEWSKDKSVNIYTDSRYAFATLHVHGMIYRERGWLTAGGKAIKN | |
| | APEILALLTAVWLPKRVAVMHCKGHQKDDAPTSTGNRRADEVAREVAIRPLSTQATISGSSGSSGSSGSSGSSGSSMASNFTQFVLVDNGGTGDVTVAPSN | |
| | FANGIAEWISSNSRSQAYKVTCSVRQSSAQNRKYTIKVEVPKGAWRSYLNMELTIPIFATNSDCELIVKAMQGLLKDGNPIPSAIAANSGIYGSSGSSGSSGSS | |
| | GSSGSSDKKYSIGLDIGTNSVGWAVITDEYKVPSKKFKVLGNTDRHSIKKNLIGALLFDSGETAEATRLKRTARRRYTRRKNRICYLQEIFSNEMAKVDDSFFHRL | |
| | EESFLVEEDKKHERHPIFGNIVDEVAYHEKYPTIYHLRKKLVDSTDKADLRLIYLALAHMIKFRGHFLIEGDLNPDNSDVDKLFIQLVQTYNQLFEENPINASGVD | |
| | AKAILSARLSKSRRLENLIAQLPGEKKNGLFGNLIALSLGLTPNFKSNFDLAEDAKLQLSKDTYDDDLDNLLAQIGDQYADLFLAAKNLSDAILLSDILRVNTEITK | |
| | APLSASMIKRYDEHHQDLTLLKALVRQQLPEKYKEIFFDQSKNGYAGYIDGGASQEEFYKFIKPILEKMDGTEELLVKLNREDLLRKQRTFDNGSIPHQIHLGEL | |
| | HAILRRQEDFYPFLKDNREKIEKILTFRIPYYVGPLARGNSRFAWMTRKSEETITPWNFEEVVDKGASAQSFIERMTNFDKNLPNEKVLPKHSLLYEYFTVYNEL | |
| | TKVKYVTEGMRKPAFLSGEQKKAIVDLLFKTNRKVTVKQLKEDYFKKIECFDSVEISGVEDRFNASLGTYHDLLKIIKDKDFLDNEENEDILEDIVLTLTLFEDREM | |
| | IEERLKTYAHLFDDKVMKQLKRRRYTGWGRLSRKLINGIRDKQSGKTILDFLKSDGFANRNFMQLIHDDSLTFKEDIQKAQVSGQGDSLHEHIANLAGSPAIKK | |
| | GILQTVKVVDELVKVMGRHKPENIVIEMARENQTTQKGQKNSRERMKRIEEGIKELGSQILKEHPVENTQLQNEKLYLYYLQNGRDMYVDQELDINRLSDYD | |
| | VDHIVPQSFLKDDSIDNKVLTRSDKARGKSDNVPSEEVVKKMKNYWRQLLNAKLITQRKFDNLTKAERGGLSELDKAGFIKRQLVETRQITKHVAQILDSRM | |
| | NTKYDENDKLIREVKVITLKSKLVSDFRKDFQFYKVREINNYHHAHDAYLNAVVGTALIKKYPKLESEFVYGDYKVYDVRKMIAKSEQEIGKATAKYFFYSNIMN | |
| | FFKTEITLANGEIRKRPLIETNGETGEIVWDKGRDFATVRKVLSMPQVNIVKKTEVQTGGFSKESILPKRNSDKLIARKKDWDPKKYGGFDSPTVAYSVLVVAK | |
| | VEKGKSKKLKSVKELLGITIMERSSFEKNPIDFLEAKGYKEVKKDLIIKLPKYSLFELENGRKRMLASAGELQKGNELALPSKYVNFLYLASHYEKLKGSPEDNEQK | |
| | QLFVEQHKHYLDEIIEQISEFSKRVILADANLDKVLSAYNKHRDKPIREQAENIIHLFTLTNLGAPAAFKYFDTTIDRKRYTSTKEVLDATLIHQSITGLYETRIDLSQ | |
| | LGGDKRTADGSEFESPKKKAKVE | |
| PL12136 | MPAAKRVKLDGGTAPLEEEYRLFLEAPIQNVTLLEQWKREIPKVWAEINPPGLASTQAPIHVQLLSTALPVRVRQYPITLEAKRSLRETIRKFRAAGILRPVHSP | 16,175 |
| | WNTPLLPVRKSGTSEYRMVQDLREVNKRVETIHPTVPNPYTLLSLLPPDRIWYSVLDLKDAFFCIPLAPESQLIFAFEWADAEEGESGQLTWTRLPQGFKNSPT | |
| | LFNEALNRDLQGFRLDHPSVSLLQYVDDLLIAADTQAACLSATRDLLMTLAELGYRVSGKKAQLCQEEVTYLGFKIHKGSRSLSNSRTQAILQIPVPKTKRQVRE | |
| | FLGKIGYCRLFIPGFAELAQPLYAATRPGNDPLVWGEKEEEAFQSLKLALTQPPALALPSLDKPFQLFVEETSGAAKGVLTQALGPWKRPVAYLSKRLDPVAAG | |
| | WPRCLRAIAAAALLTREASKLTFGQDIEITSSHNLESLLRSPPDKWLTNARITQYQVLLLDPPRVRFKQTAALNPATLLPETDDTLPIHHCLDTLDSLTSTRPDLT | |
| | DQPLAQAEATLFTDGSSYIRDGKRYAGAAVVTLDSVIWAEPLPIGTSAQKAELIALTKALEWSKDKSVNIYTDSRYAFATLHVHGMIYRERGWLTAGGKAIKN | |
| | APEILALLTAVWLPKRVAVMHCKGHQKDDAPTSTGNRRADEVAREVAIRPLSTQATISGSSGSSGSSGSSGSSGSSMASNFTQFVLVDNGGTGDVTVAPSN | |
| | FANGIAEWISSNSRSQAYKVTCSVRQSSAQNRKYTIKVEVPKGAWRSYLNMELTIPIFATNSDCELIVKAMQGLLKDGNPIPSAIAANSGIYGSSGGGEAAAK | |
| | DKKYSIGLDIGTNSVGWAVITDEYKVPSKKFKVLGNTDRHSIKKNLIGALLFDSGETAEATRLKRTARRRYTRRKNRICYLQEIFSNEMAKVDDSFFHRLEESFLV | |
| | EEDKKHERHPIFGNIVDEVAYHEKYPTIYHLRKKLVDSTDKADLRLIYLALAHMIKFRGHFLIEGDLNPDNSDVDKLFIQLVQTYNQLFEENPINASGVDAKAILS | |
| | ARLSKSRRLENLIAQLPGEKKNGLFGNLIALSLGLTPNFKSNFDLAEDAKLQLSKDTYDDDLDNLLAQIGDQYADLFLAAKNLSDAILLSDILRVNTEITKAPLSAS | |
| | MIKRYDEHHQDLTLLKALVRQQLPEKYKEIFFDQSKNGYAGYIDGGASQEEFYKFIKPILEKMDGTEELLVKLNREDLLRKQRTFDNGSIPHQIHLGELHAILRR | |
| | QEDFYPFLKDNREKIEKILTFRIPYYVGPLARGNSRFAWMTRKSEETITPWNFEEVVDKGASAQSFIERMTNFDKNLPNEKVLPKHSLLYEYFTVYNELTKVKYV | |
| | TEGMRKPAFLSGEQKKAIVDLLFKTNRKVTVKQLKEDYFKKIECFDSVEISGVEDRFNASLGTYHDLLKIIKDKDFLDNEENEDILEDIVLTLTLFEDREMIEERLKT | |
| | YAHLFDDKVMKQLKRRRYTGWGRLSRKLINGIRDKQSGKTILDFLKSDGFANRNFMQLIHDDSLTFKEDIQKAQVSGQGDSLHEHIANLAGSPAIKKGILQTV | |
| | KVVDELVKVMGRHKPENIVIEMARENQTTQKGQKNSRERMKRIEEGIKELGSQILKEHPVENTQLQNEKLYLYYLQNGRDMYVDQELDINRLSDYDVDHIV | |
| | PQSFLKDDSIDNKVLTRSDKARGKSDNVPSEEVVKKMKNYWRQLLNAKLITQRKFDNLTKAERGGLSELDKAGFIKRQLVETRQITKHVAQILDSRMNTKYDE | |
| | NDKLIREVKVITLKSKLVSDFRKDFQFYKVREINNYHHAHDAYLNAVVGTALIKKYPKLESEFVYGDYKVYDVRKMIAKSEQEIGKATAKYFFYSNIMNFFKTEIT | |
| | LANGEIRKRPLIETNGETGEIVWDKGRDFATVRKVLSMPQVNIVKKTEVQTGGFSKESILPKRNSDKLIARKKDWDPKKYGGFDSPTVAYSVLVVAKVEKGKS | |
| | KKLKSVKELLGITIMERSSFEKNPIDFLEAKGYKEVKKDLIIKLPKYSLFELENGRKRMLASAGELQKGNELALPSKYVNFLYLASHYEKLKGSPEDNEQKQLFVEQ | |
| | HKHYLDEIIEQISEFSKRVILADANLDKVLSAYNKHRDKPIREQAENIIHLFTLTNLGAPAAFKYFDTTIDRKRYTSTKEVLDATLIHQSITGLYETRIDLSQLGGDKR | |
| | TADGSEFESPKKKAKVE | |
| PL12137 | MPAAKRVKLDGGTAPLEEEYRLFLEAPIQNVTLLEQWKREIPKVWAEINPPGLASTQAPIHVQLLSTALPVRVRQYPITLEAKRSLRETIRKFRAAGILRPVHSP | 16,176 |
| | WNTPLLPVRKSGTSEYRMVQDLREVNKRVETIHPTVPNPYTLLSLLPPDRIWYSVLDLKDAFFCIPLAPESQLIFAFEWADAEEGESGQLTWTRLPQGFKNSPT | |
| | LFNEALNRDLQGFRLDHPSVSLLQYVDDLLIAADTQAACLSATRDLLMTLAELGYRVSGKKAQLCQEEVTYLGFKIHKGSRSLSNSRTQAILQIPVPKTKRQVRE | |
| | FLGKIGYCRLFIPGFAELAQPLYAATRPGNDPLVWGEKEEEAFQSLKLALTQPPALALPSLDKPFQLFVEETSGAAKGVLTQALGPWKRPVAYLSKRLDPVAAG | |
| | WPRCLRAIAAAALLTREASKLTFGQDIEITSSHNLESLLRSPPDKWLTNARITQYQVLLLDPPRVRFKQTAALNPATLLPETDDTLPIHHCLDTLDSLTSTRPDLT | |
| | DQPLAQAEATLFTDGSSYIRDGKRYAGAAVVTLDSVIWAEPLPIGTSAQKAELIALTKALEWSKDKSVNIYTDSRYAFATLHVHGMIYRERGWLTAGGKAIKN | |
| | APEILALLTAVWLPKRVAVMHCKGHQKDDAPTSTGNRRADEVAREVAIRPLSTQATISGSSGSSGSSGSSGSSGSSMASNFTQFVLVDNGGTGDVTVAPSN | |
| | FANGIAEWISSNSRSQAYKVTCSVRQSSAQNRKYTIKVEVPKGAWRSYLNMELTIPIFATNSDCELIVKAMQGLLKDGNPIPSAIAANSGIYGGSGGSMASNF | |
| | TQFVLVDNGGTGDVTVAPSNFANGIAEWISSNSRSQAYKVTCSVRQSSAQNRKYTIKVEVPKGAWRSYLNMELTIPIFATNSDCELIVKAMQGLLKDGNPIP | |
| | SAIAANSGIYAEAAAKEAAAKEAAAKEAAAKALEAEAAAKEAAAKEAAAKEAAAKADKKYSIGLDIGTNSVGWAVITDEYKVPSKKFKVLGNTDRHSIKKNLIG | |
| | ALLFDSGETAEATRLKRTARRRYTRRKNRICYLQEIFSNEMAKVDDSFFHRLEESFLVEEDKKHERHPIFGNIVDEVAYHEKYPTIYHLRKKLVDSTDKADLRLIYL | |
| | ALAHMIKFRGHFLIEGDLNPDNSDVDKLFIQLVQTYNQLFEENPINASGVDAKAILSARLSKSRRLENLIAQLPGEKKNGLFGNLIALSLGLTPNFKSNFDLAED | |
| | AKLQLSKDTYDDDLDNLLAQIGDQYADLFLAAKNLSDAILLSDILRVNTEITKAPLSASMIKRYDEHHQDLTLLKALVRQQLPEKYKEIFFDQSKNGYAGYIDGG | |
| | ASQEEFYKFIKPILEKMDGTEELLVKLNREDLLRKQRTFDNGSIPHQIHLGELHAILRRQEDFYPFLKDNREKIEKILTFRIPYYVGPLARGNSRFAWMTRKSEETI | |
| | TPWNFEEVVDKGASAQSFIERMTNFDKNLPNEKVLPKHSLLYEYFTVYNELTKVKYVTEGMRKPAFLSGEQKKAIVDLLFKTNRKVTVKQLKEDYFKKIECFDS | |
| | VEISGVEDRFNASLGTYHDLLKIIKDKDFLDNEENEDILEDIVLTLTLFEDREMIEERLKTYAHLFDDKVMKQLKRRRYTGWGRLSRKLINGIRDKQSGKTILDFLK | |
| | SDGFANRNFMQLIHDDSLTFKEDIQKAQVSGQGDSLHEHIANLAGSPAIKKGILQTVKVVDELVKVMGRHKPENIVIEMARENQTTQKGQKNSRERMKRIE | |
| | EGIKELGSQILKEHPVENTQLQNEKLYLYYLQNGRDMYVDQELDINRLSDYDVDHIVPQSFLKDDSIDNKVLTRSDKARGKSDNVPSEEVVKKMKNYWRQLL | |
| | NAKLITQRKFDNLTKAERGGLSELDKAGFIKRQLVETRQITKHVAQILDSRMNTKYDENDKLIREVKVITLKSKLVSDFRKDFQFYKVREINNYHHAHDAYLNA | |
| | VVGTALIKKYPKLESEFVYGDYKVYDVRKMIAKSEQEIGKATAKYFFYSNIMNFFKTEITLANGEIRKRPLIETNGETGEIVWDKGRDFATVRKVLSMPQVNIVK | |
| | KTEVQTGGFSKESILPKRNSDKLIARKKDWDPKKYGGFDSPTVAYSVLVVAKVEKGKSKKLKSVKELLGITIMERSSFEKNPIDFLEAKGYKEVKKDLIIKLPKYSLF | |
| | ELENGRKRMLASAGELQKGNELALPSKYVNFLYLASHYEKLKGSPEDNEQKQLFVEQHKHYLDEIIEQISEFSKRVILADANLDKVLSAYNKHRDKPIREQAENII | |
| | HLFTLTNLGAPAAFKYFDTTIDRKRYTSTKEVLDATLIHQSITGLYETRIDLSQLGGDKRTADGSEFESPKKKAKVE | |
| PL12138 | MPAAKRVKLDGGTAPLEEEYRLFLEAPIQNVTLLEQWKREIPKVWAEINPPGLASTQAPIHVQLLSTALPVRVRQYPITLEAKRSLRETIRKFRAAGILRPVHSP | 16,177 |
| | WNTPLLPVRKSGTSEYRMVQDLREVNKRVETIHPTVPNPYTLLSLLPPDRIWYSVLDLKDAFFCIPLAPESQLIFAFEWADAEEGESGQLTWTRLPQGFKNSPT | |
| | LFNEALNRDLQGFRLDHPSVSLLQYVDDLLIAADTQAACLSATRDLLMTLAELGYRVSGKKAQLCQEEVTYLGFKIHKGSRSLSNSRTQAILQIPVPKTKRQVRE | |
| | FLGKIGYCRLFIPGFAELAQPLYAATRPGNDPLVWGEKEEEAFQSLKLALTQPPALALPSLDKPFQLFVEETSGAAKGVLTQALGPWKRPVAYLSKRLDPVAAG | |
| | WPRCLRAIAAAALLTREASKLTFGQDIEITSSHNLESLLRSPPDKWLTNARITQYQVLLLDPPRVRFKQTAALNPATLLPETDDTLPIHHCLDTLDSLTSTRPDLT | |
| | DQPLAQAEATLFTDGSSYIRDGKRYAGAAVVTLDSVIWAEPLPIGTSAQKAELIALTKALEWSKDKSVNIYTDSRYAFATLHVHGMIYRERGWLTAGGKAIKN | |
| | APEILALLTAVWLPKRVAVMHCKGHQKDDAPTSTGNRRADEVAREVAIRPLSTQATISGSSGSSGSSGSSGSSGSSMASNFTQFVLVDNGGTGDVTVAPSN | |
| | FANGIAEWISSNSRSQAYKVTCSVRQSSAQNRKYTIKVEVPKGAWRSYLNMELTIPIFATNSDCELIVKAMQGLLKDGNPIPSAIAANSGIYGGSGGSMASNF | |
| | TQFVLVDNGGTGDVTVAPSNFANGIAEWISSNSRSQAYKVTCSVRQSSAQNRKYTIKVEVPKGAWRSYLNMELTIPIFATNSDCELIVKAMQGLLKDGNPIP | |
| | SAIAANSGIYSGGSSGGSSGSETPGTSESATPESSGGSSGGSSDKKYSIGLDIGTNSVGWAVITDEYKVPSKKFKVLGNTDRHSIKKNLIGALLFDSGETAEATRL | |
| | KRTARRRYTRRKNRICYLQEIFSNEMAKVDDSFFHRLEESFLVEEDKKHERHPIFGNIVDEVAYHEKYPTIYHLRKKLVDSTDKADLRLIYLALAHMIKFRGHFLIE | |
| | GDLNPDNSDVDKLFIQLVQTYNQLFEENPINASGVDAKAILSARLSKSRRLENLIAQLPGEKKNGLFGNLIALSLGLTPNFKSNFDLAEDAKLQLSKDTYDDDLD | |
| | NLLAQIGDQYADLFLAAKNLSDAILLSDILRVNTEITKAPLSASMIKRYDEHHQDLTLLKALVRQQLPEKYKEIFFDQSKNGYAGYIDGGASQEEFYKFIKPILEK | |
| | MDGTEELLVKLNREDLLRKQRTFDNGSIPHQIHLGELHAILRRQEDFYPFLKDNREKIEKILTFRIPYYVGPLARGNSRFAWMTRKSEETITPWNFEEVVDKGA | |
| | SAQSFIERMTNFDKNLPNEKVLPKHSLLYEYFTVYNELTKVKYVTEGMRKPAFLSGEQKKAIVDLLFKTNRKVTVKQLKEDYFKKIECFDSVEISGVEDRFNASL | |
| | GTYHDLLKIIKDKDFLDNEENEDILEDIVLTLTLFEDREMIEERLKTYAHLFDDKVMKQLKRRRYTGWGRLSRKLINGIRDKQSGKTILDFLKSDGFANRNFMQLI | |
| | HDDSLTFKEDIQKAQVSGQGDSLHEHIANLAGSPAIKKGILQTVKVVDELVKVMGRHKPENIVIEMARENQTTQKGQKNSRERMKRIEEGIKELGSQILKEHP | |
| | VENTQLQNEKLYLYYLQNGRDMYVDQELDINRLSDYDVDHIVPQSFLKDDSIDNKVLTRSDKARGKSDNVPSEEVVKKMKNYWRQLLNAKLITQRKFDNLT | |
| | KAERGGLSELDKAGFIKRQLVETRQITKHVAQILDSRMNTKYDENDKLIREVKVITLKSKLVSDFRKDFQFYKVREINNYHHAHDAYLNAVVGTALIKKYPKLES | |
| | EFVYGDYKVYDVRKMIAKSEQEIGKATAKYFFYSNIMNFFKTEITLANGEIRKRPLIETNGETGEIVWDKGRDFATVRKVLSMPQVNIVKKTEVQTGGFSKESIL | |
| | PKRNSDKLIARKKDWDPKKYGGFDSPTVAYSVLVVAKVEKGKSKKLKSVKELLGITIMERSSFEKNPIDFLEAKGYKEVKKDLIIKLPKYSLFELENGRKRMLASA | |
| | GELQKGNELALPSKYVNFLYLASHYEKLKGSPEDNEQKQLFVEQHKHYLDEIIEQISEFSKRVILADANLDKVLSAYNKHRDKPIREQAENIIHLFTLTNLGAPAA | |
| | FKYFDTTIDRKRYTSTKEVLDATLIHQSITGLYETRIDLSQLGGDKRTADGSEFESPKKKAKVE | |
| PL12139 | MPAAKRVKLDGGTAPLEEEYRLFLEAPIQNVTLLEQWKREIPKVWAEINPPGLASTQAPIHVQLLSTALPVRVRQYPITLEAKRSLRETIRKFRAAGILRPVHSP | 16,178 |
| | WNTPLLPVRKSGTSEYRMVQDLREVNKRVETIHPTVPNPYTLLSLLPPDRIWYSVLDLKDAFFCIPLAPESQLIFAFEWADAEEGESGQLTWTRLPQGFKNSPT | |
| | LFNEALNRDLQGFRLDHPSVSLLQYVDDLLIAADTQAACLSATRDLLMTLAELGYRVSGKKAQLCQEEVTYLGFKIHKGSRSLSNSRTQAILQIPVPKTKRQVRE | |
| | FLGKIGYCRLFIPGFAELAQPLYAATRPGNDPLVWGEKEEEAFQSLKLALTQPPALALPSLDKPFQLFVEETSGAAKGVLTQALGPWKRPVAYLSKRLDPVAAG | |
| | WPRCLRAIAAAALLTREASKLTFGQDIEITSSHNLESLLRSPPDKWLTNARITQYQVLLLDPPRVRFKQTAALNPATLLPETDDTLPIHHCLDTLDSLTSTRPDLT | |
| | DQPLAQAEATLFTDGSSYIRDGKRYAGAAVVTLDSVIWAEPLPIGTSAQKAELIALTKALEWSKDKSVNIYTDSRYAFATLHVHGMIYRERGWLTAGGKAIKN | |
| | APEILALLTAVWLPKRVAVMHCKGHQKDDAPTSTGNRRADEVAREVAIRPLSTQATISGSSGSSGSSGSSGSSGSSMASNFTQFVLVDNGGTGDVTVAPSN | |
| | FANGIAEWISSNSRSQAYKVTCSVRQSSAQNRKYTIKVEVPKGAWRSYLNMELTIPIFATNSDCELIVKAMQGLLKDGNPIPSAIAANSGIYGGSGGSMASNF | |
| | TQFVLVDNGGTGDVTVAPSNFANGIAEWISSNSRSQAYKVTCSVRQSSAQNRKYTIKVEVPKGAWRSYLNMELTIPIFATNSDCELIVKAMQGLLKDGNPIP | |
| | SAIAANSGIYGSSGSSGSSGSSGSSGSSDKKYSIGLDIGTNSVGWAVITDEYKVPSKKFKVLGNTDRHSIKKNLIGALLFDSGETAEATRLKRTARRRYTRRKNRI | |
| | CYLQEIFSNEMAKVDDSFFHRLEESFLVEEDKKHERHPIFGNIVDEVAYHEKYPTIYHLRKKLVDSTDKADLRLIYLALAHMIKFRGHFLIEGDLNPDNSDVDKLF | |
| | IQLVQTYNQLFEENPINASGVDAKAILSARLSKSRRLENLIAQLPGEKKNGLFGNLIALSLGLTPNFKSNFDLAEDAKLQLSKDTYDDDLDNLLAQIGDQYADLFL | |
| | AAKNLSDAILLSDILRVNTEITKAPLSASMIKRYDEHHQDLTLLKALVRQQLPEKYKEIFFDQSKNGYAGYIDGGASQEEFYKFIKPILEKMDGTEELLVKLNREDL | |
| | LRKQRTFDNGSIPHQIHLGELHAILRRQEDFYPFLKDNREKIEKILTFRIPYYVGPLARGNSRFAWMTRKSEETITPWNFEEVVDKGASAQSFIERMTNFDKNL | |
| | PNEKVLPKHSLLYEYFTVYNELTKVKYVTEGMRKPAFLSGEQKKAIVDLLFKTNRKVTVKQLKEDYFKKIECFDSVEISGVEDRFNASLGTYHDLLKIIKDKDFLD | |
| | NEENEDILEDIVLTLTLFEDREMIEERLKTYAHLFDDKVMKQLKRRRYTGWGRLSRKLINGIRDKQSGKTILDFLKSDGFANRNFMQLIHDDSLTFKEDIQKAQ | |
| | VSGQGDSLHEHIANLAGSPAIKKGILQTVKVVDELVKVMGRHKPENIVIEMARENQTTQKGQKNSRERMKRIEEGIKELGSQILKEHPVENTQLQNEKLYLYY | |
| | LQNGRDMYVDQELDINRLSDYDVDHIVPQSFLKDDSIDNKVLTRSDKARGKSDNVPSEEVVKKMKNYWRQLLNAKLITQRKFDNLTKAERGGLSELDKAGFI | |
| | KRQLVETRQITKHVAQILDSRMNTKYDENDKLIREVKVITLKSKLVSDFRKDFQFYKVREINNYHHAHDAYLNAVVGTALIKKYPKLESEFVYGDYKVYDVRKM | |
| | IAKSEQEIGKATAKYFFYSNIMNFFKTEITLANGEIRKRPLIETNGETGEIVWDKGRDFATVRKVLSMPQVNIVKKTEVQTGGFSKESILPKRNSDKLIARKKDW | |
| | DPKKYGGFDSPTVAYSVLVVAKVEKGKSKKLKSVKELLGITIMERSSFEKNPIDFLEAKGYKEVKKDLIIKLPKYSLFELENGRKRMLASAGELQKGNELALPSKYV | |
| | NFLYLASHYEKLKGSPEDNEQKQLFVEQHKHYLDEIIEQISEFSKRVILADANLDKVLSAYNKHRDKPIREQAENIIHLFTLTNLGAPAAFKYFDTTIDRKRYTSTK | |
| | EVLDATLIHQSITGLYETRIDLSQLGGDKRTADGSEFESPKKKAKVE | |
| PL12140 | MPAAKRVKLDGGTAPLEEEYRLFLEAPIQNVTLLEQWKREIPKVWAEINPPGLASTQAPIHVQLLSTALPVRVRQYPITLEAKRSLRETIRKFRAAGILRPVHSP | 16,179 |
| | WNTPLLPVRKSGTSEYRMVQDLREVNKRVETIHPTVPNPYTLLSLLPPDRIWYSVLDLKDAFFCIPLAPESQLIFAFEWADAEEGESGQLTWTRLPQGFKNSPT | |
| | LFNEALNRDLQGFRLDHPSVSLLQYVDDLLIAADTQAACLSATRDLLMTLAELGYRVSGKKAQLCQEEVTYLGFKIHKGSRSLSNSRTQAILQIPVPKTKRQVRE | |
| | FLGKIGYCRLFIPGFAELAQPLYAATRPGNDPLVWGEKEEEAFQSLKLALTQPPALALPSLDKPFQLFVEETSGAAKGVLTQALGPWKRPVAYLSKRLDPVAAG | |
| | WPRCLRAIAAAALLTREASKLTFGQDIEITSSHNLESLLRSPPDKWLTNARITQYQVLLLDPPRVRFKQTAALNPATLLPETDDTLPIHHCLDTLDSLTSTRPDLT | |
| | DQPLAQAEATLFTDGSSYIRDGKRYAGAAVVTLDSVIWAEPLPIGTSAQKAELIALTKALEWSKDKSVNIYTDSRYAFATLHVHGMIYRERGWLTAGGKAIKN | |
| | APEILALLTAVWLPKRVAVMHCKGHQKDDAPTSTGNRRADEVAREVAIRPLSTQATISGSSGSSGSSGSSGSSGSSMASNFTQFVLVDNGGTGDVTVAPSN | |
| | FANGIAEWISSNSRSQAYKVTCSVRQSSAQNRKYTIKVEVPKGAWRSYLNMELTIPIFATNSDCELIVKAMQGLLKDGNPIPSAIAANSGIYGGSGGSMASNF | |
| | TQFVLVDNGGTGDVTVAPSNFANGIAEWISSNSRSQAYKVTCSVRQSSAQNRKYTIKVEVPKGAWRSYLNMELTIPIFATNSDCELIVKAMQGLLKDGNPIP | |
| | SAIAANSGIYGSSGGGEAAAKDKKYSIGLDIGTNSVGWAVITDEYKVPSKKFKVLGNTDRHSIKKNLIGALLFDSGETAEATRLKRTARRRYTRRKNRICYLQEIF | |
| | SNEMAKVDDSFFHRLEESFLVEEDKKHERHPIFGNIVDEVAYHEKYPTIYHLRKKLVDSTDKADLRLIYLALAHMIKFRGHFLIEGDLNPDNSDVDKLFIQLVQT | |
| | YNQLFEENPINASGVDAKAILSARLSKSRRLENLIAQLPGEKKNGLFGNLIALSLGLTPNFKSNFDLAEDAKLQLSKDTYDDDLDNLLAQIGDQYADLFLAAKNL | |
| | SDAILLSDILRVNTEITKAPLSASMIKRYDEHHQDLTLLKALVRQQLPEKYKEIFFDQSKNGYAGYIDGGASQEEFYKFIKPILEKMDGTEELLVKLNREDLLRKQR | |
| | TFDNGSIPHQIHLGELHAILRRQEDFYPFLKDNREKIEKILTFRIPYYVGPLARGNSRFAWMTRKSEETITPWNFEEVVDKGASAQSFIERMTNFDKNLPNEKVL | |
| | PKHSLLYEYFTVYNELTKVKYVTEGMRKPAFLSGEQKKAIVDLLFKTNRKVTVKQLKEDYFKKIECFDSVEISGVEDRFNASLGTYHDLLKIIKDKDFLDNEENEDI | |
| | LEDIVLTLTLFEDREMIEERLKTYAHLFDDKVMKQLKRRRYTGWGRLSRKLINGIRDKQSGKTILDFLKSDGFANRNFMQLIHDDSLTFKEDIQKAQVSGQGDS | |
| | LHEHIANLAGSPAIKKGILQTVKVVDELVKVMGRHKPENIVIEMARENQTTQKGQKNSRERMKRIEEGIKELGSQILKEHPVENTQLQNEKLYLYYLQNGRD | |
| | MYVDQELDINRLSDYDVDHIVPQSFLKDDSIDNKVLTRSDKARGKSDNVPSEEVVKKMKNYWRQLLNAKLITQRKFDNLTKAERGGLSELDKAGFIKRQLVE | |
| | TRQITKHVAQILDSRMNTKYDENDKLIREVKVITLKSKLVSDFRKDFQFYKVREINNYHHAHDAYLNAVVGTALIKKYPKLESEFVYGDYKVYDVRKMIAKSEQ | |
| | EIGKATAKYFFYSNIMNFFKTEITLANGEIRKRPLIETNGETGEIVWDKGRDFATVRKVLSMPQVNIVKKTEVQTGGFSKESILPKRNSDKLIARKKDWDPKKYG | |
| | GFDSPTVAYSVLVVAKVEKGKSKKLKSVKELLGITIMERSSFEKNPIDFLEAKGYKEVKKDLIIKLPKYSLFELENGRKRMLASAGELQKGNELALPSKYVNFLYLA | |
| | SHYEKLKGSPEDNEQKQLFVEQHKHYLDEIIEQISEFSKRVILADANLDKVLSAYNKHRDKPIREQAENIIHLFTLTNLGAPAAFKYFDTTIDRKRYTSTKEVLDAT | |
| | LIHQSITGLYETRIDLSQLGGDKRTADGSEFESPKKKAKVE | |
| PL12141 | MPAAKRVKLDGGTAPLEEEYRLFLEAPIQNVTLLEQWKREIPKVWAEINPPGLASTQAPIHVQLLSTALPVRVRQYPITLEAKRSLRETIRKFRAAGILRPVHSP | 16,180 |
| | WNTPLLPVRKSGTSEYRMVQDLREVNKRVETIHPTVPNPYTLLSLLPPDRIWYSVLDLKDAFFCIPLAPESQLIFAFEWADAEEGESGQLTWTRLPQGFKNSPT | |
| | LFNEALNRDLQGFRLDHPSVSLLQYVDDLLIAADTQAACLSATRDLLMTLAELGYRVSGKKAQLCQEEVTYLGFKIHKGSRSLSNSRTQAILQIPVPKTKRQVRE | |
| | FLGKIGYCRLFIPGFAELAQPLYAATRPGNDPLVWGEKEEEAFQSLKLALTQPPALALPSLDKPFQLFVEETSGAAKGVLTQALGPWKRPVAYLSKRLDPVAAG | |
| | WPRCLRAIAAAALLTREASKLTFGQDIEITSSHNLESLLRSPPDKWLTNARITQYQVLLLDPPRVRFKQTAALNPATLLPETDDTLPIHHCLDTLDSLTSTRPDLT | |
| | DQPLAQAEATLFTDGSSYIRDGKRYAGAAVVTLDSVIWAEPLPIGTSAQKAELIALTKALEWSKDKSVNIYTDSRYAFATLHVHGMIYRERGWLTAGGKAIKN | |
| | APEILALLTAVWLPKRVAVMHCKGHQKDDAPTSTGNRRADEVAREVAIRPLSTQATISGSSGSSGSSGSSGSSGSSMASNFTQFVLVDNGGTGDVTVAPSN | |
| | FANGIAEWISSNSRSQAYKVTCSVRQSSAQNRKYTIKVEVPKGAWRSYLNMELTIPIFATNSDCELIVKAMQGLLKDGNPIPSAIAANSGIYGGSGGSMASNF | |
| | TQFVLVDNGGTGDVTVAPSNFANGIAEWISSNSRSQAYKVTCSVRQSSAQNRKYTIKVEVPKGAWRSYLNMELTIPIFATNSDCELIVKAMQGLLKDGNPIP | |
| | SAIAANSGIYGGGSGGGSGGGSGGGSMASNFTQFVLVDNGGTGDVTVAPSNFANGIAEWISSNSRSQAYKVTCSVRQSSAQNRKYTIKVEVPKGAWRSYL | |
| | NMELTIPIFATNSDCELIVKAMQGLLKDGNPIPSAIAANSGIYGGSGGSMASNFTQFVLVDNGGTGDVTVAPSNFANGIAEWISSNSRSQAYKVTCSVRQSS | |
| | AQNRKYTIKVEVPKGAWRSYLNMELTIPIFATNSDCELIVKAMQGLLKDGNPIPSAIAANSGIYAEAAAKEAAAKEAAAKEAAAKALEAEAAAKEAAAKEAAA | |
| | KEAAAKADKKYSIGLDIGTNSVGWAVITDEYKVPSKKFKVLGNTDRHSIKKNLIGALLFDSGETAEATRLKRTARRRYTRRKNRICYLQEIFSNEMAKVDDSFFH | |
| | RLEESFLVEEDKKHERHPIFGNIVDEVAYHEKYPTIYHLRKKLVDSTDKADLRLIYLALAHMIKFRGHFLIEGDLNPDNSDVDKLFIQLVQTYNQLFEENPINASG | |
| | VDAKAILSARLSKSRRLENLIAQLPGEKKNGLFGNLIALSLGLTPNFKSNFDLAEDAKLQLSKDTYDDDLDNLLAQIGDQYADLFLAAKNLSDAILLSDILRVNTEI | |
| | TKAPLSASMIKRYDEHHQDLTLLKALVRQQLPEKYKEIFFDQSKNGYAGYIDGGASQEEFYKFIKPILEKMDGTEELLVKLNREDLLRKQRTFDNGSIPHQIHLG | |
| | ELHAILRRQEDFYPFLKDNREKIEKILTFRIPYYVGPLARGNSRFAWMTRKSEETITPWNFEEVVDKGASAQSFIERMTNFDKNLPNEKVLPKHSLLYEYFTVYN | |
| | ELTKVKYVTEGMRKPAFLSGEQKKAIVDLLFKTNRKVTVKQLKEDYFKKIECFDSVEISGVEDRFNASLGTYHDLLKIIKDKDFLDNEENEDILEDIVLTLTLFEDRE | |
| | MIEERLKTYAHLFDDKVMKQLKRRRYTGWGRLSRKLINGIRDKQSGKTILDFLKSDGFANRNFMQLIHDDSLTFKEDIQKAQVSGQGDSLHEHIANLAGSPAI | |
| | KKGILQTVKVVDELVKVMGRHKPENIVIEMARENQTTQKGQKNSRERMKRIEEGIKELGSQILKEHPVENTQLQNEKLYLYYLQNGRDMYVDQELDINRLSD | |
| | YDVDHIVPQSFLKDDSIDNKVLTRSDKARGKSDNVPSEEVVKKMKNYWRQLLNAKLITQRKFDNLTKAERGGLSELDKAGFIKRQLVETRQITKHVAQILDSR | |
| | MNTKYDENDKLIREVKVITLKSKLVSDFRKDFQFYKVREINNYHHAHDAYLNAVVGTALIKKYPKLESEFVYGDYKVYDVRKMIAKSEQEIGKATAKYFFYSNI | |
| | MNFFKTEITLANGEIRKRPLIETNGETGEIVWDKGRDFATVRKVLSMPQVNIVKKTEVQTGGFSKESILPKRNSDKLIARKKDWDPKKYGGFDSPTVAYSVLVV | |
| | AKVEKGKSKKLKSVKELLGITIMERSSFEKNPIDFLEAKGYKEVKKDLIIKLPKYSLFELENGRKRMLASAGELQKGNELALPSKYVNFLYLASHYEKLKGSPEDNE | |
| | QKQLFVEQHKHYLDEIIEQISEFSKRVILADANLDKVLSAYNKHRDKPIREQAENIIHLFTLTNLGAPAAFKYFDTTIDRKRYTSTKEVLDATLIHQSITGLYETRIDL | |
| | SQLGGDKRTADGSEFESPKKKAKVE | |
| PL12142 | MPAAKRVKLDGGTAPLEEEYRLFLEAPIQNVTLLEQWKREIPKVWAEINPPGLASTQAPIHVQLLSTALPVRVRQYPITLEAKRSLRETIRKFRAAGILRPVHSP | 16,181 |
| | WNTPLLPVRKSGTSEYRMVQDLREVNKRVETIHPTVPNPYTLLSLLPPDRIWYSVLDLKDAFFCIPLAPESQLIFAFEWADAEEGESGQLTWTRLPQGFKNSPT | |
| | LFNEALNRDLQGFRLDHPSVSLLQYVDDLLIAADTQAACLSATRDLLMTLAELGYRVSGKKAQLCQEEVTYLGFKIHKGSRSLSNSRTQAILQIPVPKTKRQVRE | |
| | FLGKIGYCRLFIPGFAELAQPLYAATRPGNDPLVWGEKEEEAFQSLKLALTQPPALALPSLDKPFQLFVEETSGAAKGVLTQALGPWKRPVAYLSKRLDPVAAG | |
| | WPRCLRAIAAAALLTREASKLTFGQDIEITSSHNLESLLRSPPDKWLTNARITQYQVLLLDPPRVRFKQTAALNPATLLPETDDTLPIHHCLDTLDSLTSTRPDLT | |
| | DQPLAQAEATLFTDGSSYIRDGKRYAGAAVVTLDSVIWAEPLPIGTSAQKAELIALTKALEWSKDKSVNIYTDSRYAFATLHVHGMIYRERGWLTAGGKAIKN | |
| | APEILALLTAVWLPKRVAVMHCKGHQKDDAPTSTGNRRADEVAREVAIRPLSTQATISGSSGSSGSSGSSGSSGSSMASNFTQFVLVDNGGTGDVTVAPSN | |
| | FANGIAEWISSNSRSQAYKVTCSVRQSSAQNRKYTIKVEVPKGAWRSYLNMELTIPIFATNSDCELIVKAMQGLLKDGNPIPSAIAANSGIYGGSGGSMASNF | |
| | TQFVLVDNGGTGDVTVAPSNFANGIAEWISSNSRSQAYKVTCSVRQSSAQNRKYTIKVEVPKGAWRSYLNMELTIPIFATNSDCELIVKAMQGLLKDGNPIP | |
| | SAIAANSGIYGGGSGGGSGGGSGGGSMASNFTQFVLVDNGGTGDVTVAPSNFANGIAEWISSNSRSQAYKVTCSVRQSSAQNRKYTIKVEVPKGAWRSYL | |
| | NMELTIPIFATNSDCELIVKAMQGLLKDGNPIPSAIAANSGIYGGSGGSMASNFTQFVLVDNGGTGDVTVAPSNFANGIAEWISSNSRSQAYKVTCSVRQSS | |
| | AQNRKYTIKVEVPKGAWRSYLNMELTIPIFATNSDCELIVKAMQGLLKDGNPIPSAIAANSGIYSGGSSGGSSGSETPGTSESATPESSGGSSGGSSDKKYSIGL | |
| | DIGTNSVGWAVITDEYKVPSKKFKVLGNTDRHSIKKNLIGALLFDSGETAEATRLKRTARRRYTRRKNRICYLQEIFSNEMAKVDDSFFHRLEESFLVEEDKKHE | |
| | RHPIFGNIVDEVAYHEKYPTIYHLRKKLVDSTDKADLRLIYLALAHMIKFRGHFLIEGDLNPDNSDVDKLFIQLVQTYNQLFEENPINASGVDAKAILSARLSKSR | |
| | RLENLIAQLPGEKKNGLFGNLIALSLGLTPNFKSNFDLAEDAKLQLSKDTYDDDLDNLLAQIGDQYADLFLAAKNLSDAILLSDILRVNTEITKAPLSASMIKRYDE | |
| | HHQDLTLLKALVRQQLPEKYKEIFFDQSKNGYAGYIDGGASQEEFYKFIKPILEKMDGTEELLVKLNREDLLRKQRTFDNGSIPHQIHLGELHAILRRQEDFYPFL | |
| | KDNREKIEKILTFRIPYYVGPLARGNSRFAWMTRKSEETITPWNFEEVVDKGASAQSFIERMTNFDKNLPNEKVLPKHSLLYEYFTVYNELTKVKYVTEGMRKP | |
| | AFLSGEQKKAIVDLLFKTNRKVTVKQLKEDYFKKIECFDSVEISGVEDRFNASLGTYHDLLKIIKDKDFLDNEENEDILEDIVLTLTLFEDREMIEERLKTYAHLFDD | |
| | KVMKQLKRRRYTGWGRLSRKLINGIRDKQSGKTILDFLKSDGFANRNFMQLIHDDSLTFKEDIQKAQVSGQGDSLHEHIANLAGSPAIKKGILQTVKVVDELV | |
| | KVMGRHKPENIVIEMARENQTTQKGQKNSRERMKRIEEGIKELGSQILKEHPVENTQLQNEKLYLYYLQNGRDMYVDQELDINRLSDYDVDHIVPQSFLKD | |
| | DSIDNKVLTRSDKARGKSDNVPSEEVVKKMKNYWRQLLNAKLITQRKFDNLTKAERGGLSELDKAGFIKRQLVETRQITKHVAQILDSRMNTKYDENDKLIRE | |
| | VKVITLKSKLVSDFRKDFQFYKVREINNYHHAHDAYLNAVVGTALIKKYPKLESEFVYGDYKVYDVRKMIAKSEQEIGKATAKYFFYSNIMNFFKTEITLANGEIR | |
| | KRPLIETNGETGEIVWDKGRDFATVRKVLSMPQVNIVKKTEVQTGGFSKESILPKRNSDKLIARKKDWDPKKYGGFDSPTVAYSVLVVAKVEKGKSKKLKSVK | |
| | ELLGITIMERSSFEKNPIDFLEAKGYKEVKKDLIIKLPKYSLFELENGRKRMLASAGELQKGNELALPSKYVNFLYLASHYEKLKGSPEDNEQKQLFVEQHKHYLD | |
| | EIIEQISEFSKRVILADANLDKVLSAYNKHRDKPIREQAENIIHLFTLTNLGAPAAFKYFDTTIDRKRYTSTKEVLDATLIHQSITGLYETRIDLSQLGGDKRTADGSE | |
| | FESPKKKAKVE | |
| PL12143 | MPAAKRVKLDGGTAPLEEEYRLFLEAPIQNVTLLEQWKREIPKVWAEINPPGLASTQAPIHVQLLSTALPVRVRQYPITLEAKRSLRETIRKFRAAGILRPVHSP | 16,182 |
| | WNTPLLPVRKSGTSEYRMVQDLREVNKRVETIHPTVPNPYTLLSLLPPDRIWYSVLDLKDAFFCIPLAPESQLIFAFEWADAEEGESGQLTWTRLPQGFKNSPT | |
| | LFNEALNRDLQGFRLDHPSVSLLQYVDDLLIAADTQAACLSATRDLLMTLAELGYRVSGKKAQLCQEEVTYLGFKIHKGSRSLSNSRTQAILQIPVPKTKRQVRE | |
| | FLGKIGYCRLFIPGFAELAQPLYAATRPGNDPLVWGEKEEEAFQSLKLALTQPPALALPSLDKPFQLFVEETSGAAKGVLTQALGPWKRPVAYLSKRLDPVAAG | |
| | WPRCLRAIAAAALLTREASKLTFGQDIEITSSHNLESLLRSPPDKWLTNARITQYQVLLLDPPRVRFKQTAALNPATLLPETDDTLPIHHCLDTLDSLTSTRPDLT | |
| | DQPLAQAEATLFTDGSSYIRDGKRYAGAAVVTLDSVIWAEPLPIGTSAQKAELIALTKALEWSKDKSVNIYTDSRYAFATLHVHGMIYRERGWLTAGGKAIKN | |
| | APEILALLTAVWLPKRVAVMHCKGHQKDDAPTSTGNRRADEVAREVAIRPLSTQATISGSSGSSGSSGSSGSSGSSMASNFTQFVLVDNGGTGDVTVAPSN | |
| | FANGIAEWISSNSRSQAYKVTCSVRQSSAQNRKYTIKVEVPKGAWRSYLNMELTIPIFATNSDCELIVKAMQGLLKDGNPIPSAIAANSGIYGGSGGSMASNF | |
| | TQFVLVDNGGTGDVTVAPSNFANGIAEWISSNSRSQAYKVTCSVRQSSAQNRKYTIKVEVPKGAWRSYLNMELTIPIFATNSDCELIVKAMQGLLKDGNPIP | |
| | SAIAANSGIYGGGSGGGSGGGSGGGSMASNFTQFVLVDNGGTGDVTVAPSNFANGIAEWISSNSRSQAYKVTCSVRQSSAQNRKYTIKVEVPKGAWRSYL | |
| | NMELTIPIFATNSDCELIVKAMQGLLKDGNPIPSAIAANSGIYGGSGGSMASNFTQFVLVDNGGTGDVTVAPSNFANGIAEWISSNSRSQAYKVTCSVRQSS | |
| | AQNRKYTIKVEVPKGAWRSYLNMELTIPIFATNSDCELIVKAMQGLLKDGNPIPSAIAANSGIYGSSGSSGSSGSSGSSGSSDKKYSIGLDIGTNSVGWAVITDE | |
| | YKVPSKKFKVLGNTDRHSIKKNLIGALLFDSGETAEATRLKRTARRRYTRRKNRICYLQEIFSNEMAKVDDSFFHRLEESFLVEEDKKHERHPIFGNIVDEVAYHE | |
| | KYPTIYHLRKKLVDSTDKADLRLIYLALAHMIKFRGHFLIEGDLNPDNSDVDKLFIQLVQTYNQLFEENPINASGVDAKAILSARLSKSRRLENLIAQLPGEKKNGL | |
| | FGNLIALSLGLTPNFKSNFDLAEDAKLQLSKDTYDDDLDNLLAQIGDQYADLFLAAKNLSDAILLSDILRVNTEITKAPLSASMIKRYDEHHQDLTLLKALVRQQL | |
| | PEKYKEIFFDQSKNGYAGYIDGGASQEEFYKFIKPILEKMDGTEELLVKLNREDLLRKQRTFDNGSIPHQIHLGELHAILRRQEDFYPFLKDNREKIEKILTFRIPYY | |
| | VGPLARGNSRFAWMTRKSEETITPWNFEEVVDKGASAQSFIERMTNFDKNLPNEKVLPKHSLLYEYFTVYNELTKVKYVTEGMRKPAFLSGEQKKAIVDLLFK | |
| | TNRKVTVKQLKEDYFKKIECFDSVEISGVEDRFNASLGTYHDLLKIIKDKDFLDNEENEDILEDIVLTLTLFEDREMIEERLKTYAHLFDDKVMKQLKRRRYTGWG | |
| | RLSRKLINGIRDKQSGKTILDFLKSDGFANRNFMQLIHDDSLTFKEDIQKAQVSGQGDSLHEHIANLAGSPAIKKGILQTVKVVDELVKVMGRHKPENIVIEMA | |
| | RENQTTQKGQKNSRERMKRIEEGIKELGSQILKEHPVENTQLQNEKLYLYYLQNGRDMYVDQELDINRLSDYDVDHIVPQSFLKDDSIDNKVLTRSDKARGKS | |
| | DNVPSEEVVKKMKNYWRQLLNAKLITQRKFDNLTKAERGGLSELDKAGFIKRQLVETRQITKHVAQILDSRMNTKYDENDKLIREVKVITLKSKLVSDFRKDFQ | |
| | FYKVREINNYHHAHDAYLNAVVGTALIKKYPKLESEFVYGDYKVYDVRKMIAKSEQEIGKATAKYFFYSNIMNFFKTEITLANGEIRKRPLIETNGETGEIVWDK | |
| | GRDFATVRKVLSMPQVNIVKKTEVQTGGFSKESILPKRNSDKLIARKKDWDPKKYGGFDSPTVAYSVLVVAKVEKGKSKKLKSVKELLGITIMERSSFEKNPIDF | |
| | LEAKGYKEVKKDLIIKLPKYSLFELENGRKRMLASAGELQKGNELALPSKYVNFLYLASHYEKLKGSPEDNEQKQLFVEQHKHYLDEIIEQISEFSKRVILADANLD | |
| | KVLSAYNKHRDKPIREQAENIIHLFTLTNLGAPAAFKYFDTTIDRKRYTSTKEVLDATLIHQSITGLYETRIDLSQLGGDKRTADGSEFESPKKKAKVE | |
| PL12144 | MPAAKRVKLDGGTAPLEEEYRLFLEAPIQNVTLLEQWKREIPKVWAEINPPGLASTQAPIHVQLLSTALPVRVRQYPITLEAKRSLRETIRKFRAAGILRPVHSP | 16,183 |
| | WNTPLLPVRKSGTSEYRMVQDLREVNKRVETIHPTVPNPYTLLSLLPPDRIWYSVLDLKDAFFCIPLAPESQLIFAFEWADAEEGESGQLTWTRLPQGFKNSPT | |
| | LFNEALNRDLQGFRLDHPSVSLLQYVDDLLIAADTQAACLSATRDLLMTLAELGYRVSGKKAQLCQEEVTYLGFKIHKGSRSLSNSRTQAILQIPVPKTKRQVRE | |
| | FLGKIGYCRLFIPGFAELAQPLYAATRPGNDPLVWGEKEEEAFQSLKLALTQPPALALPSLDKPFQLFVEETSGAAKGVLTQALGPWKRPVAYLSKRLDPVAAG | |
| | WPRCLRAIAAAALLTREASKLTFGQDIEITSSHNLESLLRSPPDKWLTNARITQYQVLLLDPPRVRFKQTAALNPATLLPETDDTLPIHHCLDTLDSLTSTRPDLT | |
| | DQPLAQAEATLFTDGSSYIRDGKRYAGAAVVTLDSVIWAEPLPIGTSAQKAELIALTKALEWSKDKSVNIYTDSRYAFATLHVHGMIYRERGWLTAGGKAIKN | |
| | APEILALLTAVWLPKRVAVMHCKGHQKDDAPTSTGNRRADEVAREVAIRPLSTQATISGSSGSSGSSGSSGSSGSSMASNFTQFVLVDNGGTGDVTVAPSN | |
| | FANGIAEWISSNSRSQAYKVTCSVRQSSAQNRKYTIKVEVPKGAWRSYLNMELTIPIFATNSDCELIVKAMQGLLKDGNPIPSAIAANSGIYGGSGGSMASNF | |
| | TQFVLVDNGGTGDVTVAPSNFANGIAEWISSNSRSQAYKVTCSVRQSSAQNRKYTIKVEVPKGAWRSYLNMELTIPIFATNSDCELIVKAMQGLLKDGNPIP | |
| | SAIAANSGIYGGGSGGGSGGGSGGGSMASNFTQFVLVDNGGTGDVTVAPSNFANGIAEWISSNSRSQAYKVTCSVRQSSAQNRKYTIKVEVPKGAWRSYL | |
| | NMELTIPIFATNSDCELIVKAMQGLLKDGNPIPSAIAANSGIYGGSGGSMASNFTQFVLVDNGGTGDVTVAPSNFANGIAEWISSNSRSQAYKVTCSVRQSS | |
| | AQNRKYTIKVEVPKGAWRSYLNMELTIPIFATNSDCELIVKAMQGLLKDGNPIPSAIAANSGIYGSSGGGEAAAKDKKYSIGLDIGTNSVGWAVITDEYKVPSK | |
| | KFKVLGNTDRHSIKKNLIGALLFDSGETAEATRLKRTARRRYTRRKNRICYLQEIFSNEMAKVDDSFFHRLEESFLVEEDKKHERHPIFGNIVDEVAYHEKYPTIY | |
| | HLRKKLVDSTDKADLRLIYLALAHMIKFRGHFLIEGDLNPDNSDVDKLFIQLVQTYNQLFEENPINASGVDAKAILSARLSKSRRLENLIAQLPGEKKNGLFGNLI | |
| | ALSLGLTPNFKSNFDLAEDAKLQLSKDTYDDDLDNLLAQIGDQYADLFLAAKNLSDAILLSDILRVNTEITKAPLSASMIKRYDEHHQDLTLLKALVRQQLPEKYK | |
| | EIFFDQSKNGYAGYIDGGASQEEFYKFIKPILEKMDGTEELLVKLNREDLLRKQRTFDNGSIPHQIHLGELHAILRRQEDFYPFLKDNREKIEKILTFRIPYYVGPLA | |
| | RGNSRFAWMTRKSEETITPWNFEEVVDKGASAQSFIERMTNFDKNLPNEKVLPKHSLLYEYFTVYNELTKVKYVTEGMRKPAFLSGEQKKAIVDLLFKTNRKV | |
| | TVKQLKEDYFKKIECFDSVEISGVEDRFNASLGTYHDLLKIIKDKDFLDNEENEDILEDIVLTLTLFEDREMIEERLKTYAHLFDDKVMKQLKRRRYTGWGRLSRK | |
| | LINGIRDKQSGKTILDFLKSDGFANRNFMQLIHDDSLTFKEDIQKAQVSGQGDSLHEHIANLAGSPAIKKGILQTVKVVDELVKVMGRHKPENIVIEMARENQ | |
| | TTQKGQKNSRERMKRIEEGIKELGSQILKEHPVENTQLQNEKLYLYYLQNGRDMYVDQELDINRLSDYDVDHIVPQSFLKDDSIDNKVLTRSDKARGKSDNVP | |
| | SEEVVKKMKNYWRQLLNAKLITQRKFDNLTKAERGGLSELDKAGFIKRQLVETRQITKHVAQILDSRMNTKYDENDKLIREVKVITLKSKLVSDFRKDFQFYKV | |
| | REINNYHHAHDAYLNAVVGTALIKKYPKLESEFVYGDYKVYDVRKMIAKSEQEIGKATAKYFFYSNIMNFFKTEITLANGEIRKRPLIETNGETGEIVWDKGRDF | |
| | ATVRKVLSMPQVNIVKKTEVQTGGFSKESILPKRNSDKLIARKKDWDPKKYGGFDSPTVAYSVLVVAKVEKGKSKKLKSVKELLGITIMERSSFEKNPIDFLEAK | |
| | GYKEVKKDLIIKLPKYSLFELENGRKRMLASAGELQKGNELALPSKYVNFLYLASHYEKLKGSPEDNEQKQLFVEQHKHYLDEIIEQISEFSKRVILADANLDKVLS | |
| | AYNKHRDKPIREQAENIIHLFTLTNLGAPAAFKYFDTTIDRKRYTSTKEVLDATLIHQSITGLYETRIDLSQLGGDKRTADGSEFESPKKKAKVE | |
| PL12145 | MPAAKRVKLDGGTAPLEEEYRLFLEAPIQNVTLLEQWKREIPKVWAEINPPGLASTQAPIHVQLLSTALPVRVRQYPITLEAKRSLRETIRKFRAAGILRPVHSP | 16,184 |
| | WNTPLLPVRKSGTSEYRMVQDLREVNKRVETIHPTVPNPYTLLSLLPPDRIWYSVLDLKDAFFCIPLAPESQLIFAFEWADAEEGESGQLTWTRLPQGFKNSPT | |
| | LFNEALNRDLQGFRLDHPSVSLLQYVDDLLIAADTQAACLSATRDLLMTLAELGYRVSGKKAQLCQEEVTYLGFKIHKGSRSLSNSRTQAILQIPVPKTKRQVRE | |
| | FLGKIGYCRLFIPGFAELAQPLYAATRPGNDPLVWGEKEEEAFQSLKLALTQPPALALPSLDKPFQLFVEETSGAAKGVLTQALGPWKRPVAYLSKRLDPVAAG | |
| | WPRCLRAIAAAALLTREASKLTFGQDIEITSSHNLESLLRSPPDKWLTNARITQYQVLLLDPPRVRFKQTAALNPATLLPETDDTLPIHHCLDTLDSLTSTRPDLT | |
| | DQPLAQAEATLFTDGSSYIRDGKRYAGAAVVTLDSVIWAEPLPIGTSAQKAELIALTKALEWSKDKSVNIYTDSRYAFATLHVHGMIYRERGWLTAGGKAIKN | |
| | APEILALLTAVWLPKRVAVMHCKGHQKDDAPTSTGNRRADEVAREVAIRPLSTQATISGSSGGGEAAAKMASNFTQFVLVDNGGTGDVTVAPSNFANGIA | |
| | EWISSNSRSQAYKVTCSVRQSSAQNRKYTIKVEVPKGAWRSYLNMELTIPIFATNSDCELIVKAMQGLLKDGNPIPSAIAANSGIYAEAAAKEAAAKEAAAKE | |
| | AAAKALEAEAAAKEAAAKEAAAKEAAAKADKKYSIGLDIGTNSVGWAVITDEYKVPSKKFKVLGNTDRHSIKKNLIGALLFDSGETAEATRLKRTARRRYTRRK | |
| | NRICYLQEIFSNEMAKVDDSFFHRLEESFLVEEDKKHERHPIFGNIVDEVAYHEKYPTIYHLRKKLVDSTDKADLRLIYLALAHMIKFRGHFLIEGDLNPDNSDVD | |
| | KLFIQLVQTYNQLFEENPINASGVDAKAILSARLSKSRRLENLIAQLPGEKKNGLFGNLIALSLGLTPNFKSNFDLAEDAKLQLSKDTYDDDLDNLLAQIGDQYA | |
| | DLFLAAKNLSDAILLSDILRVNTEITKAPLSASMIKRYDEHHQDLTLLKALVRQQLPEKYKEIFFDQSKNGYAGYIDGGASQEEFYKFIKPILEKMDGTEELLVKLN | |
| | REDLLRKQRTFDNGSIPHQIHLGELHAILRRQEDFYPFLKDNREKIEKILTFRIPYYVGPLARGNSRFAWMTRKSEETITPWNFEEVVDKGASAQSFIERMTNFD | |
| | KNLPNEKVLPKHSLLYEYFTVYNELTKVKYVTEGMRKPAFLSGEQKKAIVDLLFKTNRKVTVKQLKEDYFKKIECFDSVEISGVEDRFNASLGTYHDLLKIIKDKDF | |
| | LDNEENEDILEDIVLTLTLFEDREMIEERLKTYAHLFDDKVMKQLKRRRYTGWGRLSRKLINGIRDKQSGKTILDFLKSDGFANRNFMQLIHDDSLTFKEDIQKA | |
| | QVSGQGDSLHEHIANLAGSPAIKKGILQTVKVVDELVKVMGRHKPENIVIEMARENQTTQKGQKNSRERMKRIEEGIKELGSQILKEHPVENTQLQNEKLYLY | |
| | YLQNGRDMYVDQELDINRLSDYDVDHIVPQSFLKDDSIDNKVLTRSDKARGKSDNVPSEEVVKKMKNYWRQLLNAKLITQRKFDNLTKAERGGLSELDKAG | |
| | FIKRQLVETRQITKHVAQILDSRMNTKYDENDKLIREVKVITLKSKLVSDFRKDFQFYKVREINNYHHAHDAYLNAVVGTALIKKYPKLESEFVYGDYKVYDVRK | |
| | MIAKSEQEIGKATAKYFFYSNIMNFFKTEITLANGEIRKRPLIETNGETGEIVWDKGRDFATVRKVLSMPQVNIVKKTEVQTGGFSKESILPKRNSDKLIARKKD | |
| | WDPKKYGGFDSPTVAYSVLVVAKVEKGKSKKLKSVKELLGITIMERSSFEKNPIDFLEAKGYKEVKKDLIIKLPKYSLFELENGRKRMLASAGELQKGNELALPSK | |
| | YVNFLYLASHYEKLKGSPEDNEQKQLFVEQHKHYLDEIIEQISEFSKRVILADANLDKVLSAYNKHRDKPIREQAENIIHLFTLTNLGAPAAFKYFDTTIDRKRYTS | |
| | TKEVLDATLIHQSITGLYETRIDLSQLGGDKRTADGSEFESPKKKAKVE | |
| PL12146 | MPAAKRVKLDGGTAPLEEEYRLFLEAPIQNVTLLEQWKREIPKVWAEINPPGLASTQAPIHVQLLSTALPVRVRQYPITLEAKRSLRETIRKFRAAGILRPVHSP | 16,185 |
| | WNTPLLPVRKSGTSEYRMVQDLREVNKRVETIHPTVPNPYTLLSLLPPDRIWYSVLDLKDAFFCIPLAPESQLIFAFEWADAEEGESGQLTWTRLPQGFKNSPT | |
| | LFNEALNRDLQGFRLDHPSVSLLQYVDDLLIAADTQAACLSATRDLLMTLAELGYRVSGKKAQLCQEEVTYLGFKIHKGSRSLSNSRTQAILQIPVPKTKRQVRE | |
| | FLGKIGYCRLFIPGFAELAQPLYAATRPGNDPLVWGEKEEEAFQSLKLALTQPPALALPSLDKPFQLFVEETSGAAKGVLTQALGPWKRPVAYLSKRLDPVAAG | |
| | WPRCLRAIAAAALLTREASKLTFGQDIEITSSHNLESLLRSPPDKWLTNARITQYQVLLLDPPRVRFKQTAALNPATLLPETDDTLPIHHCLDTLDSLTSTRPDLT | |
| | DQPLAQAEATLFTDGSSYIRDGKRYAGAAVVTLDSVIWAEPLPIGTSAQKAELIALTKALEWSKDKSVNIYTDSRYAFATLHVHGMIYRERGWLTAGGKAIKN | |
| | APEILALLTAVWLPKRVAVMHCKGHQKDDAPTSTGNRRADEVAREVAIRPLSTQATISGSSGGGEAAAKMASNFTQFVLVDNGGTGDVTVAPSNFANGIA | |
| | EWISSNSRSQAYKVTCSVRQSSAQNRKYTIKVEVPKGAWRSYLNMELTIPIFATNSDCELIVKAMQGLLKDGNPIPSAIAANSGIYSGGSSGGSSGSETPGTSE | |
| | SATPESSGGSSGGSSDKKYSIGLDIGTNSVGWAVITDEYKVPSKKFKVLGNTDRHSIKKNLIGALLFDSGETAEATRLKRTARRRYTRRKNRICYLQEIFSNEMAK | |
| | VDDSFFHRLEESFLVEEDKKHERHPIFGNIVDEVAYHEKYPTIYHLRKKLVDSTDKADLRLIYLALAHMIKFRGHFLIEGDLNPDNSDVDKLFIQLVQTYNQLFEE | |
| | NPINASGVDAKAILSARLSKSRRLENLIAQLPGEKKNGLFGNLIALSLGLTPNFKSNFDLAEDAKLQLSKDTYDDDLDNLLAQIGDQYADLFLAAKNLSDAILLSD | |
| | ILRVNTEITKAPLSASMIKRYDEHHQDLTLLKALVRQQLPEKYKEIFFDQSKNGYAGYIDGGASQEEFYKFIKPILEKMDGTEELLVKLNREDLLRKQRTFDNGSI | |
| | PHQIHLGELHAILRRQEDFYPFLKDNREKIEKILTFRIPYYVGPLARGNSRFAWMTRKSEETITPWNFEEVVDKGASAQSFIERMTNFDKNLPNEKVLPKHSLLY | |
| | EYFTVYNELTKVKYVTEGMRKPAFLSGEQKKAIVDLLFKTNRKVTVKQLKEDYFKKIECFDSVEISGVEDRFNASLGTYHDLLKIIKDKDFLDNEENEDILEDIVLT | |
| | LTLFEDREMIEERLKTYAHLFDDKVMKQLKRRRYTGWGRLSRKLINGIRDKQSGKTILDFLKSDGFANRNFMQLIHDDSLTFKEDIQKAQVSGQGDSLHEHIA | |
| | NLAGSPAIKKGILQTVKVVDELVKVMGRHKPENIVIEMARENQTTQKGQKNSRERMKRIEEGIKELGSQILKEHPVENTQLQNEKLYLYYLQNGRDMYVDQE | |
| | LDINRLSDYDVDHIVPQSFLKDDSIDNKVLTRSDKARGKSDNVPSEEVVKKMKNYWRQLLNAKLITQRKFDNLTKAERGGLSELDKAGFIKRQLVETRQITKH | |
| | VAQILDSRMNTKYDENDKLIREVKVITLKSKLVSDFRKDFQFYKVREINNYHHAHDAYLNAVVGTALIKKYPKLESEFVYGDYKVYDVRKMIAKSEQEIGKATA | |
| | KYFFYSNIMNFFKTEITLANGEIRKRPLIETNGETGEIVWDKGRDFATVRKVLSMPQVNIVKKTEVQTGGFSKESILPKRNSDKLIARKKDWDPKKYGGFDSPT | |
| | VAYSVLVVAKVEKGKSKKLKSVKELLGITIMERSSFEKNPIDFLEAKGYKEVKKDLIIKLPKYSLFELENGRKRMLASAGELQKGNELALPSKYVNFLYLASHYEKLK | |
| | GSPEDNEQKQLFVEQHKHYLDEIIEQISEFSKRVILADANLDKVLSAYNKHRDKPIREQAENIIHLFTLTNLGAPAAFKYFDTTIDRKRYTSTKEVLDATLIHQSIT | |
| | GLYETRIDLSQLGGDKRTADGSEFESPKKKAKVE | |
| PL12147 | MPAAKRVKLDGGTAPLEEEYRLFLEAPIQNVTLLEQWKREIPKVWAEINPPGLASTQAPIHVQLLSTALPVRVRQYPITLEAKRSLRETIRKFRAAGILRPVHSP | 16,186 |
| | WNTPLLPVRKSGTSEYRMVQDLREVNKRVETIHPTVPNPYTLLSLLPPDRIWYSVLDLKDAFFCIPLAPESQLIFAFEWADAEEGESGQLTWTRLPQGFKNSPT | |
| | LFNEALNRDLQGFRLDHPSVSLLQYVDDLLIAADTQAACLSATRDLLMTLAELGYRVSGKKAQLCQEEVTYLGFKIHKGSRSLSNSRTQAILQIPVPKTKRQVRE | |
| | FLGKIGYCRLFIPGFAELAQPLYAATRPGNDPLVWGEKEEEAFQSLKLALTQPPALALPSLDKPFQLFVEETSGAAKGVLTQALGPWKRPVAYLSKRLDPVAAG | |
| | WPRCLRAIAAAALLTREASKLTFGQDIEITSSHNLESLLRSPPDKWLTNARITQYQVLLLDPPRVRFKQTAALNPATLLPETDDTLPIHHCLDTLDSLTSTRPDLT | |
| | DQPLAQAEATLFTDGSSYIRDGKRYAGAAVVTLDSVIWAEPLPIGTSAQKAELIALTKALEWSKDKSVNIYTDSRYAFATLHVHGMIYRERGWLTAGGKAIKN | |
| | APEILALLTAVWLPKRVAVMHCKGHQKDDAPTSTGNRRADEVAREVAIRPLSTQATISGSSGGGEAAAKMASNFTQFVLVDNGGTGDVTVAPSNFANGIA | |
| | EWISSNSRSQAYKVTCSVRQSSAQNRKYTIKVEVPKGAWRSYLNMELTIPIFATNSDCELIVKAMQGLLKDGNPIPSAIAANSGIYGSSGSSGSSGSSGSSGSS | |
| | DKKYSIGLDIGTNSVGWAVITDEYKVPSKKFKVLGNTDRHSIKKNLIGALLFDSGETAEATRLKRTARRRYTRRKNRICYLQEIFSNEMAKVDDSFFHRLEESFLV | |
| | EEDKKHERHPIFGNIVDEVAYHEKYPTIYHLRKKLVDSTDKADLRLIYLALAHMIKFRGHFLIEGDLNPDNSDVDKLFIQLVQTYNQLFEENPINASGVDAKAILS | |
| | ARLSKSRRLENLIAQLPGEKKNGLFGNLIALSLGLTPNFKSNFDLAEDAKLQLSKDTYDDDLDNLLAQIGDQYADLFLAAKNLSDAILLSDILRVNTEITKAPLSAS | |
| | MIKRYDEHHQDLTLLKALVRQQLPEKYKEIFFDQSKNGYAGYIDGGASQEEFYKFIKPILEKMDGTEELLVKLNREDLLRKQRTFDNGSIPHQIHLGELHAILRR | |
| | QEDFYPFLKDNREKIEKILTFRIPYYVGPLARGNSRFAWMTRKSEETITPWNFEEVVDKGASAQSFIERMTNFDKNLPNEKVLPKHSLLYEYFTVYNELTKVKYV | |
| | TEGMRKPAFLSGEQKKAIVDLLFKTNRKVTVKQLKEDYFKKIECFDSVEISGVEDRFNASLGTYHDLLKIIKDKDFLDNEENEDILEDIVLTLTLFEDREMIEERLKT | |
| | YAHLFDDKVMKQLKRRRYTGWGRLSRKLINGIRDKQSGKTILDFLKSDGFANRNFMQLIHDDSLTFKEDIQKAQVSGQGDSLHEHIANLAGSPAIKKGILQTV | |
| | KVVDELVKVMGRHKPENIVIEMARENQTTQKGQKNSRERMKRIEEGIKELGSQILKEHPVENTQLQNEKLYLYYLQNGRDMYVDQELDINRLSDYDVDHIV | |
| | PQSFLKDDSIDNKVLTRSDKARGKSDNVPSEEVVKKMKNYWRQLLNAKLITQRKFDNLTKAERGGLSELDKAGFIKRQLVETRQITKHVAQILDSRMNTKYDE | |
| | NDKLIREVKVITLKSKLVSDFRKDFQFYKVREINNYHHAHDAYLNAVVGTALIKKYPKLESEFVYGDYKVYDVRKMIAKSEQEIGKATAKYFFYSNIMNFFKTEIT | |
| | LANGEIRKRPLIETNGETGEIVWDKGRDFATVRKVLSMPQVNIVKKTEVQTGGFSKESILPKRNSDKLIARKKDWDPKKYGGFDSPTVAYSVLVVAKVEKGKS | |
| | KKLKSVKELLGITIMERSSFEKNPIDFLEAKGYKEVKKDLIIKLPKYSLFELENGRKRMLASAGELQKGNELALPSKYVNFLYLASHYEKLKGSPEDNEQKQLFVEQ | |
| | HKHYLDEIIEQISEFSKRVILADANLDKVLSAYNKHRDKPIREQAENIIHLFTLTNLGAPAAFKYFDTTIDRKRYTSTKEVLDATLIHQSITGLYETRIDLSQLGGDKR | |
| | TADGSEFESPKKKAKVE | |
| PL12148 | MPAAKRVKLDGGTAPLEEEYRLFLEAPIQNVTLLEQWKREIPKVWAEINPPGLASTQAPIHVQLLSTALPVRVRQYPITLEAKRSLRETIRKFRAAGILRPVHSP | 16,187 |
| | WNTPLLPVRKSGTSEYRMVQDLREVNKRVETIHPTVPNPYTLLSLLPPDRIWYSVLDLKDAFFCIPLAPESQLIFAFEWADAEEGESGQLTWTRLPQGFKNSPT | |
| | LFNEALNRDLQGFRLDHPSVSLLQYVDDLLIAADTQAACLSATRDLLMTLAELGYRVSGKKAQLCQEEVTYLGFKIHKGSRSLSNSRTQAILQIPVPKTKRQVRE | |
| | FLGKIGYCRLFIPGFAELAQPLYAATRPGNDPLVWGEKEEEAFQSLKLALTQPPALALPSLDKPFQLFVEETSGAAKGVLTQALGPWKRPVAYLSKRLDPVAAG | |
| | WPRCLRAIAAAALLTREASKLTFGQDIEITSSHNLESLLRSPPDKWLTNARITQYQVLLLDPPRVRFKQTAALNPATLLPETDDTLPIHHCLDTLDSLTSTRPDLT | |
| | DQPLAQAEATLFTDGSSYIRDGKRYAGAAVVTLDSVIWAEPLPIGTSAQKAELIALTKALEWSKDKSVNIYTDSRYAFATLHVHGMIYRERGWLTAGGKAIKN | |
| | APEILALLTAVWLPKRVAVMHCKGHQKDDAPTSTGNRRADEVAREVAIRPLSTQATISGSSGGGEAAAKMASNFTQFVLVDNGGTGDVTVAPSNFANGIA | |
| | EWISSNSRSQAYKVTCSVRQSSAQNRKYTIKVEVPKGAWRSYLNMELTIPIFATNSDCELIVKAMQGLLKDGNPIPSAIAANSGIYGSSGGGEAAAKDKKYSIG | |
| | LDIGTNSVGWAVITDEYKVPSKKFKVLGNTDRHSIKKNLIGALLFDSGETAEATRLKRTARRRYTRRKNRICYLQEIFSNEMAKVDDSFFHRLEESFLVEEDKKH | |
| | ERHPIFGNIVDEVAYHEKYPTIYHLRKKLVDSTDKADLRLIYLALAHMIKFRGHFLIEGDLNPDNSDVDKLFIQLVQTYNQLFEENPINASGVDAKAILSARLSKS | |
| | RRLENLIAQLPGEKKNGLFGNLIALSLGLTPNFKSNFDLAEDAKLQLSKDTYDDDLDNLLAQIGDQYADLFLAAKNLSDAILLSDILRVNTEITKAPLSASMIKRY | |
| | DEHHQDLTLLKALVRQQLPEKYKEIFFDQSKNGYAGYIDGGASQEEFYKFIKPILEKMDGTEELLVKLNREDLLRKQRTFDNGSIPHQIHLGELHAILRRQEDFY | |
| | PFLKDNREKIEKILTFRIPYYVGPLARGNSRFAWMTRKSEETITPWNFEEVVDKGASAQSFIERMTNFDKNLPNEKVLPKHSLLYEYFTVYNELTKVKYVTEGM | |
| | RKPAFLSGEQKKAIVDLLFKTNRKVTVKQLKEDYFKKIECFDSVEISGVEDRFNASLGTYHDLLKIIKDKDFLDNEENEDILEDIVLTLTLFEDREMIEERLKTYAHL | |
| | FDDKVMKQLKRRRYTGWGRLSRKLINGIRDKQSGKTILDFLKSDGFANRNFMQLIHDDSLTFKEDIQKAQVSGQGDSLHEHIANLAGSPAIKKGILQTVKVVD | |
| | ELVKVMGRHKPENIVIEMARENQTTQKGQKNSRERMKRIEEGIKELGSQILKEHPVENTQLQNEKLYLYYLQNGRDMYVDQELDINRLSDYDVDHIVPQSFL | |
| | KDDSIDNKVLTRSDKARGKSDNVPSEEVVKKMKNYWRQLLNAKLITQRKFDNLTKAERGGLSELDKAGFIKRQLVETRQITKHVAQILDSRMNTKYDENDKLI | |
| | REVKVITLKSKLVSDFRKDFQFYKVREINNYHHAHDAYLNAVVGTALIKKYPKLESEFVYGDYKVYDVRKMIAKSEQEIGKATAKYFFYSNIMNFFKTEITLANG | |
| | EIRKRPLIETNGETGEIVWDKGRDFATVRKVLSMPQVNIVKKTEVQTGGFSKESILPKRNSDKLIARKKDWDPKKYGGFDSPTVAYSVLVVAKVEKGKSKKLKS | |
| | VKELLGITIMERSSFEKNPIDFLEAKGYKEVKKDLIIKLPKYSLFELENGRKRMLASAGELQKGNELALPSKYVNFLYLASHYEKLKGSPEDNEQKQLFVEQHKHYL | |
| | DEIIEQISEFSKRVILADANLDKVLSAYNKHRDKPIREQAENIIHLFTLTNLGAPAAFKYFDTTIDRKRYTSTKEVLDATLIHQSITGLYETRIDLSQLGGDKRTADGS | |
| | EFESPKKKAKVE | |
| PL12149 | MPAAKRVKLDGGTAPLEEEYRLFLEAPIQNVTLLEQWKREIPKVWAEINPPGLASTQAPIHVQLLSTALPVRVRQYPITLEAKRSLRETIRKFRAAGILRPVHSP | 16,188 |
| | WNTPLLPVRKSGTSEYRMVQDLREVNKRVETIHPTVPNPYTLLSLLPPDRIWYSVLDLKDAFFCIPLAPESQLIFAFEWADAEEGESGQLTWTRLPQGFKNSPT | |
| | LFNEALNRDLQGFRLDHPSVSLLQYVDDLLIAADTQAACLSATRDLLMTLAELGYRVSGKKAQLCQEEVTYLGFKIHKGSRSLSNSRTQAILQIPVPKTKRQVRE | |
| | FLGKIGYCRLFIPGFAELAQPLYAATRPGNDPLVWGEKEEEAFQSLKLALTQPPALALPSLDKPFQLFVEETSGAAKGVLTQALGPWKRPVAYLSKRLDPVAAG | |
| | WPRCLRAIAAAALLTREASKLTFGQDIEITSSHNLESLLRSPPDKWLTNARITQYQVLLLDPPRVRFKQTAALNPATLLPETDDTLPIHHCLDTLDSLTSTRPDLT | |
| | DQPLAQAEATLFTDGSSYIRDGKRYAGAAVVTLDSVIWAEPLPIGTSAQKAELIALTKALEWSKDKSVNIYTDSRYAFATLHVHGMIYRERGWLTAGGKAIKN | |
| | APEILALLTAVWLPKRVAVMHCKGHQKDDAPTSTGNRRADEVAREVAIRPLSTQATISGSSGGGEAAAKMASNFTQFVLVDNGGTGDVTVAPSNFANGIA | |
| | EWISSNSRSQAYKVTCSVRQSSAQNRKYTIKVEVPKGAWRSYLNMELTIPIFATNSDCELIVKAMQGLLKDGNPIPSAIAANSGIYGGSGGSMASNFTQFVLV | |
| | DNGGTGDVTVAPSNFANGIAEWISSNSRSQAYKVTCSVRQSSAQNRKYTIKVEVPKGAWRSYLNMELTIPIFATNSDCELIVKAMQGLLKDGNPIPSAIAANS | |
| | GIYAEAAAKEAAAKEAAAKEAAAKALEAEAAAKEAAAKEAAAKEAAAKADKKYSIGLDIGTNSVGWAVITDEYKVPSKKFKVLGNTDRHSIKKNLIGALLFDSG | |
| | ETAEATRLKRTARRRYTRRKNRICYLQEIFSNEMAKVDDSFFHRLEESFLVEEDKKHERHPIFGNIVDEVAYHEKYPTIYHLRKKLVDSTDKADLRLIYLALAHMI | |
| | KFRGHFLIEGDLNPDNSDVDKLFIQLVQTYNQLFEENPINASGVDAKAILSARLSKSRRLENLIAQLPGEKKNGLFGNLIALSLGLTPNFKSNFDLAEDAKLQLSK | |
| | DTYDDDLDNLLAQIGDQYADLFLAAKNLSDAILLSDILRVNTEITKAPLSASMIKRYDEHHQDLTLLKALVRQQLPEKYKEIFFDQSKNGYAGYIDGGASQEEFY | |
| | KFIKPILEKMDGTEELLVKLNREDLLRKQRTFDNGSIPHQIHLGELHAILRRQEDFYPFLKDNREKIEKILTFRIPYYVGPLARGNSRFAWMTRKSEETITPWNFE | |
| | EVVDKGASAQSFIERMTNFDKNLPNEKVLPKHSLLYEYFTVYNELTKVKYVTEGMRKPAFLSGEQKKAIVDLLFKTNRKVTVKQLKEDYFKKIECFDSVEISGVE | |
| | DRFNASLGTYHDLLKIIKDKDFLDNEENEDILEDIVLTLTLFEDREMIEERLKTYAHLFDDKVMKQLKRRRYTGWGRLSRKLINGIRDKQSGKTILDFLKSDGFAN | |
| | RNFMQLIHDDSLTFKEDIQKAQVSGQGDSLHEHIANLAGSPAIKKGILQTVKVVDELVKVMGRHKPENIVIEMARENQTTQKGQKNSRERMKRIEEGIKELG | |
| | SQILKEHPVENTQLQNEKLYLYYLQNGRDMYVDQELDINRLSDYDVDHIVPQSFLKDDSIDNKVLTRSDKARGKSDNVPSEEVVKKMKNYWRQLLNAKLITQ | |
| | RKFDNLTKAERGGLSELDKAGFIKRQLVETRQITKHVAQILDSRMNTKYDENDKLIREVKVITLKSKLVSDFRKDFQFYKVREINNYHHAHDAYLNAVVGTALIK | |
| | KYPKLESEFVYGDYKVYDVRKMIAKSEQEIGKATAKYFFYSNIMNFFKTEITLANGEIRKRPLIETNGETGEIVWDKGRDFATVRKVLSMPQVNIVKKTEVQTG | |
| | GFSKESILPKRNSDKLIARKKDWDPKKYGGFDSPTVAYSVLVVAKVEKGKSKKLKSVKELLGITIMERSSFEKNPIDFLEAKGYKEVKKDLIIKLPKYSLFELENGRK | |
| | RMLASAGELQKGNELALPSKYVNFLYLASHYEKLKGSPEDNEQKQLFVEQHKHYLDEIIEQISEFSKRVILADANLDKVLSAYNKHRDKPIREQAENIIHLFTLTN | |
| | LGAPAAFKYFDTTIDRKRYTSTKEVLDATLIHQSITGLYETRIDLSQLGGDKRTADGSEFESPKKKAKVE | |
| PL12150 | MPAAKRVKLDGGTAPLEEEYRLFLEAPIQNVTLLEQWKREIPKVWAEINPPGLASTQAPIHVQLLSTALPVRVRQYPITLEAKRSLRETIRKFRAAGILRPVHSP | 16,189 |
| | WNTPLLPVRKSGTSEYRMVQDLREVNKRVETIHPTVPNPYTLLSLLPPDRIWYSVLDLKDAFFCIPLAPESQLIFAFEWADAEEGESGQLTWTRLPQGFKNSPT | |
| | LFNEALNRDLQGFRLDHPSVSLLQYVDDLLIAADTQAACLSATRDLLMTLAELGYRVSGKKAQLCQEEVTYLGFKIHKGSRSLSNSRTQAILQIPVPKTKRQVRE | |
| | FLGKIGYCRLFIPGFAELAQPLYAATRPGNDPLVWGEKEEEAFQSLKLALTQPPALALPSLDKPFQLFVEETSGAAKGVLTQALGPWKRPVAYLSKRLDPVAAG | |
| | WPRCLRAIAAAALLTREASKLTFGQDIEITSSHNLESLLRSPPDKWLTNARITQYQVLLLDPPRVRFKQTAALNPATLLPETDDTLPIHHCLDTLDSLTSTRPDLT | |
| | DQPLAQAEATLFTDGSSYIRDGKRYAGAAVVTLDSVIWAEPLPIGTSAQKAELIALTKALEWSKDKSVNIYTDSRYAFATLHVHGMIYRERGWLTAGGKAIKN | |
| | APEILALLTAVWLPKRVAVMHCKGHQKDDAPTSTGNRRADEVAREVAIRPLSTQATISGSSGGGEAAAKMASNFTQFVLVDNGGTGDVTVAPSNFANGIA | |
| | EWISSNSRSQAYKVTCSVRQSSAQNRKYTIKVEVPKGAWRSYLNMELTIPIFATNSDCELIVKAMQGLLKDGNPIPSAIAANSGIYGGSGGSMASNFTQFVLV | |
| | DNGGTGDVTVAPSNFANGIAEWISSNSRSQAYKVTCSVRQSSAQNRKYTIKVEVPKGAWRSYLNMELTIPIFATNSDCELIVKAMQGLLKDGNPIPSAIAANS | |
| | GIYSGGSSGGSSGSETPGTSESATPESSGGSSGGSSDKKYSIGLDIGTNSVGWAVITDEYKVPSKKFKVLGNTDRHSIKKNLIGALLFDSGETAEATRLKRTARRR | |
| | YTRRKNRICYLQEIFSNEMAKVDDSFFHRLEESFLVEEDKKHERHPIFGNIVDEVAYHEKYPTIYHLRKKLVDSTDKADLRLIYLALAHMIKFRGHFLIEGDLNPD | |
| | NSDVDKLFIQLVQTYNQLFEENPINASGVDAKAILSARLSKSRRLENLIAQLPGEKKNGLFGNLIALSLGLTPNFKSNFDLAEDAKLQLSKDTYDDDLDNLLAQIG | |
| | DQYADLFLAAKNLSDAILLSDILRVNTEITKAPLSASMIKRYDEHHQDLTLLKALVRQQLPEKYKEIFFDQSKNGYAGYIDGGASQEEFYKFIKPILEKMDGTEELL | |
| | VKLNREDLLRKQRTFDNGSIPHQIHLGELHAILRRQEDFYPFLKDNREKIEKILTFRIPYYVGPLARGNSRFAWMTRKSEETITPWNFEEVVDKGASAQSFIERM | |
| | TNFDKNLPNEKVLPKHSLLYEYFTVYNELTKVKYVTEGMRKPAFLSGEQKKAIVDLLFKTNRKVTVKQLKEDYFKKIECFDSVEISGVEDRFNASLGTYHDLLKIIK | |
| | DKDFLDNEENEDILEDIVLTLTLFEDREMIEERLKTYAHLFDDKVMKQLKRRRYTGWGRLSRKLINGIRDKQSGKTILDFLKSDGFANRNFMQLIHDDSLTFKE | |
| | DIQKAQVSGQGDSLHEHIANLAGSPAIKKGILQTVKVVDELVKVMGRHKPENIVIEMARENQTTQKGQKNSRERMKRIEEGIKELGSQILKEHPVENTQLQN | |
| | EKLYLYYLQNGRDMYVDQELDINRLSDYDVDHIVPQSFLKDDSIDNKVLTRSDKARGKSDNVPSEEVVKKMKNYWRQLLNAKLITQRKFDNLTKAERGGLSE | |
| | LDKAGFIKRQLVETRQITKHVAQILDSRMNTKYDENDKLIREVKVITLKSKLVSDFRKDFQFYKVREINNYHHAHDAYLNAVVGTALIKKYPKLESEFVYGDYKV | |
| | YDVRKMIAKSEQEIGKATAKYFFYSNIMNFFKTEITLANGEIRKRPLIETNGETGEIVWDKGRDFATVRKVLSMPQVNIVKKTEVQTGGFSKESILPKRNSDKLI | |
| | ARKKDWDPKKYGGFDSPTVAYSVLVVAKVEKGKSKKLKSVKELLGITIMERSSFEKNPIDFLEAKGYKEVKKDLIIKLPKYSLFELENGRKRMLASAGELQKGNEL | |
| | ALPSKYVNFLYLASHYEKLKGSPEDNEQKQLFVEQHKHYLDEIIEQISEFSKRVILADANLDKVLSAYNKHRDKPIREQAENIIHLFTLTNLGAPAAFKYFDTTIDR | |
| | KRYTSTKEVLDATLIHQSITGLYETRIDLSQLGGDKRTADGSEFESPKKKAKVE | |
| PL12151 | MPAAKRVKLDGGTAPLEEEYRLFLEAPIQNVTLLEQWKREIPKVWAEINPPGLASTQAPIHVQLLSTALPVRVRQYPITLEAKRSLRETIRKFRAAGILRPVHSP | 16,190 |
| | WNTPLLPVRKSGTSEYRMVQDLREVNKRVETIHPTVPNPYTLLSLLPPDRIWYSVLDLKDAFFCIPLAPESQLIFAFEWADAEEGESGQLTWTRLPQGFKNSPT | |
| | LFNEALNRDLQGFRLDHPSVSLLQYVDDLLIAADTQAACLSATRDLLMTLAELGYRVSGKKAQLCQEEVTYLGFKIHKGSRSLSNSRTQAILQIPVPKTKRQVRE | |
| | FLGKIGYCRLFIPGFAELAQPLYAATRPGNDPLVWGEKEEEAFQSLKLALTQPPALALPSLDKPFQLFVEETSGAAKGVLTQALGPWKRPVAYLSKRLDPVAAG | |
| | WPRCLRAIAAAALLTREASKLTFGQDIEITSSHNLESLLRSPPDKWLTNARITQYQVLLLDPPRVRFKQTAALNPATLLPETDDTLPIHHCLDTLDSLTSTRPDLT | |
| | DQPLAQAEATLFTDGSSYIRDGKRYAGAAVVTLDSVIWAEPLPIGTSAQKAELIALTKALEWSKDKSVNIYTDSRYAFATLHVHGMIYRERGWLTAGGKAIKN | |
| | APEILALLTAVWLPKRVAVMHCKGHQKDDAPTSTGNRRADEVAREVAIRPLSTQATISGSSGGGEAAAKMASNFTQFVLVDNGGTGDVTVAPSNFANGIA | |
| | EWISSNSRSQAYKVTCSVRQSSAQNRKYTIKVEVPKGAWRSYLNMELTIPIFATNSDCELIVKAMQGLLKDGNPIPSAIAANSGIYGGSGGSMASNFTQFVLV | |
| | DNGGTGDVTVAPSNFANGIAEWISSNSRSQAYKVTCSVRQSSAQNRKYTIKVEVPKGAWRSYLNMELTIPIFATNSDCELIVKAMQGLLKDGNPIPSAIAANS | |
| | GIYGSSGSSGSSGSSGSSGSSDKKYSIGLDIGTNSVGWAVITDEYKVPSKKFKVLGNTDRHSIKKNLIGALLFDSGETAEATRLKRTARRRYTRRKNRICYLQEIFS | |
| | NEMAKVDDSFFHRLEESFLVEEDKKHERHPIFGNIVDEVAYHEKYPTIYHLRKKLVDSTDKADLRLIYLALAHMIKFRGHFLIEGDLNPDNSDVDKLFIQLVQTY | |
| | NQLFEENPINASGVDAKAILSARLSKSRRLENLIAQLPGEKKNGLFGNLIALSLGLTPNFKSNFDLAEDAKLQLSKDTYDDDLDNLLAQIGDQYADLFLAAKNLS | |
| | DAILLSDILRVNTEITKAPLSASMIKRYDEHHQDLTLLKALVRQQLPEKYKEIFFDQSKNGYAGYIDGGASQEEFYKFIKPILEKMDGTEELLVKLNREDLLRKQRT | |
| | FDNGSIPHQIHLGELHAILRRQEDFYPFLKDNREKIEKILTFRIPYYVGPLARGNSRFAWMTRKSEETITPWNFEEVVDKGASAQSFIERMTNFDKNLPNEKVLP | |
| | KHSLLYEYFTVYNELTKVKYVTEGMRKPAFLSGEQKKAIVDLLFKTNRKVTVKQLKEDYFKKIECFDSVEISGVEDRFNASLGTYHDLLKIIKDKDFLDNEENEDIL | |
| | EDIVLTLTLFEDREMIEERLKTYAHLFDDKVMKQLKRRRYTGWGRLSRKLINGIRDKQSGKTILDFLKSDGFANRNFMQLIHDDSLTFKEDIQKAQVSGQGDSL | |
| | HEHIANLAGSPAIKKGILQTVKVVDELVKVMGRHKPENIVIEMARENQTTQKGQKNSRERMKRIEEGIKELGSQILKEHPVENTQLQNEKLYLYYLQNGRDM | |
| | YVDQELDINRLSDYDVDHIVPQSFLKDDSIDNKVLTRSDKARGKSDNVPSEEVVKKMKNYWRQLLNAKLITQRKFDNLTKAERGGLSELDKAGFIKRQLVETR | |
| | QITKHVAQILDSRMNTKYDENDKLIREVKVITLKSKLVSDFRKDFQFYKVREINNYHHAHDAYLNAVVGTALIKKYPKLESEFVYGDYKVYDVRKMIAKSEQEIG | |
| | KATAKYFFYSNIMNFFKTEITLANGEIRKRPLIETNGETGEIVWDKGRDFATVRKVLSMPQVNIVKKTEVQTGGFSKESILPKRNSDKLIARKKDWDPKKYGGF | |
| | DSPTVAYSVLVVAKVEKGKSKKLKSVKELLGITIMERSSFEKNPIDFLEAKGYKEVKKDLIIKLPKYSLFELENGRKRMLASAGELQKGNELALPSKYVNFLYLASH | |
| | YEKLKGSPEDNEQKQLFVEQHKHYLDEIIEQISEFSKRVILADANLDKVLSAYNKHRDKPIREQAENIIHLFTLTNLGAPAAFKYFDTTIDRKRYTSTKEVLDATLIH | |
| | QSITGLYETRIDLSQLGGDKRTADGSEFESPKKKAKVE | |
| PL12152 | MPAAKRVKLDGGTAPLEEEYRLFLEAPIQNVTLLEQWKREIPKVWAEINPPGLASTQAPIHVQLLSTALPVRVRQYPITLEAKRSLRETIRKFRAAGILRPVHSP | 16,191 |
| | WNTPLLPVRKSGTSEYRMVQDLREVNKRVETIHPTVPNPYTLLSLLPPDRIWYSVLDLKDAFFCIPLAPESQLIFAFEWADAEEGESGQLTWTRLPQGFKNSPT | |
| | LFNEALNRDLQGFRLDHPSVSLLQYVDDLLIAADTQAACLSATRDLLMTLAELGYRVSGKKAQLCQEEVTYLGFKIHKGSRSLSNSRTQAILQIPVPKTKRQVRE | |
| | FLGKIGYCRLFIPGFAELAQPLYAATRPGNDPLVWGEKEEEAFQSLKLALTQPPALALPSLDKPFQLFVEETSGAAKGVLTQALGPWKRPVAYLSKRLDPVAAG | |
| | WPRCLRAIAAAALLTREASKLTFGQDIEITSSHNLESLLRSPPDKWLTNARITQYQVLLLDPPRVRFKQTAALNPATLLPETDDTLPIHHCLDTLDSLTSTRPDLT | |
| | DQPLAQAEATLFTDGSSYIRDGKRYAGAAVVTLDSVIWAEPLPIGTSAQKAELIALTKALEWSKDKSVNIYTDSRYAFATLHVHGMIYRERGWLTAGGKAIKN | |
| | APEILALLTAVWLPKRVAVMHCKGHQKDDAPTSTGNRRADEVAREVAIRPLSTQATISGSSGGGEAAAKMASNFTQFVLVDNGGTGDVTVAPSNFANGIA | |
| | EWISSNSRSQAYKVTCSVRQSSAQNRKYTIKVEVPKGAWRSYLNMELTIPIFATNSDCELIVKAMQGLLKDGNPIPSAIAANSGIYGGSGGSMASNFTQFVLV | |
| | DNGGTGDVTVAPSNFANGIAEWISSNSRSQAYKVTCSVRQSSAQNRKYTIKVEVPKGAWRSYLNMELTIPIFATNSDCELIVKAMQGLLKDGNPIPSAIAANS | |
| | GIYGSSGGGEAAAKDKKYSIGLDIGTNSVGWAVITDEYKVPSKKFKVLGNTDRHSIKKNLIGALLFDSGETAEATRLKRTARRRYTRRKNRICYLQEIFSNEMAK | |
| | VDDSFFHRLEESFLVEEDKKHERHPIFGNIVDEVAYHEKYPTIYHLRKKLVDSTDKADLRLIYLALAHMIKFRGHFLIEGDLNPDNSDVDKLFIQLVQTYNQLFEE | |
| | NPINASGVDAKAILSARLSKSRRLENLIAQLPGEKKNGLFGNLIALSLGLTPNFKSNFDLAEDAKLQLSKDTYDDDLDNLLAQIGDQYADLFLAAKNLSDAILLSD | |
| | ILRVNTEITKAPLSASMIKRYDEHHQDLTLLKALVRQQLPEKYKEIFFDQSKNGYAGYIDGGASQEEFYKFIKPILEKMDGTEELLVKLNREDLLRKQRTFDNGSI | |
| | PHQIHLGELHAILRRQEDFYPFLKDNREKIEKILTFRIPYYVGPLARGNSRFAWMTRKSEETITPWNFEEVVDKGASAQSFIERMTNFDKNLPNEKVLPKHSLLY | |
| | EYFTVYNELTKVKYVTEGMRKPAFLSGEQKKAIVDLLFKTNRKVTVKQLKEDYFKKIECFDSVEISGVEDRFNASLGTYHDLLKIIKDKDFLDNEENEDILEDIVLT | |
| | LTLFEDREMIEERLKTYAHLFDDKVMKQLKRRRYTGWGRLSRKLINGIRDKQSGKTILDFLKSDGFANRNFMQLIHDDSLTFKEDIQKAQVSGQGDSLHEHIA | |
| | NLAGSPAIKKGILQTVKVVDELVKVMGRHKPENIVIEMARENQTTQKGQKNSRERMKRIEEGIKELGSQILKEHPVENTQLQNEKLYLYYLQNGRDMYVDQE | |
| | LDINRLSDYDVDHIVPQSFLKDDSIDNKVLTRSDKARGKSDNVPSEEVVKKMKNYWRQLLNAKLITQRKFDNLTKAERGGLSELDKAGFIKRQLVETRQITKH | |
| | VAQILDSRMNTKYDENDKLIREVKVITLKSKLVSDFRKDFQFYKVREINNYHHAHDAYLNAVVGTALIKKYPKLESEFVYGDYKVYDVRKMIAKSEQEIGKATA | |
| | KYFFYSNIMNFFKTEITLANGEIRKRPLIETNGETGEIVWDKGRDFATVRKVLSMPQVNIVKKTEVQTGGFSKESILPKRNSDKLIARKKDWDPKKYGGFDSPT | |
| | VAYSVLVVAKVEKGKSKKLKSVKELLGITIMERSSFEKNPIDFLEAKGYKEVKKDLIIKLPKYSLFELENGRKRMLASAGELQKGNELALPSKYVNFLYLASHYEKLK | |
| | GSPEDNEQKQLFVEQHKHYLDEIIEQISEFSKRVILADANLDKVLSAYNKHRDKPIREQAENIIHLFTLTNLGAPAAFKYFDTTIDRKRYTSTKEVLDATLIHQSIT | |
| | GLYETRIDLSQLGGDKRTADGSEFESPKKKAKVE | |
| PL12153 | MPAAKRVKLDGGTAPLEEEYRLFLEAPIQNVTLLEQWKREIPKVWAEINPPGLASTQAPIHVQLLSTALPVRVRQYPITLEAKRSLRETIRKFRAAGILRPVHSP | 16,192 |
| | WNTPLLPVRKSGTSEYRMVQDLREVNKRVETIHPTVPNPYTLLSLLPPDRIWYSVLDLKDAFFCIPLAPESQLIFAFEWADAEEGESGQLTWTRLPQGFKNSPT | |
| | LFNEALNRDLQGFRLDHPSVSLLQYVDDLLIAADTQAACLSATRDLLMTLAELGYRVSGKKAQLCQEEVTYLGFKIHKGSRSLSNSRTQAILQIPVPKTKRQVRE | |
| | FLGKIGYCRLFIPGFAELAQPLYAATRPGNDPLVWGEKEEEAFQSLKLALTQPPALALPSLDKPFQLFVEETSGAAKGVLTQALGPWKRPVAYLSKRLDPVAAG | |
| | WPRCLRAIAAAALLTREASKLTFGQDIEITSSHNLESLLRSPPDKWLTNARITQYQVLLLDPPRVRFKQTAALNPATLLPETDDTLPIHHCLDTLDSLTSTRPDLT | |
| | DQPLAQAEATLFTDGSSYIRDGKRYAGAAVVTLDSVIWAEPLPIGTSAQKAELIALTKALEWSKDKSVNIYTDSRYAFATLHVHGMIYRERGWLTAGGKAIKN | |
| | APEILALLTAVWLPKRVAVMHCKGHQKDDAPTSTGNRRADEVAREVAIRPLSTQATISGSSGGGEAAAKMASNFTQFVLVDNGGTGDVTVAPSNFANGIA | |
| | EWISSNSRSQAYKVTCSVRQSSAQNRKYTIKVEVPKGAWRSYLNMELTIPIFATNSDCELIVKAMQGLLKDGNPIPSAIAANSGIYGGSGGSMASNFTQFVLV | |
| | DNGGTGDVTVAPSNFANGIAEWISSNSRSQAYKVTCSVRQSSAQNRKYTIKVEVPKGAWRSYLNMELTIPIFATNSDCELIVKAMQGLLKDGNPIPSAIAANS | |
| | GIYGGGSGGGSGGGSGGGSMASNFTQFVLVDNGGTGDVTVAPSNFANGIAEWISSNSRSQAYKVTCSVRQSSAQNRKYTIKVEVPKGAWRSYLNMELTIP | |
| | IFATNSDCELIVKAMQGLLKDGNPIPSAIAANSGIYGGSGGSMASNFTQFVLVDNGGTGDVTVAPSNFANGIAEWISSNSRSQAYKVTCSVRQSSAQNRKYT | |
| | IKVEVPKGAWRSYLNMELTIPIFATNSDCELIVKAMQGLLKDGNPIPSAIAANSGIYAEAAAKEAAAKEAAAKEAAAKALEAEAAAKEAAAKEAAAKEAAAKA | |
| | DKKYSIGLDIGTNSVGWAVITDEYKVPSKKFKVLGNTDRHSIKKNLIGALLFDSGETAEATRLKRTARRRYTRRKNRICYLQEIFSNEMAKVDDSFFHRLEESFLV | |
| | EEDKKHERHPIFGNIVDEVAYHEKYPTIYHLRKKLVDSTDKADLRLIYLALAHMIKFRGHFLIEGDLNPDNSDVDKLFIQLVQTYNQLFEENPINASGVDAKAILS | |
| | ARLSKSRRLENLIAQLPGEKKNGLFGNLIALSLGLTPNFKSNFDLAEDAKLQLSKDTYDDDLDNLLAQIGDQYADLFLAAKNLSDAILLSDILRVNTEITKAPLSAS | |
| | MIKRYDEHHQDLTLLKALVRQQLPEKYKEIFFDQSKNGYAGYIDGGASQEEFYKFIKPILEKMDGTEELLVKLNREDLLRKQRTFDNGSIPHQIHLGELHAILRR | |
| | QEDFYPFLKDNREKIEKILTFRIPYYVGPLARGNSRFAWMTRKSEETITPWNFEEVVDKGASAQSFIERMTNFDKNLPNEKVLPKHSLLYEYFTVYNELTKVKYV | |
| | TEGMRKPAFLSGEQKKAIVDLLFKTNRKVTVKQLKEDYFKKIECFDSVEISGVEDRFNASLGTYHDLLKIIKDKDFLDNEENEDILEDIVLTLTLFEDREMIEERLKT | |
| | YAHLFDDKVMKQLKRRRYTGWGRLSRKLINGIRDKQSGKTILDFLKSDGFANRNFMQLIHDDSLTFKEDIQKAQVSGQGDSLHEHIANLAGSPAIKKGILQTV | |
| | KVVDELVKVMGRHKPENIVIEMARENQTTQKGQKNSRERMKRIEEGIKELGSQILKEHPVENTQLQNEKLYLYYLQNGRDMYVDQELDINRLSDYDVDHIV | |
| | PQSFLKDDSIDNKVLTRSDKARGKSDNVPSEEVVKKMKNYWRQLLNAKLITQRKFDNLTKAERGGLSELDKAGFIKRQLVETRQITKHVAQILDSRMNTKYDE | |
| | NDKLIREVKVITLKSKLVSDFRKDFQFYKVREINNYHHAHDAYLNAVVGTALIKKYPKLESEFVYGDYKVYDVRKMIAKSEQEIGKATAKYFFYSNIMNFFKTEIT | |
| | LANGEIRKRPLIETNGETGEIVWDKGRDFATVRKVLSMPQVNIVKKTEVQTGGFSKESILPKRNSDKLIARKKDWDPKKYGGFDSPTVAYSVLVVAKVEKGKS | |
| | KKLKSVKELLGITIMERSSFEKNPIDFLEAKGYKEVKKDLIIKLPKYSLFELENGRKRMLASAGELQKGNELALPSKYVNFLYLASHYEKLKGSPEDNEQKQLFVEQ | |
| | HKHYLDEIIEQISEFSKRVILADANLDKVLSAYNKHRDKPIREQAENIIHLFTLTNLGAPAAFKYFDTTIDRKRYTSTKEVLDATLIHQSITGLYETRIDLSQLGGDKR | |
| | TADGSEFESPKKKAKVE | |
| PL12154 | MPAAKRVKLDGGTAPLEEEYRLFLEAPIQNVTLLEQWKREIPKVWAEINPPGLASTQAPIHVQLLSTALPVRVRQYPITLEAKRSLRETIRKFRAAGILRPVHSP | 16,193 |
| | WNTPLLPVRKSGTSEYRMVQDLREVNKRVETIHPTVPNPYTLLSLLPPDRIWYSVLDLKDAFFCIPLAPESQLIFAFEWADAEEGESGQLTWTRLPQGFKNSPT | |
| | LFNEALNRDLQGFRLDHPSVSLLQYVDDLLIAADTQAACLSATRDLLMTLAELGYRVSGKKAQLCQEEVTYLGFKIHKGSRSLSNSRTQAILQIPVPKTKRQVRE | |
| | FLGKIGYCRLFIPGFAELAQPLYAATRPGNDPLVWGEKEEEAFQSLKLALTQPPALALPSLDKPFQLFVEETSGAAKGVLTQALGPWKRPVAYLSKRLDPVAAG | |
| | WPRCLRAIAAAALLTREASKLTFGQDIEITSSHNLESLLRSPPDKWLTNARITQYQVLLLDPPRVRFKQTAALNPATLLPETDDTLPIHHCLDTLDSLTSTRPDLT | |
| | DQPLAQAEATLFTDGSSYIRDGKRYAGAAVVTLDSVIWAEPLPIGTSAQKAELIALTKALEWSKDKSVNIYTDSRYAFATLHVHGMIYRERGWLTAGGKAIKN | |
| | APEILALLTAVWLPKRVAVMHCKGHQKDDAPTSTGNRRADEVAREVAIRPLSTQATISGSSGGGEAAAKMASNFTQFVLVDNGGTGDVTVAPSNFANGIA | |
| | EWISSNSRSQAYKVTCSVRQSSAQNRKYTIKVEVPKGAWRSYLNMELTIPIFATNSDCELIVKAMQGLLKDGNPIPSAIAANSGIYGGSGGSMASNFTQFVLV | |
| | DNGGTGDVTVAPSNFANGIAEWISSNSRSQAYKVTCSVRQSSAQNRKYTIKVEVPKGAWRSYLNMELTIPIFATNSDCELIVKAMQGLLKDGNPIPSAIAANS | |
| | GIYGGGSGGGSGGGSGGGSMASNFTQFVLVDNGGTGDVTVAPSNFANGIAEWISSNSRSQAYKVTCSVRQSSAQNRKYTIKVEVPKGAWRSYLNMELTIP | |
| | IFATNSDCELIVKAMQGLLKDGNPIPSAIAANSGIYGGSGGSMASNFTQFVLVDNGGTGDVTVAPSNFANGIAEWISSNSRSQAYKVTCSVRQSSAQNRKYT | |
| | IKVEVPKGAWRSYLNMELTIPIFATNSDCELIVKAMQGLLKDGNPIPSAIAANSGIYSGGSSGGSSGSETPGTSESATPESSGGSSGGSSDKKYSIGLDIGTNSV | |
| | GWAVITDEYKVPSKKFKVLGNTDRHSIKKNLIGALLFDSGETAEATRLKRTARRRYTRRKNRICYLQEIFSNEMAKVDDSFFHRLEESFLVEEDKKHERHPIFGNI | |
| | VDEVAYHEKYPTIYHLRKKLVDSTDKADLRLIYLALAHMIKFRGHFLIEGDLNPDNSDVDKLFIQLVQTYNQLFEENPINASGVDAKAILSARLSKSRRLENLIAQ | |
| | LPGEKKNGLFGNLIALSLGLTPNFKSNFDLAEDAKLQLSKDTYDDDLDNLLAQIGDQYADLFLAAKNLSDAILLSDILRVNTEITKAPLSASMIKRYDEHHQDLTL | |
| | LKALVRQQLPEKYKEIFFDQSKNGYAGYIDGGASQEEFYKFIKPILEKMDGTEELLVKLNREDLLRKQRTFDNGSIPHQIHLGELHAILRRQEDFYPFLKDNREKI | |
| | EKILTFRIPYYVGPLARGNSRFAWMTRKSEETITPWNFEEVVDKGASAQSFIERMTNFDKNLPNEKVLPKHSLLYEYFTVYNELTKVKYVTEGMRKPAFLSGEQ | |
| | KKAIVDLLFKTNRKVTVKQLKEDYFKKIECFDSVEISGVEDRFNASLGTYHDLLKIIKDKDFLDNEENEDILEDIVLTLTLFEDREMIEERLKTYAHLFDDKVMKQL | |
| | KRRRYTGWGRLSRKLINGIRDKQSGKTILDFLKSDGFANRNFMQLIHDDSLTFKEDIQKAQVSGQGDSLHEHIANLAGSPAIKKGILQTVKVVDELVKVMGRH | |
| | KPENIVIEMARENQTTQKGQKNSRERMKRIEEGIKELGSQILKEHPVENTQLQNEKLYLYYLQNGRDMYVDQELDINRLSDYDVDHIVPQSFLKDDSIDNKVL | |
| | TRSDKARGKSDNVPSEEVVKKMKNYWRQLLNAKLITQRKFDNLTKAERGGLSELDKAGFIKRQLVETRQITKHVAQILDSRMNTKYDENDKLIREVKVITLKS | |
| | KLVSDFRKDFQFYKVREINNYHHAHDAYLNAVVGTALIKKYPKLESEFVYGDYKVYDVRKMIAKSEQEIGKATAKYFFYSNIMNFFKTEITLANGEIRKRPLIETN | |
| | GETGEIVWDKGRDFATVRKVLSMPQVNIVKKTEVQTGGFSKESILPKRNSDKLIARKKDWDPKKYGGFDSPTVAYSVLVVAKVEKGKSKKLKSVKELLGITIME | |
| | RSSFEKNPIDFLEAKGYKEVKKDLIIKLPKYSLFELENGRKRMLASAGELQKGNELALPSKYVNFLYLASHYEKLKGSPEDNEQKQLFVEQHKHYLDEIIEQISEFS | |
| | KRVILADANLDKVLSAYNKHRDKPIREQAENIIHLFTLTNLGAPAAFKYFDTTIDRKRYTSTKEVLDATLIHQSITGLYETRIDLSQLGGDKRTADGSEFESPKKKA | |
| | KVE | |
| PL12155 | MPAAKRVKLDGGTAPLEEEYRLFLEAPIQNVTLLEQWKREIPKVWAEINPPGLASTQAPIHVQLLSTALPVRVRQYPITLEAKRSLRETIRKFRAAGILRPVHSP | 16,194 |
| | WNTPLLPVRKSGTSEYRMVQDLREVNKRVETIHPTVPNPYTLLSLLPPDRIWYSVLDLKDAFFCIPLAPESQLIFAFEWADAEEGESGQLTWTRLPQGFKNSPT | |
| | LFNEALNRDLQGFRLDHPSVSLLQYVDDLLIAADTQAACLSATRDLLMTLAELGYRVSGKKAQLCQEEVTYLGFKIHKGSRSLSNSRTQAILQIPVPKTKRQVRE | |
| | FLGKIGYCRLFIPGFAELAQPLYAATRPGNDPLVWGEKEEEAFQSLKLALTQPPALALPSLDKPFQLFVEETSGAAKGVLTQALGPWKRPVAYLSKRLDPVAAG | |
| | WPRCLRAIAAAALLTREASKLTFGQDIEITSSHNLESLLRSPPDKWLTNARITQYQVLLLDPPRVRFKQTAALNPATLLPETDDTLPIHHCLDTLDSLTSTRPDLT | |
| | DQPLAQAEATLFTDGSSYIRDGKRYAGAAVVTLDSVIWAEPLPIGTSAQKAELIALTKALEWSKDKSVNIYTDSRYAFATLHVHGMIYRERGWLTAGGKAIKN | |
| | APEILALLTAVWLPKRVAVMHCKGHQKDDAPTSTGNRRADEVAREVAIRPLSTQATISGSSGGGEAAAKMASNFTQFVLVDNGGTGDVTVAPSNFANGIA | |
| | EWISSNSRSQAYKVTCSVRQSSAQNRKYTIKVEVPKGAWRSYLNMELTIPIFATNSDCELIVKAMQGLLKDGNPIPSAIAANSGIYGGSGGSMASNFTQFVLV | |
| | DNGGTGDVTVAPSNFANGIAEWISSNSRSQAYKVTCSVRQSSAQNRKYTIKVEVPKGAWRSYLNMELTIPIFATNSDCELIVKAMQGLLKDGNPIPSAIAANS | |
| | GIYGGGSGGGSGGGSGGGSMASNFTQFVLVDNGGTGDVTVAPSNFANGIAEWISSNSRSQAYKVTCSVRQSSAQNRKYTIKVEVPKGAWRSYLNMELTIP | |
| | IFATNSDCELIVKAMQGLLKDGNPIPSAIAANSGIYGGSGGSMASNFTQFVLVDNGGTGDVTVAPSNFANGIAEWISSNSRSQAYKVTCSVRQSSAQNRKYT | |
| | IKVEVPKGAWRSYLNMELTIPIFATNSDCELIVKAMQGLLKDGNPIPSAIAANSGIYGSSGSSGSSGSSGSSGSSDKKYSIGLDIGTNSVGWAVITDEYKVPSKKF | |
| | KVLGNTDRHSIKKNLIGALLFDSGETAEATRLKRTARRRYTRRKNRICYLQEIFSNEMAKVDDSFFHRLEESFLVEEDKKHERHPIFGNIVDEVAYHEKYPTIYHL | |
| | RKKLVDSTDKADLRLIYLALAHMIKFRGHFLIEGDLNPDNSDVDKLFIQLVQTYNQLFEENPINASGVDAKAILSARLSKSRRLENLIAQLPGEKKNGLFGNLIAL | |
| | SLGLTPNFKSNFDLAEDAKLQLSKDTYDDDLDNLLAQIGDQYADLFLAAKNLSDAILLSDILRVNTEITKAPLSASMIKRYDEHHQDLTLLKALVRQQLPEKYKEI | |
| | FFDQSKNGYAGYIDGGASQEEFYKFIKPILEKMDGTEELLVKLNREDLLRKQRTFDNGSIPHQIHLGELHAILRRQEDFYPFLKDNREKIEKILTFRIPYYVGPLAR | |
| | GNSRFAWMTRKSEETITPWNFEEVVDKGASAQSFIERMTNFDKNLPNEKVLPKHSLLYEYFTVYNELTKVKYVTEGMRKPAFLSGEQKKAIVDLLFKTNRKVT | |
| | VKQLKEDYFKKIECFDSVEISGVEDRFNASLGTYHDLLKIIKDKDFLDNEENEDILEDIVLTLTLFEDREMIEERLKTYAHLFDDKVMKQLKRRRYTGWGRLSRKLI | |
| | NGIRDKQSGKTILDFLKSDGFANRNFMQLIHDDSLTFKEDIQKAQVSGQGDSLHEHIANLAGSPAIKKGILQTVKVVDELVKVMGRHKPENIVIEMARENQTT | |
| | QKGQKNSRERMKRIEEGIKELGSQILKEHPVENTQLQNEKLYLYYLQNGRDMYVDQELDINRLSDYDVDHIVPQSFLKDDSIDNKVLTRSDKARGKSDNVPSE | |
| | EVVKKMKNYWRQLLNAKLITQRKFDNLTKAERGGLSELDKAGFIKRQLVETRQITKHVAQILDSRMNTKYDENDKLIREVKVITLKSKLVSDFRKDFQFYKVRE | |
| | INNYHHAHDAYLNAVVGTALIKKYPKLESEFVYGDYKVYDVRKMIAKSEQEIGKATAKYFFYSNIMNFFKTEITLANGEIRKRPLIETNGETGEIVWDKGRDFAT | |
| | VRKVLSMPQVNIVKKTEVQTGGFSKESILPKRNSDKLIARKKDWDPKKYGGFDSPTVAYSVLVVAKVEKGKSKKLKSVKELLGITIMERSSFEKNPIDFLEAKGY | |
| | KEVKKDLIIKLPKYSLFELENGRKRMLASAGELQKGNELALPSKYVNFLYLASHYEKLKGSPEDNEQKQLFVEQHKHYLDEIIEQISEFSKRVILADANLDKVLSAY | |
| | NKHRDKPIREQAENIIHLFTLTNLGAPAAFKYFDTTIDRKRYTSTKEVLDATLIHQSITGLYETRIDLSQLGGDKRTADGSEFESPKKKAKVE | |
| PL12156 | MPAAKRVKLDGGTAPLEEEYRLFLEAPIQNVTLLEQWKREIPKVWAEINPPGLASTQAPIHVQLLSTALPVRVRQYPITLEAKRSLRETIRKFRAAGILRPVHSP | 16,195 |
| | WNTPLLPVRKSGTSEYRMVQDLREVNKRVETIHPTVPNPYTLLSLLPPDRIWYSVLDLKDAFFCIPLAPESQLIFAFEWADAEEGESGQLTWTRLPQGFKNSPT | |
| | LFNEALNRDLQGFRLDHPSVSLLQYVDDLLIAADTQAACLSATRDLLMTLAELGYRVSGKKAQLCQEEVTYLGFKIHKGSRSLSNSRTQAILQIPVPKTKRQVRE | |
| | FLGKIGYCRLFIPGFAELAQPLYAATRPGNDPLVWGEKEEEAFQSLKLALTQPPALALPSLDKPFQLFVEETSGAAKGVLTQALGPWKRPVAYLSKRLDPVAAG | |
| | WPRCLRAIAAAALLTREASKLTFGQDIEITSSHNLESLLRSPPDKWLTNARITQYQVLLLDPPRVRFKQTAALNPATLLPETDDTLPIHHCLDTLDSLTSTRPDLT | |
| | DQPLAQAEATLFTDGSSYIRDGKRYAGAAVVTLDSVIWAEPLPIGTSAQKAELIALTKALEWSKDKSVNIYTDSRYAFATLHVHGMIYRERGWLTAGGKAIKN | |
| | APEILALLTAVWLPKRVAVMHCKGHQKDDAPTSTGNRRADEVAREVAIRPLSTQATISGSSGGGEAAAKMASNFTQFVLVDNGGTGDVTVAPSNFANGIA | |
| | EWISSNSRSQAYKVTCSVRQSSAQNRKYTIKVEVPKGAWRSYLNMELTIPIFATNSDCELIVKAMQGLLKDGNPIPSAIAANSGIYGGSGGSMASNFTQFVLV | |
| | DNGGTGDVTVAPSNFANGIAEWISSNSRSQAYKVTCSVRQSSAQNRKYTIKVEVPKGAWRSYLNMELTIPIFATNSDCELIVKAMQGLLKDGNPIPSAIAANS | |
| | GIYGGGSGGGSGGGSGGGSMASNFTQFVLVDNGGTGDVTVAPSNFANGIAEWISSNSRSQAYKVTCSVRQSSAQNRKYTIKVEVPKGAWRSYLNMELTIP | |
| | IFATNSDCELIVKAMQGLLKDGNPIPSAIAANSGIYGGSGGSMASNFTQFVLVDNGGTGDVTVAPSNFANGIAEWISSNSRSQAYKVTCSVRQSSAQNRKYT | |
| | IKVEVPKGAWRSYLNMELTIPIFATNSDCELIVKAMQGLLKDGNPIPSAIAANSGIYGSSGGGEAAAKDKKYSIGLDIGTNSVGWAVITDEYKVPSKKFKVLGN | |
| | TDRHSIKKNLIGALLFDSGETAEATRLKRTARRRYTRRKNRICYLQEIFSNEMAKVDDSFFHRLEESFLVEEDKKHERHPIFGNIVDEVAYHEKYPTIYHLRKKLVD | |
| | STDKADLRLIYLALAHMIKFRGHFLIEGDLNPDNSDVDKLFIQLVQTYNQLFEENPINASGVDAKAILSARLSKSRRLENLIAQLPGEKKNGLFGNLIALSLGLTP | |
| | NFKSNFDLAEDAKLQLSKDTYDDDLDNLLAQIGDQYADLFLAAKNLSDAILLSDILRVNTEITKAPLSASMIKRYDEHHQDLTLLKALVRQQLPEKYKEIFFDQSK | |
| | NGYAGYIDGGASQEEFYKFIKPILEKMDGTEELLVKLNREDLLRKQRTFDNGSIPHQIHLGELHAILRRQEDFYPFLKDNREKIEKILTFRIPYYVGPLARGNSRFA | |
| | WMTRKSEETITPWNFEEVVDKGASAQSFIERMTNFDKNLPNEKVLPKHSLLYEYFTVYNELTKVKYVTEGMRKPAFLSGEQKKAIVDLLFKTNRKVTVKQLKE | |
| | DYFKKIECFDSVEISGVEDRFNASLGTYHDLLKIIKDKDFLDNEENEDILEDIVLTLTLFEDREMIEERLKTYAHLFDDKVMKQLKRRRYTGWGRLSRKLINGIRDK | |
| | QSGKTILDFLKSDGFANRNFMQLIHDDSLTFKEDIQKAQVSGQGDSLHEHIANLAGSPAIKKGILQTVKVVDELVKVMGRHKPENIVIEMARENQTTQKGQK | |
| | NSRERMKRIEEGIKELGSQILKEHPVENTQLQNEKLYLYYLQNGRDMYVDQELDINRLSDYDVDHIVPQSFLKDDSIDNKVLTRSDKARGKSDNVPSEEVVKK | |
| | MKNYWRQLLNAKLITQRKFDNLTKAERGGLSELDKAGFIKRQLVETRQITKHVAQILDSRMNTKYDENDKLIREVKVITLKSKLVSDFRKDFQFYKVREINNYH | |
| | HAHDAYLNAVVGTALIKKYPKLESEFVYGDYKVYDVRKMIAKSEQEIGKATAKYFFYSNIMNFFKTEITLANGEIRKRPLIETNGETGEIVWDKGRDFATVRKVL | |
| | SMPQVNIVKKTEVQTGGFSKESILPKRNSDKLIARKKDWDPKKYGGFDSPTVAYSVLVVAKVEKGKSKKLKSVKELLGITIMERSSFEKNPIDFLEAKGYKEVKK | |
| | DLIIKLPKYSLFELENGRKRMLASAGELQKGNELALPSKYVNFLYLASHYEKLKGSPEDNEQKQLFVEQHKHYLDEIIEQISEFSKRVILADANLDKVLSAYNKHR | |
| | DKPIREQAENIIHLFTLTNLGAPAAFKYFDTTIDRKRYTSTKEVLDATLIHQSITGLYETRIDLSQLGGDKRTADGSEFESPKKKAKVE | |

TABLE S3
Exemplary gene modifying sequences for Configuration 3
(i.e., Cas9-linker-RT-linker-(RBP)n)

| | | SEQ ID |
|---|---|---|
| Identifier | Full Amino Acid Sequence | NO: |
| PL12085 | MPAAKRVKLDGGDKKYSIGLDIGTNSVGWAVITDEYKVPSKKFKVLGNTDRHSIKKNLIG | 16,200 |
| | ALLFDSGETAEATRLKRTARRRYTRRKNRICYLQEIFSNEMAKVDDSFFHRLEESFLVEE | |
| | DKKHERHPIFGNIVDEVAYHEKYPTIYHLRKKLVDSTDKADLRLIYLALAHMIKFRGHFL | |
| | IEGDLNPDNSDVDKLFIQLVQTYNQLFEENPINASGVDAKAILSARLSKSRRLENLIAQL | |
| | PGEKKNGLFGNLIALSLGLTPNFKSNFDLAEDAKLQLSKDTYDDDLDNLLAQIGDQYADL | |
| | FLAAKNLSDAILLSDILRVNTEITKAPLSASMIKRYDEHHQDLTLLKALVRQQLPEKYKE | |
| | IFFDQSKNGYAGYIDGGASQEEFYKFIKPILEKMDGTEELLVKLNREDLLRKQRTFDNGS | |
| | IPHQIHLGELHAILRRQEDFYPFLKDNREKIEKILTFRIPYYVGPLARGNSRFAWMTRKS | |
| | EETITPWNFEEVVDKGASAQSFIERMTNFDKNLPNEKVLPKHSLLYEYFTVYNELTKVKY | |
| | VTEGMRKPAFLSGEQKKAIVDLLFKTNRKVTVKQLKEDYFKKIECFDSVEISGVEDRFNA | |
| | SLGTYHDLLKIIKDKDFLDNEENEDILEDIVLTLTLFEDREMIEERLKTYAHLFDDKVMK | |
| | QLKRRRYTGWGRLSRKLINGIRDKQSGKTILDFLKSDGFANRNFMQLIHDDSLTFKEDIQ | |
| | KAQVSGQGDSLHEHIANLAGSPAIKKGILQTVKVVDELVKVMGRHKPENIVIEMARENQT | |
| | TQKGQKNSRERMKRIEEGIKELGSQILKEHPVENTQLQNEKLYLYYLQNGRDMYVDQELD | |
| | INRLSDYDVDHIVPQSFLKDDSIDNKVLTRSDKARGKSDNVPSEEVVKKMKNYWRQLLNA | |
| | KLITQRKFDNLTKAERGGLSELDKAGFIKRQLVETRQITKHVAQILDSRMNTKYDENDKL | |
| | IREVKVITLKSKLVSDFRKDFQFYKVREINNYHHAHDAYLNAVVGTALIKKYPKLESEFV | |
| | YGDYKVYDVRKMIAKSEQEIGKATAKYFFYSNIMNFFKTEITLANGEIRKRPLIETNGET | |
| | GEIVWDKGRDFATVRKVLSMPQVNIVKKTEVQTGGFSKESILPKRNSDKLIARKKDWDPK | |
| | KYGGFDSPTVAYSVLVVAKVEKGKSKKLKSVKELLGITIMERSSFEKNPIDFLEAKGYKE | |
| | VKKDLIIKLPKYSLFELENGRKRMLASAGELQKGNELALPSKYVNFLYLASHYEKLKGSP | |
| | EDNEQKQLFVEQHKHYLDEIIEQISEFSKRVILADANLDKVLSAYNKHRDKPIREQAENI | |
| | IHLFTLTNLGAPAAFKYFDTTIDRKRYTSTKEVLDATLIHQSITGLYETRIDLSQLGGDA | |
| | EAAAKEAAAKEAAAKEAAAKALEAEAAAKEAAAKEAAAKEAAAKATAPLEEEYRLFLEAP | |
| | IQNVTLLEQWKREIPKVWAEINPPGLASTQAPIHVQLLSTALPVRVRQYPITLEAKRSLR | |
| | ETIRKFRAAGILRPVHSPWNTPLLPVRKSGTSEYRMVQDLREVNKRVETIHPTVPNPYTL | |
| | LSLLPPDRIWYSVLDLKDAFFCIPLAPESQLIFAFEWADAEEGESGQLTWTRLPQGFKNS | |
| | PTLFNEALNRDLQGFRLDHPSVSLLQYVDDLLIAADTQAACLSATRDLLMTLAELGYRVS | |
| | GKKAQLCQEEVTYLGFKIHKGSRSLSNSRTQAILQIPVPKTKRQVREFLGKIGYCRLFIP | |
| | GFAELAQPLYAATRPGNDPLVWGEKEEEAFQSLKLALTQPPALALPSLDKPFQLFVEETS | |
| | GAAKGVLTQALGPWKRPVAYLSKRLDPVAAGWPRCLRAIAAAALLTREASKLTFGQDIEI | |
| | TSSHNLESLLRSPPDKWLTNARITQYQVLLLDPPRVRFKQTAALNPATLLPETDDTLPIH | |
| | HCLDTLDSLTSTRPDLTDQPLAQAEATLFTDGSSYIRDGKRYAGAAVVTLDSVIWAEPLP | |
| | IGTSAQKAELIALTKALEWSKDKSVNIYTDSRYAFATLHVHGMIYRERGWLTAGGKAIKN | |
| | APEILALLTAVWLPKRVAVMHCKGHQKDDAPTSTGNRRADEVAREVAIRPLSTQATISAE | |
| | AAAKEAAAKEAAAKEAAAKALEAEAAAKEAAAKEAAAKEAAAKAMASNFTQFVLVDNGGT | |
| | GDVTVAPSNFANGIAEWISSNSRSQAYKVTCSVRQSSAQNRKYTIKVEVPKGAWRSYLNM | |
| | ELTIPIFATNSDCELIVKAMQGLLKDGNPIPSAIAANSGIYKRTADGSEFESPKKKAKVE | |
| PL12086 | MPAAKRVKLDGGDKKYSIGLDIGTNSVGWAVITDEYKVPSKKFKVLGNTDRHSIKKNLIG | 16,201 |
| | ALLFDSGETAEATRLKRTARRRYTRRKNRICYLQEIFSNEMAKVDDSFFHRLEESFLVEE | |
| | DKKHERHPIFGNIVDEVAYHEKYPTIYHLRKKLVDSTDKADLRLIYLALAHMIKFRGHFL | |
| | IEGDLNPDNSDVDKLFIQLVQTYNQLFEENPINASGVDAKAILSARLSKSRRLENLIAQL | |
| | PGEKKNGLFGNLIALSLGLTPNFKSNFDLAEDAKLQLSKDTYDDDLDNLLAQIGDQYADL | |
| | FLAAKNLSDAILLSDILRVNTEITKAPLSASMIKRYDEHHQDLTLLKALVRQQLPEKYKE | |
| | IFFDQSKNGYAGYIDGGASQEEFYKFIKPILEKMDGTEELLVKLNREDLLRKQRTFDNGS | |
| | IPHQIHLGELHAILRRQEDFYPFLKDNREKIEKILTFRIPYYVGPLARGNSRFAWMTRKS | |
| | EETITPWNFEEVVDKGASAQSFIERMTNFDKNLPNEKVLPKHSLLYEYFTVYNELTKVKY | |
| | VTEGMRKPAFLSGEQKKAIVDLLFKTNRKVTVKQLKEDYFKKIECFDSVEISGVEDRFNA | |
| | SLGTYHDLLKIIKDKDFLDNEENEDILEDIVLTLTLFEDREMIEERLKTYAHLFDDKVMK | |
| | QLKRRRYTGWGRLSRKLINGIRDKQSGKTILDFLKSDGFANRNFMQLIHDDSLTFKEDIQ | |
| | KAQVSGQGDSLHEHIANLAGSPAIKKGILQTVKVVDELVKVMGRHKPENIVIEMARENQT | |
| | TQKGQKNSRERMKRIEEGIKELGSQILKEHPVENTQLQNEKLYLYYLQNGRDMYVDQELD | |
| | INRLSDYDVDHIVPQSFLKDDSIDNKVLTRSDKARGKSDNVPSEEVVKKMKNYWRQLLNA | |
| | KLITQRKFDNLTKAERGGLSELDKAGFIKRQLVETRQITKHVAQILDSRMNTKYDENDKL | |
| | IREVKVITLKSKLVSDFRKDFQFYKVREINNYHHAHDAYLNAVVGTALIKKYPKLESEFV | |
| | YGDYKVYDVRKMIAKSEQEIGKATAKYFFYSNIMNFFKTEITLANGEIRKRPLIETNGET | |
| | GEIVWDKGRDFATVRKVLSMPQVNIVKKTEVQTGGFSKESILPKRNSDKLIARKKDWDPK | |
| | KYGGFDSPTVAYSVLVVAKVEKGKSKKLKSVKELLGITIMERSSFEKNPIDFLEAKGYKE | |
| | VKKDLIIKLPKYSLFELENGRKRMLASAGELQKGNELALPSKYVNFLYLASHYEKLKGSP | |
| | EDNEQKQLFVEQHKHYLDEIIEQISEFSKRVILADANLDKVLSAYNKHRDKPIREQAENI | |
| | IHLFTLTNLGAPAAFKYFDTTIDRKRYTSTKEVLDATLIHQSITGLYETRIDLSQLGGDA | |
| | EAAAKEAAAKEAAAKEAAAKALEAEAAAKEAAAKEAAAKEAAAKATAPLEEEYRLFLEAP | |
| | IQNVTLLEQWKREIPKVWAEINPPGLASTQAPIHVQLLSTALPVRVRQYPITLEAKRSLR | |
| | ETIRKFRAAGILRPVHSPWNTPLLPVRKSGTSEYRMVQDLREVNKRVETIHPTVPNPYTL | |
| | LSLLPPDRIWYSVLDLKDAFFCIPLAPESQLIFAFEWADAEEGESGQLTWTRLPQGFKNS | |
| | PTLFNEALNRDLQGFRLDHPSVSLLQYVDDLLIAADTQAACLSATRDLLMTLAELGYRVS | |
| | GKKAQLCQEEVTYLGFKIHKGSRSLSNSRTQAILQIPVPKTKRQVREFLGKIGYCRLFIP | |
| | GFAELAQPLYAATRPGNDPLVWGEKEEEAFQSLKLALTQPPALALPSLDKPFQLFVEETS | |
| | GAAKGVLTQALGPWKRPVAYLSKRLDPVAAGWPRCLRAIAAAALLTREASKLTFGQDIEI | |
| | TSSHNLESLLRSPPDKWLTNARITQYQVLLLDPPRVRFKQTAALNPATLLPETDDTLPIH | |
| | HCLDTLDSLTSTRPDLTDQPLAQAEATLFTDGSSYIRDGKRYAGAAVVTLDSVIWAEPLP | |
| | IGTSAQKAELIALTKALEWSKDKSVNIYTDSRYAFATLHVHGMIYRERGWLTAGGKAIKN | |
| | APEILALLTAVWLPKRVAVMHCKGHQKDDAPTSTGNRRADEVAREVAIRPLSTQATISAE | |
| | AAAKEAAAKEAAAKEAAAKALEAEAAAKEAAAKEAAAKEAAAKAMASNFTQFVLVDNGGT | |
| | GDVTVAPSNFANGIAEWISSNSRSQAYKVTCSVRQSSAQNRKYTIKVEVPKGAWRSYLNM | |
| | ELTIPIFATNSDCELIVKAMQGLLKDGNPIPSAIAANSGIYGGSGGSMASNFTQFVLVDN | |
| | GGTGDVTVAPSNFANGIAEWISSNSRSQAYKVTCSVRQSSAQNRKYTIKVEVPKGAWRSY | |
| | LNMELTIPIFATNSDCELIVKAMQGLLKDGNPIPSAIAANSGIYKRTADGSEFESPKKKA | |
| | KVE | |
| PL12087 | MPAAKRVKLDGGDKKYSIGLDIGTNSVGWAVITDEYKVPSKKFKVLGNTDRHSIKKNLIG | 16,202 |
| | ALLFDSGETAEATRLKRTARRRYTRRKNRICYLQEIFSNEMAKVDDSFFHRLEESFLVEE | |
| | DKKHERHPIFGNIVDEVAYHEKYPTIYHLRKKLVDSTDKADLRLIYLALAHMIKFRGHFL | |
| | IEGDLNPDNSDVDKLFIQLVQTYNQLFEENPINASGVDAKAILSARLSKSRRLENLIAQL | |
| | PGEKKNGLFGNLIALSLGLTPNFKSNFDLAEDAKLQLSKDTYDDDLDNLLAQIGDQYADL | |
| | FLAAKNLSDAILLSDILRVNTEITKAPLSASMIKRYDEHHQDLTLLKALVRQQLPEKYKE | |
| | IFFDQSKNGYAGYIDGGASQEEFYKFIKPILEKMDGTEELLVKLNREDLLRKQRTFDNGS | |
| | IPHQIHLGELHAILRRQEDFYPFLKDNREKIEKILTFRIPYYVGPLARGNSRFAWMTRKS | |
| | EETITPWNFEEVVDKGASAQSFIERMTNFDKNLPNEKVLPKHSLLYEYFTVYNELTKVKY | |
| | VTEGMRKPAFLSGEQKKAIVDLLFKTNRKVTVKQLKEDYFKKIECFDSVEISGVEDRFNA | |
| | SLGTYHDLLKIIKDKDFLDNEENEDILEDIVLTLTLFEDREMIEERLKTYAHLFDDKVMK | |
| | QLKRRRYTGWGRLSRKLINGIRDKQSGKTILDFLKSDGFANRNFMQLIHDDSLTFKEDIQ | |
| | KAQVSGQGDSLHEHIANLAGSPAIKKGILQTVKVVDELVKVMGRHKPENIVIEMARENQT | |
| | TQKGQKNSRERMKRIEEGIKELGSQILKEHPVENTQLQNEKLYLYYLQNGRDMYVDQELD | |
| | INRLSDYDVDHIVPQSFLKDDSIDNKVLTRSDKARGKSDNVPSEEVVKKMKNYWRQLLNA | |
| | KLITQRKFDNLTKAERGGLSELDKAGFIKRQLVETRQITKHVAQILDSRMNTKYDENDKL | |
| | IREVKVITLKSKLVSDFRKDFQFYKVREINNYHHAHDAYLNAVVGTALIKKYPKLESEFV | |
| | YGDYKVYDVRKMIAKSEQEIGKATAKYFFYSNIMNFFKTEITLANGEIRKRPLIETNGET | |
| | GEIVWDKGRDFATVRKVLSMPQVNIVKKTEVQTGGFSKESILPKRNSDKLIARKKDWDPK | |
| | KYGGFDSPTVAYSVLVVAKVEKGKSKKLKSVKELLGITIMERSSFEKNPIDFLEAKGYKE | |
| | VKKDLIIKLPKYSLFELENGRKRMLASAGELQKGNELALPSKYVNFLYLASHYEKLKGSP | |
| | EDNEQKQLFVEQHKHYLDEIIEQISEFSKRVILADANLDKVLSAYNKHRDKPIREQAENI | |
| | IHLFTLTNLGAPAAFKYFDTTIDRKRYTSTKEVLDATLIHQSITGLYETRIDLSQLGGDA | |
| | EAAAKEAAAKEAAAKEAAAKALEAEAAAKEAAAKEAAAKEAAAKATAPLEEEYRLFLEAP | |
| | IQNVTLLEQWKREIPKVWAEINPPGLASTQAPIHVQLLSTALPVRVRQYPITLEAKRSLR | |
| | ETIRKFRAAGILRPVHSPWNTPLLPVRKSGTSEYRMVQDLREVNKRVETIHPTVPNPYTL | |
| | LSLLPPDRIWYSVLDLKDAFFCIPLAPESQLIFAFEWADAEEGESGQLTWTRLPQGFKNS | |
| | PTLFNEALNRDLQGFRLDHPSVSLLQYVDDLLIAADTQAACLSATRDLLMTLAELGYRVS | |
| | GKKAQLCQEEVTYLGFKIHKGSRSLSNSRTQAILQIPVPKTKRQVREFLGKIGYCRLFIP | |
| | GFAELAQPLYAATRPGNDPLVWGEKEEEAFQSLKLALTQPPALALPSLDKPFQLFVEETS | |
| | GAAKGVLTQALGPWKRPVAYLSKRLDPVAAGWPRCLRAIAAAALLTREASKLTFGQDIEI | |
| | TSSHNLESLLRSPPDKWLTNARITQYQVLLLDPPRVRFKQTAALNPATLLPETDDTLPIH | |
| | HCLDTLDSLTSTRPDLTDQPLAQAEATLFTDGSSYIRDGKRYAGAAVVTLDSVIWAEPLP | |
| | IGTSAQKAELIALTKALEWSKDKSVNIYTDSRYAFATLHVHGMIYRERGWLTAGGKAIKN | |
| | APEILALLTAVWLPKRVAVMHCKGHQKDDAPTSTGNRRADEVAREVAIRPLSTQATISAE | |
| | AAAKEAAAKEAAAKEAAAKALEAEAAAKEAAAKEAAAKEAAAKAMASNFTQFVLVDNGGT | |
| | GDVTVAPSNFANGIAEWISSNSRSQAYKVTCSVRQSSAQNRKYTIKVEVPKGAWRSYLNM | |
| | ELTIPIFATNSDCELIVKAMQGLLKDGNPIPSAIAANSGIYGGSGGSMASNFTQFVLVDN | |
| | GGTGDVTVAPSNFANGIAEWISSNSRSQAYKVTCSVRQSSAQNRKYTIKVEVPKGAWRSY | |
| | LNMELTIPIFATNSDCELIVKAMQGLLKDGNPIPSAIAANSGIYGGGSGGGSGGGSGGGS | |
| | MASNFTQFVLVDNGGTGDVTVAPSNFANGIAEWISSNSRSQAYKVTCSVRQSSAQNRKYT | |
| | IKVEVPKGAWRSYLNMELTIPIFATNSDCELIVKAMQGLLKDGNPIPSAIAANSGIYGGS | |
| | GGSMASNFTQFVLVDNGGTGDVTVAPSNFANGIAEWISSNSRSQAYKVTCSVRQSSAQNR | |
| | KYTIKVEVPKGAWRSYLNMELTIPIFATNSDCELIVKAMQGLLKDGNPIPSAIAANSGIY | |
| | KRTADGSEFESPKKKAKVE | |
| PL12088 | MPAAKRVKLDGGDKKYSIGLDIGTNSVGWAVITDEYKVPSKKFKVLGNTDRHSIKKNLIG | 16,203 |
| | ALLFDSGETAEATRLKRTARRRYTRRKNRICYLQEIFSNEMAKVDDSFFHRLEESFLVEE | |
| | DKKHERHPIFGNIVDEVAYHEKYPTIYHLRKKLVDSTDKADLRLIYLALAHMIKFRGHFL | |
| | IEGDLNPDNSDVDKLFIQLVQTYNQLFEENPINASGVDAKAILSARLSKSRRLENLIAQL | |
| | PGEKKNGLFGNLIALSLGLTPNFKSNFDLAEDAKLQLSKDTYDDDLDNLLAQIGDQYADL | |
| | FLAAKNLSDAILLSDILRVNTEITKAPLSASMIKRYDEHHQDLTLLKALVRQQLPEKYKE | |
| | IFFDQSKNGYAGYIDGGASQEEFYKFIKPILEKMDGTEELLVKLNREDLLRKQRTFDNGS | |
| | IPHQIHLGELHAILRRQEDFYPFLKDNREKIEKILTFRIPYYVGPLARGNSRFAWMTRKS | |
| | EETITPWNFEEVVDKGASAQSFIERMTNFDKNLPNEKVLPKHSLLYEYFTVYNELTKVKY | |
| | VTEGMRKPAFLSGEQKKAIVDLLFKTNRKVTVKQLKEDYFKKIECFDSVEISGVEDRFNA | |
| | SLGTYHDLLKIIKDKDFLDNEENEDILEDIVLTLTLFEDREMIEERLKTYAHLFDDKVMK | |
| | QLKRRRYTGWGRLSRKLINGIRDKQSGKTILDFLKSDGFANRNFMQLIHDDSLTFKEDIQ | |
| | KAQVSGQGDSLHEHIANLAGSPAIKKGILQTVKVVDELVKVMGRHKPENIVIEMARENQT | |
| | TQKGQKNSRERMKRIEEGIKELGSQILKEHPVENTQLQNEKLYLYYLQNGRDMYVDQELD | |
| | INRLSDYDVDHIVPQSFLKDDSIDNKVLTRSDKARGKSDNVPSEEVVKKMKNYWRQLLNA | |
| | KLITQRKFDNLTKAERGGLSELDKAGFIKRQLVETRQITKHVAQILDSRMNTKYDENDKL | |
| | IREVKVITLKSKLVSDFRKDFQFYKVREINNYHHAHDAYLNAVVGTALIKKYPKLESEFV | |
| | YGDYKVYDVRKMIAKSEQEIGKATAKYFFYSNIMNFFKTEITLANGEIRKRPLIETNGET | |
| | GEIVWDKGRDFATVRKVLSMPQVNIVKKTEVQTGGFSKESILPKRNSDKLIARKKDWDPK | |
| | KYGGFDSPTVAYSVLVVAKVEKGKSKKLKSVKELLGITIMERSSFEKNPIDFLEAKGYKE | |
| | VKKDLIIKLPKYSLFELENGRKRMLASAGELQKGNELALPSKYVNFLYLASHYEKLKGSP | |
| | EDNEQKQLFVEQHKHYLDEIIEQISEFSKRVILADANLDKVLSAYNKHRDKPIREQAENI | |
| | IHLFTLTNLGAPAAFKYFDTTIDRKRYTSTKEVLDATLIHQSITGLYETRIDLSQLGGDA | |
| | EAAAKEAAAKEAAAKEAAAKALEAEAAAKEAAAKEAAAKEAAAKATAPLEEEYRLFLEAP | |
| | IQNVTLLEQWKREIPKVWAEINPPGLASTQAPIHVQLLSTALPVRVRQYPITLEAKRSLR | |
| | ETIRKFRAAGILRPVHSPWNTPLLPVRKSGTSEYRMVQDLREVNKRVETIHPTVPNPYTL | |
| | LSLLPPDRIWYSVLDLKDAFFCIPLAPESQLIFAFEWADAEEGESGQLTWTRLPQGFKNS | |
| | PTLFNEALNRDLQGFRLDHPSVSLLQYVDDLLIAADTQAACLSATRDLLMTLAELGYRVS | |
| | GKKAQLCQEEVTYLGFKIHKGSRSLSNSRTQAILQIPVPKTKRQVREFLGKIGYCRLFIP | |
| | GFAELAQPLYAATRPGNDPLVWGEKEEEAFQSLKLALTQPPALALPSLDKPFQLFVEETS | |
| | GAAKGVLTQALGPWKRPVAYLSKRLDPVAAGWPRCLRAIAAAALLTREASKLTFGQDIEI | |
| | TSSHNLESLLRSPPDKWLTNARITQYQVLLLDPPRVRFKQTAALNPATLLPETDDTLPIH | |
| | HCLDTLDSLTSTRPDLTDQPLAQAEATLFTDGSSYIRDGKRYAGAAVVTLDSVIWAEPLP | |
| | IGTSAQKAELIALTKALEWSKDKSVNIYTDSRYAFATLHVHGMIYRERGWLTAGGKAIKN | |
| | APEILALLTAVWLPKRVAVMHCKGHQKDDAPTSTGNRRADEVAREVAIRPLSTQATISSG | |
| | GSSGGSSGSETPGTSESATPESSGGSSGGSSMASNFTQFVLVDNGGTGDVTVAPSNFANG | |
| | IAEWISSNSRSQAYKVTCSVRQSSAQNRKYTIKVEVPKGAWRSYLNMELTIPIFATNSDC | |
| | ELIVKAMQGLLKDGNPIPSAIAANSGIYKRTADGSEFESPKKKAKVE | |
| PL12089 | MPAAKRVKLDGGDKKYSIGLDIGTNSVGWAVITDEYKVPSKKFKVLGNTDRHSIKKNLIG | 16,204 |
| | ALLFDSGETAEATRLKRTARRRYTRRKNRICYLQEIFSNEMAKVDDSFFHRLEESFLVEE | |
| | DKKHERHPIFGNIVDEVAYHEKYPTIYHLRKKLVDSTDKADLRLIYLALAHMIKFRGHFL | |
| | IEGDLNPDNSDVDKLFIQLVQTYNQLFEENPINASGVDAKAILSARLSKSRRLENLIAQL | |
| | PGEKKNGLFGNLIALSLGLTPNFKSNFDLAEDAKLQLSKDTYDDDLDNLLAQIGDQYADL | |
| | FLAAKNLSDAILLSDILRVNTEITKAPLSASMIKRYDEHHQDLTLLKALVRQQLPEKYKE | |
| | IFFDQSKNGYAGYIDGGASQEEFYKFIKPILEKMDGTEELLVKLNREDLLRKQRTFDNGS | |
| | IPHQIHLGELHAILRRQEDFYPFLKDNREKIEKILTFRIPYYVGPLARGNSRFAWMTRKS | |
| | EETITPWNFEEVVDKGASAQSFIERMTNFDKNLPNEKVLPKHSLLYEYFTVYNELTKVKY | |
| | VTEGMRKPAFLSGEQKKAIVDLLFKTNRKVTVKQLKEDYFKKIECFDSVEISGVEDRFNA | |
| | SLGTYHDLLKIIKDKDFLDNEENEDILEDIVLTLTLFEDREMIEERLKTYAHLFDDKVMK | |
| | QLKRRRYTGWGRLSRKLINGIRDKQSGKTILDFLKSDGFANRNFMQLIHDDSLTFKEDIQ | |
| | KAQVSGQGDSLHEHIANLAGSPAIKKGILQTVKVVDELVKVMGRHKPENIVIEMARENQT | |
| | TQKGQKNSRERMKRIEEGIKELGSQILKEHPVENTQLQNEKLYLYYLQNGRDMYVDQELD | |
| | INRLSDYDVDHIVPQSFLKDDSIDNKVLTRSDKARGKSDNVPSEEVVKKMKNYWRQLLNA | |
| | KLITQRKFDNLTKAERGGLSELDKAGFIKRQLVETRQITKHVAQILDSRMNTKYDENDKL | |
| | IREVKVITLKSKLVSDFRKDFQFYKVREINNYHHAHDAYLNAVVGTALIKKYPKLESEFV | |
| | YGDYKVYDVRKMIAKSEQEIGKATAKYFFYSNIMNFFKTEITLANGEIRKRPLIETNGET | |
| | GEIVWDKGRDFATVRKVLSMPQVNIVKKTEVQTGGFSKESILPKRNSDKLIARKKDWDPK | |
| | KYGGFDSPTVAYSVLVVAKVEKGKSKKLKSVKELLGITIMERSSFEKNPIDFLEAKGYKE | |
| | VKKDLIIKLPKYSLFELENGRKRMLASAGELQKGNELALPSKYVNFLYLASHYEKLKGSP | |
| | EDNEQKQLFVEQHKHYLDEIIEQISEFSKRVILADANLDKVLSAYNKHRDKPIREQAENI | |
| | IHLFTLTNLGAPAAFKYFDTTIDRKRYTSTKEVLDATLIHQSITGLYETRIDLSQLGGDA | |
| | EAAAKEAAAKEAAAKEAAAKALEAEAAAKEAAAKEAAAKEAAAKATAPLEEEYRLFLEAP | |
| | IQNVTLLEQWKREIPKVWAEINPPGLASTQAPIHVQLLSTALPVRVRQYPITLEAKRSLR | |
| | ETIRKFRAAGILRPVHSPWNTPLLPVRKSGTSEYRMVQDLREVNKRVETIHPTVPNPYTL | |
| | LSLLPPDRIWYSVLDLKDAFFCIPLAPESQLIFAFEWADAEEGESGQLTWTRLPQGFKNS | |
| | PTLFNEALNRDLQGFRLDHPSVSLLQYVDDLLIAADTQAACLSATRDLLMTLAELGYRVS | |
| | GKKAQLCQEEVTYLGFKIHKGSRSLSNSRTQAILQIPVPKTKRQVREFLGKIGYCRLFIP | |
| | GFAELAQPLYAATRPGNDPLVWGEKEEEAFQSLKLALTQPPALALPSLDKPFQLFVEETS | |
| | GAAKGVLTQALGPWKRPVAYLSKRLDPVAAGWPRCLRAIAAAALLTREASKLTFGQDIEI | |
| | TSSHNLESLLRSPPDKWLTNARITQYQVLLLDPPRVRFKQTAALNPATLLPETDDTLPIH | |
| | HCLDTLDSLTSTRPDLTDQPLAQAEATLFTDGSSYIRDGKRYAGAAVVTLDSVIWAEPLP | |
| | IGTSAQKAELIALTKALEWSKDKSVNIYTDSRYAFATLHVHGMIYRERGWLTAGGKAIKN | |
| | APEILALLTAVWLPKRVAVMHCKGHQKDDAPTSTGNRRADEVAREVAIRPLSTQATISSG | |
| | GSSGGSSGSETPGTSESATPESSGGSSGGSSMASNFTQFVLVDNGGTGDVTVAPSNFANG | |
| | IAEWISSNSRSQAYKVTCSVRQSSAQNRKYTIKVEVPKGAWRSYLNMELTIPIFATNSDC | |
| | ELIVKAMQGLLKDGNPIPSAIAANSGIYGGSGGSMASNFTQFVLVDNGGTGDVTVAPSNF | |
| | ANGIAEWISSNSRSQAYKVTCSVRQSSAQNRKYTIKVEVPKGAWRSYLNMELTIPIFATN | |
| | SDCELIVKAMQGLLKDGNPIPSAIAANSGIYKRTADGSEFESPKKKAKVE | |
| PL12090 | MPAAKRVKLDGGDKKYSIGLDIGTNSVGWAVITDEYKVPSKKFKVLGNTDRHSIKKNLIG | 16,205 |
| | ALLFDSGETAEATRLKRTARRRYTRRKNRICYLQEIFSNEMAKVDDSFFHRLEESFLVEE | |
| | DKKHERHPIFGNIVDEVAYHEKYPTIYHLRKKLVDSTDKADLRLIYLALAHMIKFRGHFL | |
| | IEGDLNPDNSDVDKLFIQLVQTYNQLFEENPINASGVDAKAILSARLSKSRRLENLIAQL | |
| | PGEKKNGLFGNLIALSLGLTPNFKSNFDLAEDAKLQLSKDTYDDDLDNLLAQIGDQYADL | |
| | FLAAKNLSDAILLSDILRVNTEITKAPLSASMIKRYDEHHQDLTLLKALVRQQLPEKYKE | |
| | IFFDQSKNGYAGYIDGGASQEEFYKFIKPILEKMDGTEELLVKLNREDLLRKQRTFDNGS | |
| | IPHQIHLGELHAILRRQEDFYPFLKDNREKIEKILTFRIPYYVGPLARGNSRFAWMTRKS | |
| | EETITPWNFEEVVDKGASAQSFIERMTNFDKNLPNEKVLPKHSLLYEYFTVYNELTKVKY | |
| | VTEGMRKPAFLSGEQKKAIVDLLFKTNRKVTVKQLKEDYFKKIECFDSVEISGVEDRFNA | |
| | SLGTYHDLLKIIKDKDFLDNEENEDILEDIVLTLTLFEDREMIEERLKTYAHLFDDKVMK | |
| | QLKRRRYTGWGRLSRKLINGIRDKQSGKTILDFLKSDGFANRNFMQLIHDDSLTFKEDIQ | |
| | KAQVSGQGDSLHEHIANLAGSPAIKKGILQTVKVVDELVKVMGRHKPENIVIEMARENQT | |
| | TQKGQKNSRERMKRIEEGIKELGSQILKEHPVENTQLQNEKLYLYYLQNGRDMYVDQELD | |
| | INRLSDYDVDHIVPQSFLKDDSIDNKVLTRSDKARGKSDNVPSEEVVKKMKNYWRQLLNA | |
| | KLITQRKFDNLTKAERGGLSELDKAGFIKRQLVETRQITKHVAQILDSRMNTKYDENDKL | |
| | IREVKVITLKSKLVSDFRKDFQFYKVREINNYHHAHDAYLNAVVGTALIKKYPKLESEFV | |
| | YGDYKVYDVRKMIAKSEQEIGKATAKYFFYSNIMNFFKTEITLANGEIRKRPLIETNGET | |
| | GEIVWDKGRDFATVRKVLSMPQVNIVKKTEVQTGGFSKESILPKRNSDKLIARKKDWDPK | |
| | KYGGFDSPTVAYSVLVVAKVEKGKSKKLKSVKELLGITIMERSSFEKNPIDFLEAKGYKE | |
| | VKKDLIIKLPKYSLFELENGRKRMLASAGELQKGNELALPSKYVNFLYLASHYEKLKGSP | |
| | EDNEQKQLFVEQHKHYLDEIIEQISEFSKRVILADANLDKVLSAYNKHRDKPIREQAENI | |
| | IHLFTLTNLGAPAAFKYFDTTIDRKRYTSTKEVLDATLIHQSITGLYETRIDLSQLGGDA | |
| | EAAAKEAAAKEAAAKEAAAKALEAEAAAKEAAAKEAAAKEAAAKATAPLEEEYRLFLEAP | |
| | IQNVTLLEQWKREIPKVWAEINPPGLASTQAPIHVQLLSTALPVRVRQYPITLEAKRSLR | |
| | ETIRKFRAAGILRPVHSPWNTPLLPVRKSGTSEYRMVQDLREVNKRVETIHPTVPNPYTL | |
| | LSLLPPDRIWYSVLDLKDAFFCIPLAPESQLIFAFEWADAEEGESGQLTWTRLPQGFKNS | |
| | PTLFNEALNRDLQGFRLDHPSVSLLQYVDDLLIAADTQAACLSATRDLLMTLAELGYRVS | |
| | GKKAQLCQEEVTYLGFKIHKGSRSLSNSRTQAILQIPVPKTKRQVREFLGKIGYCRLFIP | |
| | GFAELAQPLYAATRPGNDPLVWGEKEEEAFQSLKLALTQPPALALPSLDKPFQLFVEETS | |
| | GAAKGVLTQALGPWKRPVAYLSKRLDPVAAGWPRCLRAIAAAALLTREASKLTFGQDIEI | |
| | TSSHNLESLLRSPPDKWLTNARITQYQVLLLDPPRVRFKQTAALNPATLLPETDDTLPIH | |
| | HCLDTLDSLTSTRPDLTDQPLAQAEATLFTDGSSYIRDGKRYAGAAVVTLDSVIWAEPLP | |
| | IGTSAQKAELIALTKALEWSKDKSVNIYTDSRYAFATLHVHGMIYRERGWLTAGGKAIKN | |
| | APEILALLTAVWLPKRVAVMHCKGHQKDDAPTSTGNRRADEVAREVAIRPLSTQATISSG | |
| | GSSGGSSGSETPGTSESATPESSGGSSGGSSMASNFTQFVLVDNGGTGDVTVAPSNFANG | |
| | IAEWISSNSRSQAYKVTCSVRQSSAQNRKYTIKVEVPKGAWRSYLNMELTIPIFATNSDC | |
| | ELIVKAMQGLLKDGNPIPSAIAANSGIYGGSGGSMASNFTQFVLVDNGGTGDVTVAPSNF | |
| | ANGIAEWISSNSRSQAYKVTCSVRQSSAQNRKYTIKVEVPKGAWRSYLNMELTIPIFATN | |
| | SDCELIVKAMQGLLKDGNPIPSAIAANSGIYGGGSGGGSGGGSGGGSMASNFTQFVLVDN | |
| | GGTGDVTVAPSNFANGIAEWISSNSRSQAYKVTCSVRQSSAQNRKYTIKVEVPKGAWRSY | |
| | LNMELTIPIFATNSDCELIVKAMQGLLKDGNPIPSAIAANSGIYGGSGGSMASNFTQFVL | |
| | VDNGGTGDVTVAPSNFANGIAEWISSNSRSQAYKVTCSVRQSSAQNRKYTIKVEVPKGAW | |
| | RSYLNMELTIPIFATNSDCELIVKAMQGLLKDGNPIPSAIAANSGIYKRTADGSEFESPK | |
| | KKAKVE | |
| PL12091 | MPAAKRVKLDGGDKKYSIGLDIGTNSVGWAVITDEYKVPSKKFKVLGNTDRHSIKKNLIG | 16,206 |
| | ALLFDSGETAEATRLKRTARRRYTRRKNRICYLQEIFSNEMAKVDDSFFHRLEESFLVEE | |
| | DKKHERHPIFGNIVDEVAYHEKYPTIYHLRKKLVDSTDKADLRLIYLALAHMIKFRGHFL | |
| | IEGDLNPDNSDVDKLFIQLVQTYNQLFEENPINASGVDAKAILSARLSKSRRLENLIAQL | |
| | PGEKKNGLFGNLIALSLGLTPNFKSNFDLAEDAKLQLSKDTYDDDLDNLLAQIGDQYADL | |
| | FLAAKNLSDAILLSDILRVNTEITKAPLSASMIKRYDEHHQDLTLLKALVRQQLPEKYKE | |
| | IFFDQSKNGYAGYIDGGASQEEFYKFIKPILEKMDGTEELLVKLNREDLLRKQRTFDNGS | |
| | IPHQIHLGELHAILRRQEDFYPFLKDNREKIEKILTFRIPYYVGPLARGNSRFAWMTRKS | |
| | EETITPWNFEEVVDKGASAQSFIERMTNFDKNLPNEKVLPKHSLLYEYFTVYNELTKVKY | |
| | VTEGMRKPAFLSGEQKKAIVDLLFKTNRKVTVKQLKEDYFKKIECFDSVEISGVEDRFNA | |
| | SLGTYHDLLKIIKDKDFLDNEENEDILEDIVLTLTLFEDREMIEERLKTYAHLFDDKVMK | |
| | QLKRRRYTGWGRLSRKLINGIRDKQSGKTILDFLKSDGFANRNFMQLIHDDSLTFKEDIQ | |
| | KAQVSGQGDSLHEHIANLAGSPAIKKGILQTVKVVDELVKVMGRHKPENIVIEMARENQT | |
| | TQKGQKNSRERMKRIEEGIKELGSQILKEHPVENTQLQNEKLYLYYLQNGRDMYVDQELD | |
| | INRLSDYDVDHIVPQSFLKDDSIDNKVLTRSDKARGKSDNVPSEEVVKKMKNYWRQLLNA | |
| | KLITQRKFDNLTKAERGGLSELDKAGFIKRQLVETRQITKHVAQILDSRMNTKYDENDKL | |
| | IREVKVITLKSKLVSDFRKDFQFYKVREINNYHHAHDAYLNAVVGTALIKKYPKLESEFV | |
| | YGDYKVYDVRKMIAKSEQEIGKATAKYFFYSNIMNFFKTEITLANGEIRKRPLIETNGET | |
| | GEIVWDKGRDFATVRKVLSMPQVNIVKKTEVQTGGFSKESILPKRNSDKLIARKKDWDPK | |
| | KYGGFDSPTVAYSVLVVAKVEKGKSKKLKSVKELLGITIMERSSFEKNPIDFLEAKGYKE | |
| | VKKDLIIKLPKYSLFELENGRKRMLASAGELQKGNELALPSKYVNFLYLASHYEKLKGSP | |
| | EDNEQKQLFVEQHKHYLDEIIEQISEFSKRVILADANLDKVLSAYNKHRDKPIREQAENI | |
| | IHLFTLTNLGAPAAFKYFDTTIDRKRYTSTKEVLDATLIHQSITGLYETRIDLSQLGGDA | |
| | EAAAKEAAAKEAAAKEAAAKALEAEAAAKEAAAKEAAAKEAAAKATAPLEEEYRLFLEAP | |
| | IQNVTLLEQWKREIPKVWAEINPPGLASTQAPIHVQLLSTALPVRVRQYPITLEAKRSLR | |
| | ETIRKFRAAGILRPVHSPWNTPLLPVRKSGTSEYRMVQDLREVNKRVETIHPTVPNPYTL | |
| | LSLLPPDRIWYSVLDLKDAFFCIPLAPESQLIFAFEWADAEEGESGQLTWTRLPQGFKNS | |
| | PTLFNEALNRDLQGFRLDHPSVSLLQYVDDLLIAADTQAACLSATRDLLMTLAELGYRVS | |
| | GKKAQLCQEEVTYLGFKIHKGSRSLSNSRTQAILQIPVPKTKRQVREFLGKIGYCRLFIP | |
| | GFAELAQPLYAATRPGNDPLVWGEKEEEAFQSLKLALTQPPALALPSLDKPFQLFVEETS | |
| | GAAKGVLTQALGPWKRPVAYLSKRLDPVAAGWPRCLRAIAAAALLTREASKLTFGQDIEI | |
| | TSSHNLESLLRSPPDKWLTNARITQYQVLLLDPPRVRFKQTAALNPATLLPETDDTLPIH | |
| | HCLDTLDSLTSTRPDLTDQPLAQAEATLFTDGSSYIRDGKRYAGAAVVTLDSVIWAEPLP | |
| | IGTSAQKAELIALTKALEWSKDKSVNIYTDSRYAFATLHVHGMIYRERGWLTAGGKAIKN | |
| | APEILALLTAVWLPKRVAVMHCKGHQKDDAPTSTGNRRADEVAREVAIRPLSTQATISGS | |
| | SGSSGSSGSSGSSGSSMASNFTQFVLVDNGGTGDVTVAPSNFANGIAEWISSNSRSQAYK | |
| | VTCSVRQSSAQNRKYTIKVEVPKGAWRSYLNMELTIPIFATNSDCELIVKAMQGLLKDGN | |
| | PIPSAIAANSGIYKRTADGSEFESPKKKAKVE | |
| PL12092 | MPAAKRVKLDGGDKKYSIGLDIGTNSVGWAVITDEYKVPSKKFKVLGNTDRHSIKKNLIG | 16,207 |
| | ALLFDSGETAEATRLKRTARRRYTRRKNRICYLQEIFSNEMAKVDDSFFHRLEESFLVEE | |
| | DKKHERHPIFGNIVDEVAYHEKYPTIYHLRKKLVDSTDKADLRLIYLALAHMIKFRGHFL | |
| | IEGDLNPDNSDVDKLFIQLVQTYNQLFEENPINASGVDAKAILSARLSKSRRLENLIAQL | |
| | PGEKKNGLFGNLIALSLGLTPNFKSNFDLAEDAKLQLSKDTYDDDLDNLLAQIGDQYADL | |
| | FLAAKNLSDAILLSDILRVNTEITKAPLSASMIKRYDEHHQDLTLLKALVRQQLPEKYKE | |
| | IFFDQSKNGYAGYIDGGASQEEFYKFIKPILEKMDGTEELLVKLNREDLLRKQRTFDNGS | |
| | IPHQIHLGELHAILRRQEDFYPFLKDNREKIEKILTFRIPYYVGPLARGNSRFAWMTRKS | |
| | EETITPWNFEEVVDKGASAQSFIERMTNFDKNLPNEKVLPKHSLLYEYFTVYNELTKVKY | |
| | VTEGMRKPAFLSGEQKKAIVDLLFKTNRKVTVKQLKEDYFKKIECFDSVEISGVEDRFNA | |
| | SLGTYHDLLKIIKDKDFLDNEENEDILEDIVLTLTLFEDREMIEERLKTYAHLFDDKVMK | |
| | QLKRRRYTGWGRLSRKLINGIRDKQSGKTILDFLKSDGFANRNFMQLIHDDSLTFKEDIQ | |
| | KAQVSGQGDSLHEHIANLAGSPAIKKGILQTVKVVDELVKVMGRHKPENIVIEMARENQT | |
| | TQKGQKNSRERMKRIEEGIKELGSQILKEHPVENTQLQNEKLYLYYLQNGRDMYVDQELD | |
| | INRLSDYDVDHIVPQSFLKDDSIDNKVLTRSDKARGKSDNVPSEEVVKKMKNYWRQLLNA | |
| | KLITQRKFDNLTKAERGGLSELDKAGFIKRQLVETRQITKHVAQILDSRMNTKYDENDKL | |
| | IREVKVITLKSKLVSDFRKDFQFYKVREINNYHHAHDAYLNAVVGTALIKKYPKLESEFV | |
| | YGDYKVYDVRKMIAKSEQEIGKATAKYFFYSNIMNFFKTEITLANGEIRKRPLIETNGET | |
| | GEIVWDKGRDFATVRKVLSMPQVNIVKKTEVQTGGFSKESILPKRNSDKLIARKKDWDPK | |
| | KYGGFDSPTVAYSVLVVAKVEKGKSKKLKSVKELLGITIMERSSFEKNPIDFLEAKGYKE | |
| | VKKDLIIKLPKYSLFELENGRKRMLASAGELQKGNELALPSKYVNFLYLASHYEKLKGSP | |
| | EDNEQKQLFVEQHKHYLDEIIEQISEFSKRVILADANLDKVLSAYNKHRDKPIREQAENI | |
| | IHLFTLTNLGAPAAFKYFDTTIDRKRYTSTKEVLDATLIHQSITGLYETRIDLSQLGGDA | |
| | EAAAKEAAAKEAAAKEAAAKALEAEAAAKEAAAKEAAAKEAAAKATAPLEEEYRLFLEAP | |
| | IQNVTLLEQWKREIPKVWAEINPPGLASTQAPIHVQLLSTALPVRVRQYPITLEAKRSLR | |
| | ETIRKFRAAGILRPVHSPWNTPLLPVRKSGTSEYRMVQDLREVNKRVETIHPTVPNPYTL | |
| | LSLLPPDRIWYSVLDLKDAFFCIPLAPESQLIFAFEWADAEEGESGQLTWTRLPQGFKNS | |
| | PTLFNEALNRDLQGFRLDHPSVSLLQYVDDLLIAADTQAACLSATRDLLMTLAELGYRVS | |
| | GKKAQLCQEEVTYLGFKIHKGSRSLSNSRTQAILQIPVPKTKRQVREFLGKIGYCRLFIP | |
| | GFAELAQPLYAATRPGNDPLVWGEKEEEAFQSLKLALTQPPALALPSLDKPFQLFVEETS | |
| | GAAKGVLTQALGPWKRPVAYLSKRLDPVAAGWPRCLRAIAAAALLTREASKLTFGQDIEI | |
| | TSSHNLESLLRSPPDKWLTNARITQYQVLLLDPPRVRFKQTAALNPATLLPETDDTLPIH | |
| | HCLDTLDSLTSTRPDLTDQPLAQAEATLFTDGSSYIRDGKRYAGAAVVTLDSVIWAEPLP | |
| | IGTSAQKAELIALTKALEWSKDKSVNIYTDSRYAFATLHVHGMIYRERGWLTAGGKAIKN | |
| | APEILALLTAVWLPKRVAVMHCKGHQKDDAPTSTGNRRADEVAREVAIRPLSTQATISGS | |
| | SGSSGSSGSSGSSGSSMASNFTQFVLVDNGGTGDVTVAPSNFANGIAEWISSNSRSQAYK | |
| | VTCSVRQSSAQNRKYTIKVEVPKGAWRSYLNMELTIPIFATNSDCELIVKAMQGLLKDGN | |
| | PIPSAIAANSGIYGGSGGSMASNFTQFVLVDNGGTGDVTVAPSNFANGIAEWISSNSRSQ | |
| | AYKVTCSVRQSSAQNRKYTIKVEVPKGAWRSYLNMELTIPIFATNSDCELIVKAMQGLLK | |
| | DGNPIPSAIAANSGIYKRTADGSEFESPKKKAKVE | |
| PL12093 | MPAAKRVKLDGGDKKYSIGLDIGTNSVGWAVITDEYKVPSKKFKVLGNTDRHSIKKNLIG | 16,208 |
| | ALLFDSGETAEATRLKRTARRRYTRRKNRICYLQEIFSNEMAKVDDSFFHRLEESFLVEE | |
| | DKKHERHPIFGNIVDEVAYHEKYPTIYHLRKKLVDSTDKADLRLIYLALAHMIKFRGHFL | |
| | IEGDLNPDNSDVDKLFIQLVQTYNQLFEENPINASGVDAKAILSARLSKSRRLENLIAQL | |
| | PGEKKNGLFGNLIALSLGLTPNFKSNFDLAEDAKLQLSKDTYDDDLDNLLAQIGDQYADL | |
| | FLAAKNLSDAILLSDILRVNTEITKAPLSASMIKRYDEHHQDLTLLKALVRQQLPEKYKE | |
| | IFFDQSKNGYAGYIDGGASQEEFYKFIKPILEKMDGTEELLVKLNREDLLRKQRTFDNGS | |
| | IPHQIHLGELHAILRRQEDFYPFLKDNREKIEKILTFRIPYYVGPLARGNSRFAWMTRKS | |
| | EETITPWNFEEVVDKGASAQSFIERMTNFDKNLPNEKVLPKHSLLYEYFTVYNELTKVKY | |
| | VTEGMRKPAFLSGEQKKAIVDLLFKTNRKVTVKQLKEDYFKKIECFDSVEISGVEDRFNA | |
| | SLGTYHDLLKIIKDKDFLDNEENEDILEDIVLTLTLFEDREMIEERLKTYAHLFDDKVMK | |
| | QLKRRRYTGWGRLSRKLINGIRDKQSGKTILDFLKSDGFANRNFMQLIHDDSLTFKEDIQ | |
| | KAQVSGQGDSLHEHIANLAGSPAIKKGILQTVKVVDELVKVMGRHKPENIVIEMARENQT | |
| | TQKGQKNSRERMKRIEEGIKELGSQILKEHPVENTQLQNEKLYLYYLQNGRDMYVDQELD | |
| | INRLSDYDVDHIVPQSFLKDDSIDNKVLTRSDKARGKSDNVPSEEVVKKMKNYWRQLLNA | |
| | KLITQRKFDNLTKAERGGLSELDKAGFIKRQLVETRQITKHVAQILDSRMNTKYDENDKL | |
| | IREVKVITLKSKLVSDFRKDFQFYKVREINNYHHAHDAYLNAVVGTALIKKYPKLESEFV | |
| | YGDYKVYDVRKMIAKSEQEIGKATAKYFFYSNIMNFFKTEITLANGEIRKRPLIETNGET | |
| | GEIVWDKGRDFATVRKVLSMPQVNIVKKTEVQTGGFSKESILPKRNSDKLIARKKDWDPK | |
| | KYGGFDSPTVAYSVLVVAKVEKGKSKKLKSVKELLGITIMERSSFEKNPIDFLEAKGYKE | |
| | VKKDLIIKLPKYSLFELENGRKRMLASAGELQKGNELALPSKYVNFLYLASHYEKLKGSP | |
| | EDNEQKQLFVEQHKHYLDEIIEQISEFSKRVILADANLDKVLSAYNKHRDKPIREQAENI | |
| | IHLFTLTNLGAPAAFKYFDTTIDRKRYTSTKEVLDATLIHQSITGLYETRIDLSQLGGDA | |
| | EAAAKEAAAKEAAAKEAAAKALEAEAAAKEAAAKEAAAKEAAAKATAPLEEEYRLFLEAP | |
| | IQNVTLLEQWKREIPKVWAEINPPGLASTQAPIHVQLLSTALPVRVRQYPITLEAKRSLR | |
| | ETIRKFRAAGILRPVHSPWNTPLLPVRKSGTSEYRMVQDLREVNKRVETIHPTVPNPYTL | |
| | LSLLPPDRIWYSVLDLKDAFFCIPLAPESQLIFAFEWADAEEGESGQLTWTRLPQGFKNS | |
| | PTLFNEALNRDLQGFRLDHPSVSLLQYVDDLLIAADTQAACLSATRDLLMTLAELGYRVS | |
| | GKKAQLCQEEVTYLGFKIHKGSRSLSNSRTQAILQIPVPKTKRQVREFLGKIGYCRLFIP | |
| | GFAELAQPLYAATRPGNDPLVWGEKEEEAFQSLKLALTQPPALALPSLDKPFQLFVEETS | |
| | GAAKGVLTQALGPWKRPVAYLSKRLDPVAAGWPRCLRAIAAAALLTREASKLTFGQDIEI | |
| | TSSHNLESLLRSPPDKWLTNARITQYQVLLLDPPRVRFKQTAALNPATLLPETDDTLPIH | |
| | HCLDTLDSLTSTRPDLTDQPLAQAEATLFTDGSSYIRDGKRYAGAAVVTLDSVIWAEPLP | |
| | IGTSAQKAELIALTKALEWSKDKSVNIYTDSRYAFATLHVHGMIYRERGWLTAGGKAIKN | |
| | APEILALLTAVWLPKRVAVMHCKGHQKDDAPTSTGNRRADEVAREVAIRPLSTQATISGS | |
| | SGSSGSSGSSGSSGSSMASNFTQFVLVDNGGTGDVTVAPSNFANGIAEWISSNSRSQAYK | |
| | VTCSVRQSSAQNRKYTIKVEVPKGAWRSYLNMELTIPIFATNSDCELIVKAMQGLLKDGN | |
| | PIPSAIAANSGIYGGSGGSMASNFTQFVLVDNGGTGDVTVAPSNFANGIAEWISSNSRSQ | |
| | AYKVTCSVRQSSAQNRKYTIKVEVPKGAWRSYLNMELTIPIFATNSDCELIVKAMQGLLK | |
| | DGNPIPSAIAANSGIYGGGSGGGSGGGSGGGSMASNFTQFVLVDNGGTGDVTVAPSNFAN | |
| | GIAEWISSNSRSQAYKVTCSVRQSSAQNRKYTIKVEVPKGAWRSYLNMELTIPIFATNSD | |
| | CELIVKAMQGLLKDGNPIPSAIAANSGIYGGSGGSMASNFTQFVLVDNGGTGDVTVAPSN | |
| | FANGIAEWISSNSRSQAYKVTCSVRQSSAQNRKYTIKVEVPKGAWRSYLNMELTIPIFAT | |
| | NSDCELIVKAMQGLLKDGNPIPSAIAANSGIYKRTADGSEFESPKKKAKVE | |
| PL12094 | MPAAKRVKLDGGDKKYSIGLDIGTNSVGWAVITDEYKVPSKKFKVLGNTDRHSIKKNLIG | 16,209 |
| | ALLFDSGETAEATRLKRTARRRYTRRKNRICYLQEIFSNEMAKVDDSFFHRLEESFLVEE | |
| | DKKHERHPIFGNIVDEVAYHEKYPTIYHLRKKLVDSTDKADLRLIYLALAHMIKFRGHFL | |
| | IEGDLNPDNSDVDKLFIQLVQTYNQLFEENPINASGVDAKAILSARLSKSRRLENLIAQL | |
| | PGEKKNGLFGNLIALSLGLTPNFKSNFDLAEDAKLQLSKDTYDDDLDNLLAQIGDQYADL | |
| | FLAAKNLSDAILLSDILRVNTEITKAPLSASMIKRYDEHHQDLTLLKALVRQQLPEKYKE | |
| | IFFDQSKNGYAGYIDGGASQEEFYKFIKPILEKMDGTEELLVKLNREDLLRKQRTFDNGS | |
| | IPHQIHLGELHAILRRQEDFYPFLKDNREKIEKILTFRIPYYVGPLARGNSRFAWMTRKS | |
| | EETITPWNFEEVVDKGASAQSFIERMTNFDKNLPNEKVLPKHSLLYEYFTVYNELTKVKY | |
| | VTEGMRKPAFLSGEQKKAIVDLLFKTNRKVTVKQLKEDYFKKIECFDSVEISGVEDRFNA | |
| | SLGTYHDLLKIIKDKDFLDNEENEDILEDIVLTLTLFEDREMIEERLKTYAHLFDDKVMK | |
| | QLKRRRYTGWGRLSRKLINGIRDKQSGKTILDFLKSDGFANRNFMQLIHDDSLTFKEDIQ | |
| | KAQVSGQGDSLHEHIANLAGSPAIKKGILQTVKVVDELVKVMGRHKPENIVIEMARENQT | |
| | TQKGQKNSRERMKRIEEGIKELGSQILKEHPVENTQLQNEKLYLYYLQNGRDMYVDQELD | |
| | INRLSDYDVDHIVPQSFLKDDSIDNKVLTRSDKARGKSDNVPSEEVVKKMKNYWRQLLNA | |
| | KLITQRKFDNLTKAERGGLSELDKAGFIKRQLVETRQITKHVAQILDSRMNTKYDENDKL | |
| | IREVKVITLKSKLVSDFRKDFQFYKVREINNYHHAHDAYLNAVVGTALIKKYPKLESEFV | |
| | YGDYKVYDVRKMIAKSEQEIGKATAKYFFYSNIMNFFKTEITLANGEIRKRPLIETNGET | |
| | GEIVWDKGRDFATVRKVLSMPQVNIVKKTEVQTGGFSKESILPKRNSDKLIARKKDWDPK | |
| | KYGGFDSPTVAYSVLVVAKVEKGKSKKLKSVKELLGITIMERSSFEKNPIDFLEAKGYKE | |
| | VKKDLIIKLPKYSLFELENGRKRMLASAGELQKGNELALPSKYVNFLYLASHYEKLKGSP | |
| | EDNEQKQLFVEQHKHYLDEIIEQISEFSKRVILADANLDKVLSAYNKHRDKPIREQAENI | |
| | IHLFTLTNLGAPAAFKYFDTTIDRKRYTSTKEVLDATLIHQSITGLYETRIDLSQLGGDA | |
| | EAAAKEAAAKEAAAKEAAAKALEAEAAAKEAAAKEAAAKEAAAKATAPLEEEYRLFLEAP | |
| | IQNVTLLEQWKREIPKVWAEINPPGLASTQAPIHVQLLSTALPVRVRQYPITLEAKRSLR | |
| | ETIRKFRAAGILRPVHSPWNTPLLPVRKSGTSEYRMVQDLREVNKRVETIHPTVPNPYTL | |
| | LSLLPPDRIWYSVLDLKDAFFCIPLAPESQLIFAFEWADAEEGESGQLTWTRLPQGFKNS | |
| | PTLFNEALNRDLQGFRLDHPSVSLLQYVDDLLIAADTQAACLSATRDLLMTLAELGYRVS | |
| | GKKAQLCQEEVTYLGFKIHKGSRSLSNSRTQAILQIPVPKTKRQVREFLGKIGYCRLFIP | |
| | GFAELAQPLYAATRPGNDPLVWGEKEEEAFQSLKLALTQPPALALPSLDKPFQLFVEETS | |
| | GAAKGVLTQALGPWKRPVAYLSKRLDPVAAGWPRCLRAIAAAALLTREASKLTFGQDIEI | |
| | TSSHNLESLLRSPPDKWLTNARITQYQVLLLDPPRVRFKQTAALNPATLLPETDDTLPIH | |
| | HCLDTLDSLTSTRPDLTDQPLAQAEATLFTDGSSYIRDGKRYAGAAVVTLDSVIWAEPLP | |
| | IGTSAQKAELIALTKALEWSKDKSVNIYTDSRYAFATLHVHGMIYRERGWLTAGGKAIKN | |
| | APEILALLTAVWLPKRVAVMHCKGHQKDDAPTSTGNRRADEVAREVAIRPLSTQATISGS | |
| | SGGGEAAAKMASNFTQFVLVDNGGTGDVTVAPSNFANGIAEWISSNSRSQAYKVTCSVRQ | |
| | SSAQNRKYTIKVEVPKGAWRSYLNMELTIPIFATNSDCELIVKAMQGLLKDGNPIPSAIA | |
| | ANSGIYKRTADGSEFESPKKKAKVE | |
| PL12095 | MPAAKRVKLDGGDKKYSIGLDIGTNSVGWAVITDEYKVPSKKFKVLGNTDRHSIKKNLIG | 16,210 |
| | ALLFDSGETAEATRLKRTARRRYTRRKNRICYLQEIFSNEMAKVDDSFFHRLEESFLVEE | |
| | DKKHERHPIFGNIVDEVAYHEKYPTIYHLRKKLVDSTDKADLRLIYLALAHMIKFRGHFL | |
| | IEGDLNPDNSDVDKLFIQLVQTYNQLFEENPINASGVDAKAILSARLSKSRRLENLIAQL | |
| | PGEKKNGLFGNLIALSLGLTPNFKSNFDLAEDAKLQLSKDTYDDDLDNLLAQIGDQYADL | |
| | FLAAKNLSDAILLSDILRVNTEITKAPLSASMIKRYDEHHQDLTLLKALVRQQLPEKYKE | |
| | IFFDQSKNGYAGYIDGGASQEEFYKFIKPILEKMDGTEELLVKLNREDLLRKQRTFDNGS | |
| | IPHQIHLGELHAILRRQEDFYPFLKDNREKIEKILTFRIPYYVGPLARGNSRFAWMTRKS | |
| | EETITPWNFEEVVDKGASAQSFIERMTNFDKNLPNEKVLPKHSLLYEYFTVYNELTKVKY | |
| | VTEGMRKPAFLSGEQKKAIVDLLFKTNRKVTVKQLKEDYFKKIECFDSVEISGVEDRFNA | |
| | SLGTYHDLLKIIKDKDFLDNEENEDILEDIVLTLTLFEDREMIEERLKTYAHLFDDKVMK | |
| | QLKRRRYTGWGRLSRKLINGIRDKQSGKTILDFLKSDGFANRNFMQLIHDDSLTFKEDIQ | |
| | KAQVSGQGDSLHEHIANLAGSPAIKKGILQTVKVVDELVKVMGRHKPENIVIEMARENQT | |
| | TQKGQKNSRERMKRIEEGIKELGSQILKEHPVENTQLQNEKLYLYYLQNGRDMYVDQELD | |
| | INRLSDYDVDHIVPQSFLKDDSIDNKVLTRSDKARGKSDNVPSEEVVKKMKNYWRQLLNA | |
| | KLITQRKFDNLTKAERGGLSELDKAGFIKRQLVETRQITKHVAQILDSRMNTKYDENDKL | |
| | IREVKVITLKSKLVSDFRKDFQFYKVREINNYHHAHDAYLNAVVGTALIKKYPKLESEFV | |
| | YGDYKVYDVRKMIAKSEQEIGKATAKYFFYSNIMNFFKTEITLANGEIRKRPLIETNGET | |
| | GEIVWDKGRDFATVRKVLSMPQVNIVKKTEVQTGGFSKESILPKRNSDKLIARKKDWDPK | |
| | KYGGFDSPTVAYSVLVVAKVEKGKSKKLKSVKELLGITIMERSSFEKNPIDFLEAKGYKE | |
| | VKKDLIIKLPKYSLFELENGRKRMLASAGELQKGNELALPSKYVNFLYLASHYEKLKGSP | |
| | EDNEQKQLFVEQHKHYLDEIIEQISEFSKRVILADANLDKVLSAYNKHRDKPIREQAENI | |
| | IHLFTLTNLGAPAAFKYFDTTIDRKRYTSTKEVLDATLIHQSITGLYETRIDLSQLGGDA | |
| | EAAAKEAAAKEAAAKEAAAKALEAEAAAKEAAAKEAAAKEAAAKATAPLEEEYRLFLEAP | |
| | IQNVTLLEQWKREIPKVWAEINPPGLASTQAPIHVQLLSTALPVRVRQYPITLEAKRSLR | |
| | ETIRKFRAAGILRPVHSPWNTPLLPVRKSGTSEYRMVQDLREVNKRVETIHPTVPNPYTL | |
| | LSLLPPDRIWYSVLDLKDAFFCIPLAPESQLIFAFEWADAEEGESGQLTWTRLPQGFKNS | |
| | PTLFNEALNRDLQGFRLDHPSVSLLQYVDDLLIAADTQAACLSATRDLLMTLAELGYRVS | |
| | GKKAQLCQEEVTYLGFKIHKGSRSLSNSRTQAILQIPVPKTKRQVREFLGKIGYCRLFIP | |
| | GFAELAQPLYAATRPGNDPLVWGEKEEEAFQSLKLALTQPPALALPSLDKPFQLFVEETS | |
| | GAAKGVLTQALGPWKRPVAYLSKRLDPVAAGWPRCLRAIAAAALLTREASKLTFGQDIEI | |
| | TSSHNLESLLRSPPDKWLTNARITQYQVLLLDPPRVRFKQTAALNPATLLPETDDTLPIH | |
| | HCLDTLDSLTSTRPDLTDQPLAQAEATLFTDGSSYIRDGKRYAGAAVVTLDSVIWAEPLP | |
| | IGTSAQKAELIALTKALEWSKDKSVNIYTDSRYAFATLHVHGMIYRERGWLTAGGKAIKN | |
| | APEILALLTAVWLPKRVAVMHCKGHQKDDAPTSTGNRRADEVAREVAIRPLSTQATISGS | |
| | SGGGEAAAKMASNFTQFVLVDNGGTGDVTVAPSNFANGIAEWISSNSRSQAYKVTCSVRQ | |
| | SSAQNRKYTIKVEVPKGAWRSYLNMELTIPIFATNSDCELIVKAMQGLLKDGNPIPSAIA | |
| | ANSGIYGGSGGSMASNFTQFVLVDNGGTGDVTVAPSNFANGIAEWISSNSRSQAYKVTCS | |
| | VRQSSAQNRKYTIKVEVPKGAWRSYLNMELTIPIFATNSDCELIVKAMQGLLKDGNPIPS | |
| | AIAANSGIYKRTADGSEFESPKKKAKVE | |
| PL12096 | MPAAKRVKLDGGDKKYSIGLDIGTNSVGWAVITDEYKVPSKKFKVLGNTDRHSIKKNLIG | 16,211 |
| | ALLFDSGETAEATRLKRTARRRYTRRKNRICYLQEIFSNEMAKVDDSFFHRLEESFLVEE | |
| | DKKHERHPIFGNIVDEVAYHEKYPTIYHLRKKLVDSTDKADLRLIYLALAHMIKFRGHFL | |
| | IEGDLNPDNSDVDKLFIQLVQTYNQLFEENPINASGVDAKAILSARLSKSRRLENLIAQL | |
| | PGEKKNGLFGNLIALSLGLTPNFKSNFDLAEDAKLQLSKDTYDDDLDNLLAQIGDQYADL | |
| | FLAAKNLSDAILLSDILRVNTEITKAPLSASMIKRYDEHHQDLTLLKALVRQQLPEKYKE | |
| | IFFDQSKNGYAGYIDGGASQEEFYKFIKPILEKMDGTEELLVKLNREDLLRKQRTFDNGS | |
| | IPHQIHLGELHAILRRQEDFYPFLKDNREKIEKILTFRIPYYVGPLARGNSRFAWMTRKS | |
| | EETITPWNFEEVVDKGASAQSFIERMTNFDKNLPNEKVLPKHSLLYEYFTVYNELTKVKY | |
| | VTEGMRKPAFLSGEQKKAIVDLLFKTNRKVTVKQLKEDYFKKIECFDSVEISGVEDRFNA | |
| | SLGTYHDLLKIIKDKDFLDNEENEDILEDIVLTLTLFEDREMIEERLKTYAHLFDDKVMK | |
| | QLKRRRYTGWGRLSRKLINGIRDKQSGKTILDFLKSDGFANRNFMQLIHDDSLTFKEDIQ | |
| | KAQVSGQGDSLHEHIANLAGSPAIKKGILQTVKVVDELVKVMGRHKPENIVIEMARENQT | |
| | TQKGQKNSRERMKRIEEGIKELGSQILKEHPVENTQLQNEKLYLYYLQNGRDMYVDQELD | |
| | INRLSDYDVDHIVPQSFLKDDSIDNKVLTRSDKARGKSDNVPSEEVVKKMKNYWRQLLNA | |
| | KLITQRKFDNLTKAERGGLSELDKAGFIKRQLVETRQITKHVAQILDSRMNTKYDENDKL | |
| | IREVKVITLKSKLVSDFRKDFQFYKVREINNYHHAHDAYLNAVVGTALIKKYPKLESEFV | |
| | YGDYKVYDVRKMIAKSEQEIGKATAKYFFYSNIMNFFKTEITLANGEIRKRPLIETNGET | |
| | GEIVWDKGRDFATVRKVLSMPQVNIVKKTEVQTGGFSKESILPKRNSDKLIARKKDWDPK | |
| | KYGGFDSPTVAYSVLVVAKVEKGKSKKLKSVKELLGITIMERSSFEKNPIDFLEAKGYKE | |
| | VKKDLIIKLPKYSLFELENGRKRMLASAGELQKGNELALPSKYVNFLYLASHYEKLKGSP | |
| | EDNEQKQLFVEQHKHYLDEIIEQISEFSKRVILADANLDKVLSAYNKHRDKPIREQAENI | |
| | IHLFTLTNLGAPAAFKYFDTTIDRKRYTSTKEVLDATLIHQSITGLYETRIDLSQLGGDA | |
| | EAAAKEAAAKEAAAKEAAAKALEAEAAAKEAAAKEAAAKEAAAKATAPLEEEYRLFLEAP | |
| | IQNVTLLEQWKREIPKVWAEINPPGLASTQAPIHVQLLSTALPVRVRQYPITLEAKRSLR | |
| | ETIRKFRAAGILRPVHSPWNTPLLPVRKSGTSEYRMVQDLREVNKRVETIHPTVPNPYTL | |
| | LSLLPPDRIWYSVLDLKDAFFCIPLAPESQLIFAFEWADAEEGESGQLTWTRLPQGFKNS | |
| | PTLFNEALNRDLQGFRLDHPSVSLLQYVDDLLIAADTQAACLSATRDLLMTLAELGYRVS | |
| | GKKAQLCQEEVTYLGFKIHKGSRSLSNSRTQAILQIPVPKTKRQVREFLGKIGYCRLFIP | |
| | GFAELAQPLYAATRPGNDPLVWGEKEEEAFQSLKLALTQPPALALPSLDKPFQLFVEETS | |
| | GAAKGVLTQALGPWKRPVAYLSKRLDPVAAGWPRCLRAIAAAALLTREASKLTFGQDIEI | |
| | TSSHNLESLLRSPPDKWLTNARITQYQVLLLDPPRVRFKQTAALNPATLLPETDDTLPIH | |
| | HCLDTLDSLTSTRPDLTDQPLAQAEATLFTDGSSYIRDGKRYAGAAVVTLDSVIWAEPLP | |
| | IGTSAQKAELIALTKALEWSKDKSVNIYTDSRYAFATLHVHGMIYRERGWLTAGGKAIKN | |
| | APEILALLTAVWLPKRVAVMHCKGHQKDDAPTSTGNRRADEVAREVAIRPLSTQATISGS | |
| | SGGGEAAAKMASNFTQFVLVDNGGTGDVTVAPSNFANGIAEWISSNSRSQAYKVTCSVRQ | |
| | SSAQNRKYTIKVEVPKGAWRSYLNMELTIPIFATNSDCELIVKAMQGLLKDGNPIPSAIA | |
| | ANSGIYGGSGGSMASNFTQFVLVDNGGTGDVTVAPSNFANGIAEWISSNSRSQAYKVTCS | |
| | VRQSSAQNRKYTIKVEVPKGAWRSYLNMELTIPIFATNSDCELIVKAMQGLLKDGNPIPS | |
| | AIAANSGIYGGGSGGGSGGGSGGGSMASNFTQFVLVDNGGTGDVTVAPSNFANGIAEWIS | |
| | SNSRSQAYKVTCSVRQSSAQNRKYTIKVEVPKGAWRSYLNMELTIPIFATNSDCELIVKA | |
| | MQGLLKDGNPIPSAIAANSGIYGGSGGSMASNFTQFVLVDNGGTGDVTVAPSNFANGIAE | |
| | WISSNSRSQAYKVTCSVRQSSAQNRKYTIKVEVPKGAWRSYLNMELTIPIFATNSDCELI | |
| | VKAMQGLLKDGNPIPSAIAANSGIYKRTADGSEFESPKKKAKVE | |
| PL12097 | MPAAKRVKLDGGDKKYSIGLDIGTNSVGWAVITDEYKVPSKKFKVLGNTDRHSIKKNLIG | 16,212 |
| | ALLFDSGETAEATRLKRTARRRYTRRKNRICYLQEIFSNEMAKVDDSFFHRLEESFLVEE | |
| | DKKHERHPIFGNIVDEVAYHEKYPTIYHLRKKLVDSTDKADLRLIYLALAHMIKFRGHFL | |
| | IEGDLNPDNSDVDKLFIQLVQTYNQLFEENPINASGVDAKAILSARLSKSRRLENLIAQL | |
| | PGEKKNGLFGNLIALSLGLTPNFKSNFDLAEDAKLQLSKDTYDDDLDNLLAQIGDQYADL | |
| | FLAAKNLSDAILLSDILRVNTEITKAPLSASMIKRYDEHHQDLTLLKALVRQQLPEKYKE | |
| | IFFDQSKNGYAGYIDGGASQEEFYKFIKPILEKMDGTEELLVKLNREDLLRKQRTFDNGS | |
| | IPHQIHLGELHAILRRQEDFYPFLKDNREKIEKILTFRIPYYVGPLARGNSRFAWMTRKS | |
| | EETITPWNFEEVVDKGASAQSFIERMTNFDKNLPNEKVLPKHSLLYEYFTVYNELTKVKY | |
| | VTEGMRKPAFLSGEQKKAIVDLLFKTNRKVTVKQLKEDYFKKIECFDSVEISGVEDRFNA | |
| | SLGTYHDLLKIIKDKDFLDNEENEDILEDIVLTLTLFEDREMIEERLKTYAHLFDDKVMK | |
| | QLKRRRYTGWGRLSRKLINGIRDKQSGKTILDFLKSDGFANRNFMQLIHDDSLTFKEDIQ | |
| | KAQVSGQGDSLHEHIANLAGSPAIKKGILQTVKVVDELVKVMGRHKPENIVIEMARENQT | |
| | TQKGQKNSRERMKRIEEGIKELGSQILKEHPVENTQLQNEKLYLYYLQNGRDMYVDQELD | |
| | INRLSDYDVDHIVPQSFLKDDSIDNKVLTRSDKARGKSDNVPSEEVVKKMKNYWRQLLNA | |
| | KLITQRKFDNLTKAERGGLSELDKAGFIKRQLVETRQITKHVAQILDSRMNTKYDENDKL | |
| | IREVKVITLKSKLVSDFRKDFQFYKVREINNYHHAHDAYLNAVVGTALIKKYPKLESEFV | |
| | YGDYKVYDVRKMIAKSEQEIGKATAKYFFYSNIMNFFKTEITLANGEIRKRPLIETNGET | |
| | GEIVWDKGRDFATVRKVLSMPQVNIVKKTEVQTGGFSKESILPKRNSDKLIARKKDWDPK | |
| | KYGGFDSPTVAYSVLVVAKVEKGKSKKLKSVKELLGITIMERSSFEKNPIDFLEAKGYKE | |
| | VKKDLIIKLPKYSLFELENGRKRMLASAGELQKGNELALPSKYVNFLYLASHYEKLKGSP | |
| | EDNEQKQLFVEQHKHYLDEIIEQISEFSKRVILADANLDKVLSAYNKHRDKPIREQAENI | |
| | IHLFTLTNLGAPAAFKYFDTTIDRKRYTSTKEVLDATLIHQSITGLYETRIDLSQLGGDA | |
| | EAAAKEAAAKEAAAKEAAAKALEAEAAAKEAAAKEAAAKEAAAKATLNIEDEHRLHETSK | |
| | EPDVSLGSTWLSDFPQAWAETGGMGLAVRQAPLIIPLKATSTPVSIKQYPMSQEARLGIK | |
| | PHIQRLLDQGILVPCQSPWNTPLLPVKKPGTNDYRPVQDLREVNKRVEDIHPTVPNPYNL | |
| | LSGLPPSHQWYTVLDLKDAFFCLRLHPTSQPLFAFEWRDPEMGISGQLTWTRLPQGFKNS | |
| | PTLFNEALHRDLADFRIQHPDLILLQYVDDLLLAATSELDCQQGTRALLQTLGNLGYRAS | |
| | AKKAQICQKQVKYLGYLLKEGQRWLTEARKETVMGQPTPKTPRQLREFLGKAGFCRLFIP | |
| | GFAEMAAPLYPLTKPGTLFNWGPDQQKAYQEIKQALLTAPALGLPDLTKPFELFVDEKQG | |
| | YAKGVLTQKLGPWRRPVAYLSKKLDPVAAGWPPCLRMVAAIAVLTKDAGKLTMGQPLVIL | |
| | APHAVEALVKQPPDRWLSNARMTHYQALLLDTDRVQFGPVVALNPATLLPLPEEGLQHNC | |
| | LDILAEAHGTRPDLTDQPLPDADHTWYTDGSSLLQEGQRKAGAAVTTETEVIWAKALPAG | |
| | TSAQRAELIALTQALKMAEGKKLNVYTDSRYAFATAHIHGEIYRRRGWLTSEGKEIKNKD | |
| | EILALLKALFLPKRLSIIHCPGHQKGHSAEARGNRMADQAARKAAITETPDTSTLLAEAA | |
| | AKEAAAKEAAAKEAAAKALEAEAAAKEAAAKEAAAKEAAAKAMASNFTQFVLVDNGGTGD | |
| | VTVAPSNFANGIAEWISSNSRSQAYKVTCSVRQSSAQNRKYTIKVEVPKGAWRSYLNMEL | |
| | TIPIFATNSDCELIVKAMQGLLKDGNPIPSAIAANSGIYKRTADGSEFESPKKKAKVE | |
| PL12098 | MPAAKRVKLDGGDKKYSIGLDIGTNSVGWAVITDEYKVPSKKFKVLGNTDRHSIKKNLIG | 16,213 |
| | ALLFDSGETAEATRLKRTARRRYTRRKNRICYLQEIFSNEMAKVDDSFFHRLEESFLVEE | |
| | DKKHERHPIFGNIVDEVAYHEKYPTIYHLRKKLVDSTDKADLRLIYLALAHMIKFRGHFL | |
| | IEGDLNPDNSDVDKLFIQLVQTYNQLFEENPINASGVDAKAILSARLSKSRRLENLIAQL | |
| | PGEKKNGLFGNLIALSLGLTPNFKSNFDLAEDAKLQLSKDTYDDDLDNLLAQIGDQYADL | |
| | FLAAKNLSDAILLSDILRVNTEITKAPLSASMIKRYDEHHQDLTLLKALVRQQLPEKYKE | |
| | IFFDQSKNGYAGYIDGGASQEEFYKFIKPILEKMDGTEELLVKLNREDLLRKQRTFDNGS | |
| | IPHQIHLGELHAILRRQEDFYPFLKDNREKIEKILTFRIPYYVGPLARGNSRFAWMTRKS | |
| | EETITPWNFEEVVDKGASAQSFIERMTNFDKNLPNEKVLPKHSLLYEYFTVYNELTKVKY | |
| | VTEGMRKPAFLSGEQKKAIVDLLFKTNRKVTVKQLKEDYFKKIECFDSVEISGVEDRFNA | |
| | SLGTYHDLLKIIKDKDFLDNEENEDILEDIVLTLTLFEDREMIEERLKTYAHLFDDKVMK | |
| | QLKRRRYTGWGRLSRKLINGIRDKQSGKTILDFLKSDGFANRNFMQLIHDDSLTFKEDIQ | |
| | KAQVSGQGDSLHEHIANLAGSPAIKKGILQTVKVVDELVKVMGRHKPENIVIEMARENQT | |
| | TQKGQKNSRERMKRIEEGIKELGSQILKEHPVENTQLQNEKLYLYYLQNGRDMYVDQELD | |
| | INRLSDYDVDHIVPQSFLKDDSIDNKVLTRSDKARGKSDNVPSEEVVKKMKNYWRQLLNA | |
| | KLITQRKFDNLTKAERGGLSELDKAGFIKRQLVETRQITKHVAQILDSRMNTKYDENDKL | |
| | IREVKVITLKSKLVSDFRKDFQFYKVREINNYHHAHDAYLNAVVGTALIKKYPKLESEFV | |
| | YGDYKVYDVRKMIAKSEQEIGKATAKYFFYSNIMNFFKTEITLANGEIRKRPLIETNGET | |
| | GEIVWDKGRDFATVRKVLSMPQVNIVKKTEVQTGGFSKESILPKRNSDKLIARKKDWDPK | |
| | KYGGFDSPTVAYSVLVVAKVEKGKSKKLKSVKELLGITIMERSSFEKNPIDFLEAKGYKE | |
| | VKKDLIIKLPKYSLFELENGRKRMLASAGELQKGNELALPSKYVNFLYLASHYEKLKGSP | |
| | EDNEQKQLFVEQHKHYLDEIIEQISEFSKRVILADANLDKVLSAYNKHRDKPIREQAENI | |
| | IHLFTLTNLGAPAAFKYFDTTIDRKRYTSTKEVLDATLIHQSITGLYETRIDLSQLGGDA | |
| | EAAAKEAAAKEAAAKEAAAKALEAEAAAKEAAAKEAAAKEAAAKATLNIEDEHRLHETSK | |
| | EPDVSLGSTWLSDFPQAWAETGGMGLAVRQAPLIIPLKATSTPVSIKQYPMSQEARLGIK | |
| | PHIQRLLDQGILVPCQSPWNTPLLPVKKPGTNDYRPVQDLREVNKRVEDIHPTVPNPYNL | |
| | LSGLPPSHQWYTVLDLKDAFFCLRLHPTSQPLFAFEWRDPEMGISGQLTWTRLPQGFKNS | |
| | PTLFNEALHRDLADFRIQHPDLILLQYVDDLLLAATSELDCQQGTRALLQTLGNLGYRAS | |
| | AKKAQICQKQVKYLGYLLKEGQRWLTEARKETVMGQPTPKTPRQLREFLGKAGFCRLFIP | |
| | GFAEMAAPLYPLTKPGTLFNWGPDQQKAYQEIKQALLTAPALGLPDLTKPFELFVDEKQG | |
| | YAKGVLTQKLGPWRRPVAYLSKKLDPVAAGWPPCLRMVAAIAVLTKDAGKLTMGQPLVIL | |
| | APHAVEALVKQPPDRWLSNARMTHYQALLLDTDRVQFGPVVALNPATLLPLPEEGLQHNC | |
| | LDILAEAHGTRPDLTDQPLPDADHTWYTDGSSLLQEGQRKAGAAVTTETEVIWAKALPAG | |
| | TSAQRAELIALTQALKMAEGKKLNVYTDSRYAFATAHIHGEIYRRRGWLTSEGKEIKNKD | |
| | EILALLKALFLPKRLSIIHCPGHQKGHSAEARGNRMADQAARKAAITETPDTSTLLAEAA | |
| | AKEAAAKEAAAKEAAAKALEAEAAAKEAAAKEAAAKEAAAKAMASNFTQFVLVDNGGTGD | |
| | VTVAPSNFANGIAEWISSNSRSQAYKVTCSVRQSSAQNRKYTIKVEVPKGAWRSYLNMEL | |
| | TIPIFATNSDCELIVKAMQGLLKDGNPIPSAIAANSGIYGGSGGSMASNFTQFVLVDNGG | |
| | TGDVTVAPSNFANGIAEWISSNSRSQAYKVTCSVRQSSAQNRKYTIKVEVPKGAWRSYLN | |
| | MELTIPIFATNSDCELIVKAMQGLLKDGNPIPSAIAANSGIYKRTADGSEFESPKKKAKV | |
| | E | |
| PL12099 | MPAAKRVKLDGGDKKYSIGLDIGTNSVGWAVITDEYKVPSKKFKVLGNTDRHSIKKNLIG | 16,214 |
| | ALLFDSGETAEATRLKRTARRRYTRRKNRICYLQEIFSNEMAKVDDSFFHRLEESFLVEE | |
| | DKKHERHPIFGNIVDEVAYHEKYPTIYHLRKKLVDSTDKADLRLIYLALAHMIKFRGHFL | |
| | IEGDLNPDNSDVDKLFIQLVQTYNQLFEENPINASGVDAKAILSARLSKSRRLENLIAQL | |
| | PGEKKNGLFGNLIALSLGLTPNFKSNFDLAEDAKLQLSKDTYDDDLDNLLAQIGDQYADL | |
| | FLAAKNLSDAILLSDILRVNTEITKAPLSASMIKRYDEHHQDLTLLKALVRQQLPEKYKE | |
| | IFFDQSKNGYAGYIDGGASQEEFYKFIKPILEKMDGTEELLVKLNREDLLRKQRTFDNGS | |
| | IPHQIHLGELHAILRRQEDFYPFLKDNREKIEKILTFRIPYYVGPLARGNSRFAWMTRKS | |
| | EETITPWNFEEVVDKGASAQSFIERMTNFDKNLPNEKVLPKHSLLYEYFTVYNELTKVKY | |
| | VTEGMRKPAFLSGEQKKAIVDLLFKTNRKVTVKQLKEDYFKKIECFDSVEISGVEDRFNA | |
| | SLGTYHDLLKIIKDKDFLDNEENEDILEDIVLTLTLFEDREMIEERLKTYAHLFDDKVMK | |
| | QLKRRRYTGWGRLSRKLINGIRDKQSGKTILDFLKSDGFANRNFMQLIHDDSLTFKEDIQ | |
| | KAQVSGQGDSLHEHIANLAGSPAIKKGILQTVKVVDELVKVMGRHKPENIVIEMARENQT | |
| | TQKGQKNSRERMKRIEEGIKELGSQILKEHPVENTQLQNEKLYLYYLQNGRDMYVDQELD | |
| | INRLSDYDVDHIVPQSFLKDDSIDNKVLTRSDKARGKSDNVPSEEVVKKMKNYWRQLLNA | |
| | KLITQRKFDNLTKAERGGLSELDKAGFIKRQLVETRQITKHVAQILDSRMNTKYDENDKL | |
| | IREVKVITLKSKLVSDFRKDFQFYKVREINNYHHAHDAYLNAVVGTALIKKYPKLESEFV | |
| | YGDYKVYDVRKMIAKSEQEIGKATAKYFFYSNIMNFFKTEITLANGEIRKRPLIETNGET | |
| | GEIVWDKGRDFATVRKVLSMPQVNIVKKTEVQTGGFSKESILPKRNSDKLIARKKDWDPK | |
| | KYGGFDSPTVAYSVLVVAKVEKGKSKKLKSVKELLGITIMERSSFEKNPIDFLEAKGYKE | |
| | VKKDLIIKLPKYSLFELENGRKRMLASAGELQKGNELALPSKYVNFLYLASHYEKLKGSP | |
| | EDNEQKQLFVEQHKHYLDEIIEQISEFSKRVILADANLDKVLSAYNKHRDKPIREQAENI | |
| | IHLFTLTNLGAPAAFKYFDTTIDRKRYTSTKEVLDATLIHQSITGLYETRIDLSQLGGDA | |
| | EAAAKEAAAKEAAAKEAAAKALEAEAAAKEAAAKEAAAKEAAAKATLNIEDEHRLHETSK | |
| | EPDVSLGSTWLSDFPQAWAETGGMGLAVRQAPLIIPLKATSTPVSIKQYPMSQEARLGIK | |
| | PHIQRLLDQGILVPCQSPWNTPLLPVKKPGTNDYRPVQDLREVNKRVEDIHPTVPNPYNL | |
| | LSGLPPSHQWYTVLDLKDAFFCLRLHPTSQPLFAFEWRDPEMGISGQLTWTRLPQGFKNS | |
| | PTLFNEALHRDLADFRIQHPDLILLQYVDDLLLAATSELDCQQGTRALLQTLGNLGYRAS | |
| | AKKAQICQKQVKYLGYLLKEGQRWLTEARKETVMGQPTPKTPRQLREFLGKAGFCRLFIP | |
| | GFAEMAAPLYPLTKPGTLFNWGPDQQKAYQEIKQALLTAPALGLPDLTKPFELFVDEKQG | |
| | YAKGVLTQKLGPWRRPVAYLSKKLDPVAAGWPPCLRMVAAIAVLTKDAGKLTMGQPLVIL | |
| | APHAVEALVKQPPDRWLSNARMTHYQALLLDTDRVQFGPVVALNPATLLPLPEEGLQHNC | |
| | LDILAEAHGTRPDLTDQPLPDADHTWYTDGSSLLQEGQRKAGAAVTTETEVIWAKALPAG | |
| | TSAQRAELIALTQALKMAEGKKLNVYTDSRYAFATAHIHGEIYRRRGWLTSEGKEIKNKD | |
| | EILALLKALFLPKRLSIIHCPGHQKGHSAEARGNRMADQAARKAAITETPDTSTLLAEAA | |
| | AKEAAAKEAAAKEAAAKALEAEAAAKEAAAKEAAAKEAAAKAMASNFTQFVLVDNGGTGD | |
| | VTVAPSNFANGIAEWISSNSRSQAYKVTCSVRQSSAQNRKYTIKVEVPKGAWRSYLNMEL | |
| | TIPIFATNSDCELIVKAMQGLLKDGNPIPSAIAANSGIYGGSGGSMASNFTQFVLVDNGG | |
| | TGDVTVAPSNFANGIAEWISSNSRSQAYKVTCSVRQSSAQNRKYTIKVEVPKGAWRSYLN | |
| | MELTIPIFATNSDCELIVKAMQGLLKDGNPIPSAIAANSGIYGGGSGGGSGGGSGGGSMA | |
| | SNFTQFVLVDNGGTGDVTVAPSNFANGIAEWISSNSRSQAYKVTCSVRQSSAQNRKYTIK | |
| | VEVPKGAWRSYLNMELTIPIFATNSDCELIVKAMQGLLKDGNPIPSAIAANSGIYGGSGG | |
| | SMASNFTQFVLVDNGGTGDVTVAPSNFANGIAEWISSNSRSQAYKVTCSVRQSSAQNRKY | |
| | TIKVEVPKGAWRSYLNMELTIPIFATNSDCELIVKAMQGLLKDGNPIPSAIAANSGIYKR | |
| | TADGSEFESPKKKAKVE | |
| PL12100 | MPAAKRVKLDGGDKKYSIGLDIGTNSVGWAVITDEYKVPSKKFKVLGNTDRHSIKKNLIG | 16,215 |
| | ALLFDSGETAEATRLKRTARRRYTRRKNRICYLQEIFSNEMAKVDDSFFHRLEESFLVEE | |
| | DKKHERHPIFGNIVDEVAYHEKYPTIYHLRKKLVDSTDKADLRLIYLALAHMIKFRGHFL | |
| | IEGDLNPDNSDVDKLFIQLVQTYNQLFEENPINASGVDAKAILSARLSKSRRLENLIAQL | |
| | PGEKKNGLFGNLIALSLGLTPNFKSNFDLAEDAKLQLSKDTYDDDLDNLLAQIGDQYADL | |
| | FLAAKNLSDAILLSDILRVNTEITKAPLSASMIKRYDEHHQDLTLLKALVRQQLPEKYKE | |
| | IFFDQSKNGYAGYIDGGASQEEFYKFIKPILEKMDGTEELLVKLNREDLLRKQRTFDNGS | |
| | IPHQIHLGELHAILRRQEDFYPFLKDNREKIEKILTFRIPYYVGPLARGNSRFAWMTRKS | |
| | EETITPWNFEEVVDKGASAQSFIERMTNFDKNLPNEKVLPKHSLLYEYFTVYNELTKVKY | |
| | VTEGMRKPAFLSGEQKKAIVDLLFKTNRKVTVKQLKEDYFKKIECFDSVEISGVEDRFNA | |
| | SLGTYHDLLKIIKDKDFLDNEENEDILEDIVLTLTLFEDREMIEERLKTYAHLFDDKVMK | |
| | QLKRRRYTGWGRLSRKLINGIRDKQSGKTILDFLKSDGFANRNFMQLIHDDSLTFKEDIQ | |
| | KAQVSGQGDSLHEHIANLAGSPAIKKGILQTVKVVDELVKVMGRHKPENIVIEMARENQT | |
| | TQKGQKNSRERMKRIEEGIKELGSQILKEHPVENTQLQNEKLYLYYLQNGRDMYVDQELD | |
| | INRLSDYDVDHIVPQSFLKDDSIDNKVLTRSDKARGKSDNVPSEEVVKKMKNYWRQLLNA | |
| | KLITQRKFDNLTKAERGGLSELDKAGFIKRQLVETRQITKHVAQILDSRMNTKYDENDKL | |
| | IREVKVITLKSKLVSDFRKDFQFYKVREINNYHHAHDAYLNAVVGTALIKKYPKLESEFV | |
| | YGDYKVYDVRKMIAKSEQEIGKATAKYFFYSNIMNFFKTEITLANGEIRKRPLIETNGET | |
| | GEIVWDKGRDFATVRKVLSMPQVNIVKKTEVQTGGFSKESILPKRNSDKLIARKKDWDPK | |
| | KYGGFDSPTVAYSVLVVAKVEKGKSKKLKSVKELLGITIMERSSFEKNPIDFLEAKGYKE | |
| | VKKDLIIKLPKYSLFELENGRKRMLASAGELQKGNELALPSKYVNFLYLASHYEKLKGSP | |
| | EDNEQKQLFVEQHKHYLDEIIEQISEFSKRVILADANLDKVLSAYNKHRDKPIREQAENI | |
| | IHLFTLTNLGAPAAFKYFDTTIDRKRYTSTKEVLDATLIHQSITGLYETRIDLSQLGGDA | |
| | EAAAKEAAAKEAAAKEAAAKALEAEAAAKEAAAKEAAAKEAAAKATLNIEDEHRLHETSK | |
| | EPDVSLGSTWLSDFPQAWAETGGMGLAVRQAPLIIPLKATSTPVSIKQYPMSQEARLGIK | |
| | PHIQRLLDQGILVPCQSPWNTPLLPVKKPGTNDYRPVQDLREVNKRVEDIHPTVPNPYNL | |
| | LSGLPPSHQWYTVLDLKDAFFCLRLHPTSQPLFAFEWRDPEMGISGQLTWTRLPQGFKNS | |
| | PTLFNEALHRDLADFRIQHPDLILLQYVDDLLLAATSELDCQQGTRALLQTLGNLGYRAS | |
| | AKKAQICQKQVKYLGYLLKEGQRWLTEARKETVMGQPTPKTPRQLREFLGKAGFCRLFIP | |
| | GFAEMAAPLYPLTKPGTLFNWGPDQQKAYQEIKQALLTAPALGLPDLTKPFELFVDEKQG | |
| | YAKGVLTQKLGPWRRPVAYLSKKLDPVAAGWPPCLRMVAAIAVLTKDAGKLTMGQPLVIL | |
| | APHAVEALVKQPPDRWLSNARMTHYQALLLDTDRVQFGPVVALNPATLLPLPEEGLQHNC | |
| | LDILAEAHGTRPDLTDQPLPDADHTWYTDGSSLLQEGQRKAGAAVTTETEVIWAKALPAG | |
| | TSAQRAELIALTQALKMAEGKKLNVYTDSRYAFATAHIHGEIYRRRGWLTSEGKEIKNKD | |
| | EILALLKALFLPKRLSIIHCPGHQKGHSAEARGNRMADQAARKAAITETPDTSTLLSGGS | |
| | SGGSSGSETPGTSESATPESSGGSSGGSSMASNFTQFVLVDNGGTGDVTVAPSNFANGIA | |
| | EWISSNSRSQAYKVTCSVRQSSAQNRKYTIKVEVPKGAWRSYLNMELTIPIFATNSDCEL | |
| | IVKAMQGLLKDGNPIPSAIAANSGIYKRTADGSEFESPKKKAKVE | |
| PL12101 | MPAAKRVKLDGGDKKYSIGLDIGTNSVGWAVITDEYKVPSKKFKVLGNTDRHSIKKNLIG | 16,216 |
| | ALLFDSGETAEATRLKRTARRRYTRRKNRICYLQEIFSNEMAKVDDSFFHRLEESFLVEE | |
| | DKKHERHPIFGNIVDEVAYHEKYPTIYHLRKKLVDSTDKADLRLIYLALAHMIKFRGHFL | |
| | IEGDLNPDNSDVDKLFIQLVQTYNQLFEENPINASGVDAKAILSARLSKSRRLENLIAQL | |
| | PGEKKNGLFGNLIALSLGLTPNFKSNFDLAEDAKLQLSKDTYDDDLDNLLAQIGDQYADL | |
| | FLAAKNLSDAILLSDILRVNTEITKAPLSASMIKRYDEHHQDLTLLKALVRQQLPEKYKE | |
| | IFFDQSKNGYAGYIDGGASQEEFYKFIKPILEKMDGTEELLVKLNREDLLRKQRTFDNGS | |
| | IPHQIHLGELHAILRRQEDFYPFLKDNREKIEKILTFRIPYYVGPLARGNSRFAWMTRKS | |
| | EETITPWNFEEVVDKGASAQSFIERMTNFDKNLPNEKVLPKHSLLYEYFTVYNELTKVKY | |
| | VTEGMRKPAFLSGEQKKAIVDLLFKTNRKVTVKQLKEDYFKKIECFDSVEISGVEDRFNA | |
| | SLGTYHDLLKIIKDKDFLDNEENEDILEDIVLTLTLFEDREMIEERLKTYAHLFDDKVMK | |
| | QLKRRRYTGWGRLSRKLINGIRDKQSGKTILDFLKSDGFANRNFMQLIHDDSLTFKEDIQ | |
| | KAQVSGQGDSLHEHIANLAGSPAIKKGILQTVKVVDELVKVMGRHKPENIVIEMARENQT | |
| | TQKGQKNSRERMKRIEEGIKELGSQILKEHPVENTQLQNEKLYLYYLQNGRDMYVDQELD | |
| | INRLSDYDVDHIVPQSFLKDDSIDNKVLTRSDKARGKSDNVPSEEVVKKMKNYWRQLLNA | |
| | KLITQRKFDNLTKAERGGLSELDKAGFIKRQLVETRQITKHVAQILDSRMNTKYDENDKL | |
| | IREVKVITLKSKLVSDFRKDFQFYKVREINNYHHAHDAYLNAVVGTALIKKYPKLESEFV | |
| | YGDYKVYDVRKMIAKSEQEIGKATAKYFFYSNIMNFFKTEITLANGEIRKRPLIETNGET | |
| | GEIVWDKGRDFATVRKVLSMPQVNIVKKTEVQTGGFSKESILPKRNSDKLIARKKDWDPK | |
| | KYGGFDSPTVAYSVLVVAKVEKGKSKKLKSVKELLGITIMERSSFEKNPIDFLEAKGYKE | |
| | VKKDLIIKLPKYSLFELENGRKRMLASAGELQKGNELALPSKYVNFLYLASHYEKLKGSP | |
| | EDNEQKQLFVEQHKHYLDEIIEQISEFSKRVILADANLDKVLSAYNKHRDKPIREQAENI | |
| | IHLFTLTNLGAPAAFKYFDTTIDRKRYTSTKEVLDATLIHQSITGLYETRIDLSQLGGDA | |
| | EAAAKEAAAKEAAAKEAAAKALEAEAAAKEAAAKEAAAKEAAAKATLNIEDEHRLHETSK | |
| | EPDVSLGSTWLSDFPQAWAETGGMGLAVRQAPLIIPLKATSTPVSIKQYPMSQEARLGIK | |
| | PHIQRLLDQGILVPCQSPWNTPLLPVKKPGTNDYRPVQDLREVNKRVEDIHPTVPNPYNL | |
| | LSGLPPSHQWYTVLDLKDAFFCLRLHPTSQPLFAFEWRDPEMGISGQLTWTRLPQGFKNS | |
| | PTLFNEALHRDLADFRIQHPDLILLQYVDDLLLAATSELDCQQGTRALLQTLGNLGYRAS | |
| | AKKAQICQKQVKYLGYLLKEGQRWLTEARKETVMGQPTPKTPRQLREFLGKAGFCRLFIP | |
| | GFAEMAAPLYPLTKPGTLFNWGPDQQKAYQEIKQALLTAPALGLPDLTKPFELFVDEKQG | |
| | YAKGVLTQKLGPWRRPVAYLSKKLDPVAAGWPPCLRMVAAIAVLTKDAGKLTMGQPLVIL | |
| | APHAVEALVKQPPDRWLSNARMTHYQALLLDTDRVQFGPVVALNPATLLPLPEEGLQHNC | |
| | LDILAEAHGTRPDLTDQPLPDADHTWYTDGSSLLQEGQRKAGAAVTTETEVIWAKALPAG | |
| | TSAQRAELIALTQALKMAEGKKLNVYTDSRYAFATAHIHGEIYRRRGWLTSEGKEIKNKD | |
| | EILALLKALFLPKRLSIIHCPGHQKGHSAEARGNRMADQAARKAAITETPDTSTLLSGGS | |
| | SGGSSGSETPGTSESATPESSGGSSGGSSMASNFTQFVLVDNGGTGDVTVAPSNFANGIA | |
| | EWISSNSRSQAYKVTCSVRQSSAQNRKYTIKVEVPKGAWRSYLNMELTIPIFATNSDCEL | |
| | IVKAMQGLLKDGNPIPSAIAANSGIYGGSGGSMASNFTQFVLVDNGGTGDVTVAPSNFAN | |
| | GIAEWISSNSRSQAYKVTCSVRQSSAQNRKYTIKVEVPKGAWRSYLNMELTIPIFATNSD | |
| | CELIVKAMQGLLKDGNPIPSAIAANSGIYKRTADGSEFESPKKKAKVE | |
| PL12102 | MPAAKRVKLDGGDKKYSIGLDIGTNSVGWAVITDEYKVPSKKFKVLGNTDRHSIKKNLIG | 16,217 |
| | ALLFDSGETAEATRLKRTARRRYTRRKNRICYLQEIFSNEMAKVDDSFFHRLEESFLVEE | |
| | DKKHERHPIFGNIVDEVAYHEKYPTIYHLRKKLVDSTDKADLRLIYLALAHMIKFRGHFL | |
| | IEGDLNPDNSDVDKLFIQLVQTYNQLFEENPINASGVDAKAILSARLSKSRRLENLIAQL | |
| | PGEKKNGLFGNLIALSLGLTPNFKSNFDLAEDAKLQLSKDTYDDDLDNLLAQIGDQYADL | |
| | FLAAKNLSDAILLSDILRVNTEITKAPLSASMIKRYDEHHQDLTLLKALVRQQLPEKYKE | |
| | IFFDQSKNGYAGYIDGGASQEEFYKFIKPILEKMDGTEELLVKLNREDLLRKQRTFDNGS | |
| | IPHQIHLGELHAILRRQEDFYPFLKDNREKIEKILTFRIPYYVGPLARGNSRFAWMTRKS | |
| | EETITPWNFEEVVDKGASAQSFIERMTNFDKNLPNEKVLPKHSLLYEYFTVYNELTKVKY | |
| | VTEGMRKPAFLSGEQKKAIVDLLFKTNRKVTVKQLKEDYFKKIECFDSVEISGVEDRFNA | |
| | SLGTYHDLLKIIKDKDFLDNEENEDILEDIVLTLTLFEDREMIEERLKTYAHLFDDKVMK | |
| | QLKRRRYTGWGRLSRKLINGIRDKQSGKTILDFLKSDGFANRNFMQLIHDDSLTFKEDIQ | |
| | KAQVSGQGDSLHEHIANLAGSPAIKKGILQTVKVVDELVKVMGRHKPENIVIEMARENQT | |
| | TQKGQKNSRERMKRIEEGIKELGSQILKEHPVENTQLQNEKLYLYYLQNGRDMYVDQELD | |
| | INRLSDYDVDHIVPQSFLKDDSIDNKVLTRSDKARGKSDNVPSEEVVKKMKNYWRQLLNA | |
| | KLITQRKFDNLTKAERGGLSELDKAGFIKRQLVETRQITKHVAQILDSRMNTKYDENDKL | |
| | IREVKVITLKSKLVSDFRKDFQFYKVREINNYHHAHDAYLNAVVGTALIKKYPKLESEFV | |
| | YGDYKVYDVRKMIAKSEQEIGKATAKYFFYSNIMNFFKTEITLANGEIRKRPLIETNGET | |
| | GEIVWDKGRDFATVRKVLSMPQVNIVKKTEVQTGGFSKESILPKRNSDKLIARKKDWDPK | |
| | KYGGFDSPTVAYSVLVVAKVEKGKSKKLKSVKELLGITIMERSSFEKNPIDFLEAKGYKE | |
| | VKKDLIIKLPKYSLFELENGRKRMLASAGELQKGNELALPSKYVNFLYLASHYEKLKGSP | |
| | EDNEQKQLFVEQHKHYLDEIIEQISEFSKRVILADANLDKVLSAYNKHRDKPIREQAENI | |
| | IHLFTLTNLGAPAAFKYFDTTIDRKRYTSTKEVLDATLIHQSITGLYETRIDLSQLGGDA | |
| | EAAAKEAAAKEAAAKEAAAKALEAEAAAKEAAAKEAAAKEAAAKATLNIEDEHRLHETSK | |
| | EPDVSLGSTWLSDFPQAWAETGGMGLAVRQAPLIIPLKATSTPVSIKQYPMSQEARLGIK | |
| | PHIQRLLDQGILVPCQSPWNTPLLPVKKPGTNDYRPVQDLREVNKRVEDIHPTVPNPYNL | |
| | LSGLPPSHQWYTVLDLKDAFFCLRLHPTSQPLFAFEWRDPEMGISGQLTWTRLPQGFKNS | |
| | PTLFNEALHRDLADFRIQHPDLILLQYVDDLLLAATSELDCQQGTRALLQTLGNLGYRAS | |
| | AKKAQICQKQVKYLGYLLKEGQRWLTEARKETVMGQPTPKTPRQLREFLGKAGFCRLFIP | |
| | GFAEMAAPLYPLTKPGTLFNWGPDQQKAYQEIKQALLTAPALGLPDLTKPFELFVDEKQG | |
| | YAKGVLTQKLGPWRRPVAYLSKKLDPVAAGWPPCLRMVAAIAVLTKDAGKLTMGQPLVIL | |
| | APHAVEALVKQPPDRWLSNARMTHYQALLLDTDRVQFGPVVALNPATLLPLPEEGLQHNC | |
| | LDILAEAHGTRPDLTDQPLPDADHTWYTDGSSLLQEGQRKAGAAVTTETEVIWAKALPAG | |
| | TSAQRAELIALTQALKMAEGKKLNVYTDSRYAFATAHIHGEIYRRRGWLTSEGKEIKNKD | |
| | EILALLKALFLPKRLSIIHCPGHQKGHSAEARGNRMADQAARKAAITETPDTSTLLSGGS | |
| | SGGSSGSETPGTSESATPESSGGSSGGSSMASNFTQFVLVDNGGTGDVTVAPSNFANGIA | |
| | EWISSNSRSQAYKVTCSVRQSSAQNRKYTIKVEVPKGAWRSYLNMELTIPIFATNSDCEL | |
| | IVKAMQGLLKDGNPIPSAIAANSGIYGGSGGSMASNFTQFVLVDNGGTGDVTVAPSNFAN | |
| | GIAEWISSNSRSQAYKVTCSVRQSSAQNRKYTIKVEVPKGAWRSYLNMELTIPIFATNSD | |
| | CELIVKAMQGLLKDGNPIPSAIAANSGIYGGGSGGGSGGGSGGGSMASNFTQFVLVDNGG | |
| | TGDVTVAPSNFANGIAEWISSNSRSQAYKVTCSVRQSSAQNRKYTIKVEVPKGAWRSYLN | |
| | MELTIPIFATNSDCELIVKAMQGLLKDGNPIPSAIAANSGIYGGSGGSMASNFTQFVLVD | |
| | NGGTGDVTVAPSNFANGIAEWISSNSRSQAYKVTCSVRQSSAQNRKYTIKVEVPKGAWRS | |
| | YLNMELTIPIFATNSDCELIVKAMQGLLKDGNPIPSAIAANSGIYKRTADGSEFESPKKK | |
| | AKVE | |
| PL12103 | MPAAKRVKLDGGDKKYSIGLDIGTNSVGWAVITDEYKVPSKKFKVLGNTDRHSIKKNLIG | 16,218 |
| | ALLFDSGETAEATRLKRTARRRYTRRKNRICYLQEIFSNEMAKVDDSFFHRLEESFLVEE | |
| | DKKHERHPIFGNIVDEVAYHEKYPTIYHLRKKLVDSTDKADLRLIYLALAHMIKFRGHFL | |
| | IEGDLNPDNSDVDKLFIQLVQTYNQLFEENPINASGVDAKAILSARLSKSRRLENLIAQL | |
| | PGEKKNGLFGNLIALSLGLTPNFKSNFDLAEDAKLQLSKDTYDDDLDNLLAQIGDQYADL | |
| | FLAAKNLSDAILLSDILRVNTEITKAPLSASMIKRYDEHHQDLTLLKALVRQQLPEKYKE | |
| | IFFDQSKNGYAGYIDGGASQEEFYKFIKPILEKMDGTEELLVKLNREDLLRKQRTFDNGS | |
| | IPHQIHLGELHAILRRQEDFYPFLKDNREKIEKILTFRIPYYVGPLARGNSRFAWMTRKS | |
| | EETITPWNFEEVVDKGASAQSFIERMTNFDKNLPNEKVLPKHSLLYEYFTVYNELTKVKY | |
| | VTEGMRKPAFLSGEQKKAIVDLLFKTNRKVTVKQLKEDYFKKIECFDSVEISGVEDRFNA | |
| | SLGTYHDLLKIIKDKDFLDNEENEDILEDIVLTLTLFEDREMIEERLKTYAHLFDDKVMK | |
| | QLKRRRYTGWGRLSRKLINGIRDKQSGKTILDFLKSDGFANRNFMQLIHDDSLTFKEDIQ | |
| | KAQVSGQGDSLHEHIANLAGSPAIKKGILQTVKVVDELVKVMGRHKPENIVIEMARENQT | |
| | TQKGQKNSRERMKRIEEGIKELGSQILKEHPVENTQLQNEKLYLYYLQNGRDMYVDQELD | |
| | INRLSDYDVDHIVPQSFLKDDSIDNKVLTRSDKARGKSDNVPSEEVVKKMKNYWRQLLNA | |
| | KLITQRKFDNLTKAERGGLSELDKAGFIKRQLVETRQITKHVAQILDSRMNTKYDENDKL | |
| | IREVKVITLKSKLVSDFRKDFQFYKVREINNYHHAHDAYLNAVVGTALIKKYPKLESEFV | |
| | YGDYKVYDVRKMIAKSEQEIGKATAKYFFYSNIMNFFKTEITLANGEIRKRPLIETNGET | |
| | GEIVWDKGRDFATVRKVLSMPQVNIVKKTEVQTGGFSKESILPKRNSDKLIARKKDWDPK | |
| | KYGGFDSPTVAYSVLVVAKVEKGKSKKLKSVKELLGITIMERSSFEKNPIDFLEAKGYKE | |
| | VKKDLIIKLPKYSLFELENGRKRMLASAGELQKGNELALPSKYVNFLYLASHYEKLKGSP | |
| | EDNEQKQLFVEQHKHYLDEIIEQISEFSKRVILADANLDKVLSAYNKHRDKPIREQAENI | |
| | IHLFTLTNLGAPAAFKYFDTTIDRKRYTSTKEVLDATLIHQSITGLYETRIDLSQLGGDA | |
| | EAAAKEAAAKEAAAKEAAAKALEAEAAAKEAAAKEAAAKEAAAKATLNIEDEHRLHETSK | |
| | EPDVSLGSTWLSDFPQAWAETGGMGLAVRQAPLIIPLKATSTPVSIKQYPMSQEARLGIK | |
| | PHIQRLLDQGILVPCQSPWNTPLLPVKKPGTNDYRPVQDLREVNKRVEDIHPTVPNPYNL | |
| | LSGLPPSHQWYTVLDLKDAFFCLRLHPTSQPLFAFEWRDPEMGISGQLTWTRLPQGFKNS | |
| | PTLFNEALHRDLADFRIQHPDLILLQYVDDLLLAATSELDCQQGTRALLQTLGNLGYRAS | |
| | AKKAQICQKQVKYLGYLLKEGQRWLTEARKETVMGQPTPKTPRQLREFLGKAGFCRLFIP | |
| | GFAEMAAPLYPLTKPGTLFNWGPDQQKAYQEIKQALLTAPALGLPDLTKPFELFVDEKQG | |
| | YAKGVLTQKLGPWRRPVAYLSKKLDPVAAGWPPCLRMVAAIAVLTKDAGKLTMGQPLVIL | |
| | APHAVEALVKQPPDRWLSNARMTHYQALLLDTDRVQFGPVVALNPATLLPLPEEGLQHNC | |
| | LDILAEAHGTRPDLTDQPLPDADHTWYTDGSSLLQEGQRKAGAAVTTETEVIWAKALPAG | |
| | TSAQRAELIALTQALKMAEGKKLNVYTDSRYAFATAHIHGEIYRRRGWLTSEGKEIKNKD | |
| | EILALLKALFLPKRLSIIHCPGHQKGHSAEARGNRMADQAARKAAITETPDTSTLLGSSG | |
| | SSGSSGSSGSSGSSMASNFTQFVLVDNGGTGDVTVAPSNFANGIAEWISSNSRSQAYKVT | |
| | CSVRQSSAQNRKYTIKVEVPKGAWRSYLNMELTIPIFATNSDCELIVKAMQGLLKDGNPI | |
| | PSAIAANSGIYKRTADGSEFESPKKKAKVE | |
| PL12104 | MPAAKRVKLDGGDKKYSIGLDIGTNSVGWAVITDEYKVPSKKFKVLGNTDRHSIKKNLIG | 16,219 |
| | ALLFDSGETAEATRLKRTARRRYTRRKNRICYLQEIFSNEMAKVDDSFFHRLEESFLVEE | |
| | DKKHERHPIFGNIVDEVAYHEKYPTIYHLRKKLVDSTDKADLRLIYLALAHMIKFRGHFL | |
| | IEGDLNPDNSDVDKLFIQLVQTYNQLFEENPINASGVDAKAILSARLSKSRRLENLIAQL | |
| | PGEKKNGLFGNLIALSLGLTPNFKSNFDLAEDAKLQLSKDTYDDDLDNLLAQIGDQYADL | |
| | FLAAKNLSDAILLSDILRVNTEITKAPLSASMIKRYDEHHQDLTLLKALVRQQLPEKYKE | |
| | IFFDQSKNGYAGYIDGGASQEEFYKFIKPILEKMDGTEELLVKLNREDLLRKQRTFDNGS | |
| | IPHQIHLGELHAILRRQEDFYPFLKDNREKIEKILTFRIPYYVGPLARGNSRFAWMTRKS | |
| | EETITPWNFEEVVDKGASAQSFIERMTNFDKNLPNEKVLPKHSLLYEYFTVYNELTKVKY | |
| | VTEGMRKPAFLSGEQKKAIVDLLFKTNRKVTVKQLKEDYFKKIECFDSVEISGVEDRFNA | |
| | SLGTYHDLLKIIKDKDFLDNEENEDILEDIVLTLTLFEDREMIEERLKTYAHLFDDKVMK | |
| | QLKRRRYTGWGRLSRKLINGIRDKQSGKTILDFLKSDGFANRNFMQLIHDDSLTFKEDIQ | |
| | KAQVSGQGDSLHEHIANLAGSPAIKKGILQTVKVVDELVKVMGRHKPENIVIEMARENQT | |
| | TQKGQKNSRERMKRIEEGIKELGSQILKEHPVENTQLQNEKLYLYYLQNGRDMYVDQELD | |
| | INRLSDYDVDHIVPQSFLKDDSIDNKVLTRSDKARGKSDNVPSEEVVKKMKNYWRQLLNA | |
| | KLITQRKFDNLTKAERGGLSELDKAGFIKRQLVETRQITKHVAQILDSRMNTKYDENDKL | |
| | IREVKVITLKSKLVSDFRKDFQFYKVREINNYHHAHDAYLNAVVGTALIKKYPKLESEFV | |
| | YGDYKVYDVRKMIAKSEQEIGKATAKYFFYSNIMNFFKTEITLANGEIRKRPLIETNGET | |
| | GEIVWDKGRDFATVRKVLSMPQVNIVKKTEVQTGGFSKESILPKRNSDKLIARKKDWDPK | |
| | KYGGFDSPTVAYSVLVVAKVEKGKSKKLKSVKELLGITIMERSSFEKNPIDFLEAKGYKE | |
| | VKKDLIIKLPKYSLFELENGRKRMLASAGELQKGNELALPSKYVNFLYLASHYEKLKGSP | |
| | EDNEQKQLFVEQHKHYLDEIIEQISEFSKRVILADANLDKVLSAYNKHRDKPIREQAENI | |
| | IHLFTLTNLGAPAAFKYFDTTIDRKRYTSTKEVLDATLIHQSITGLYETRIDLSQLGGDA | |
| | EAAAKEAAAKEAAAKEAAAKALEAEAAAKEAAAKEAAAKEAAAKATLNIEDEHRLHETSK | |
| | EPDVSLGSTWLSDFPQAWAETGGMGLAVRQAPLIIPLKATSTPVSIKQYPMSQEARLGIK | |
| | PHIQRLLDQGILVPCQSPWNTPLLPVKKPGTNDYRPVQDLREVNKRVEDIHPTVPNPYNL | |
| | LSGLPPSHQWYTVLDLKDAFFCLRLHPTSQPLFAFEWRDPEMGISGQLTWTRLPQGFKNS | |
| | PTLFNEALHRDLADFRIQHPDLILLQYVDDLLLAATSELDCQQGTRALLQTLGNLGYRAS | |
| | AKKAQICQKQVKYLGYLLKEGQRWLTEARKETVMGQPTPKTPRQLREFLGKAGFCRLFIP | |
| | GFAEMAAPLYPLTKPGTLFNWGPDQQKAYQEIKQALLTAPALGLPDLTKPFELFVDEKQG | |
| | YAKGVLTQKLGPWRRPVAYLSKKLDPVAAGWPPCLRMVAAIAVLTKDAGKLTMGQPLVIL | |
| | APHAVEALVKQPPDRWLSNARMTHYQALLLDTDRVQFGPVVALNPATLLPLPEEGLQHNC | |
| | LDILAEAHGTRPDLTDQPLPDADHTWYTDGSSLLQEGQRKAGAAVTTETEVIWAKALPAG | |
| | TSAQRAELIALTQALKMAEGKKLNVYTDSRYAFATAHIHGEIYRRRGWLTSEGKEIKNKD | |
| | EILALLKALFLPKRLSIIHCPGHQKGHSAEARGNRMADQAARKAAITETPDTSTLLGSSG | |
| | SSGSSGSSGSSGSSMASNFTQFVLVDNGGTGDVTVAPSNFANGIAEWISSNSRSQAYKVT | |
| | CSVRQSSAQNRKYTIKVEVPKGAWRSYLNMELTIPIFATNSDCELIVKAMQGLLKDGNPI | |
| | PSAIAANSGIYGGSGGSMASNFTQFVLVDNGGTGDVTVAPSNFANGIAEWISSNSRSQAY | |
| | KVTCSVRQSSAQNRKYTIKVEVPKGAWRSYLNMELTIPIFATNSDCELIVKAMQGLLKDG | |
| | NPIPSAIAANSGIYKRTADGSEFESPKKKAKVE | |
| PL12105 | MPAAKRVKLDGGDKKYSIGLDIGTNSVGWAVITDEYKVPSKKFKVLGNTDRHSIKKNLIG | 16,220 |
| | ALLFDSGETAEATRLKRTARRRYTRRKNRICYLQEIFSNEMAKVDDSFFHRLEESFLVEE | |
| | DKKHERHPIFGNIVDEVAYHEKYPTIYHLRKKLVDSTDKADLRLIYLALAHMIKFRGHFL | |
| | IEGDLNPDNSDVDKLFIQLVQTYNQLFEENPINASGVDAKAILSARLSKSRRLENLIAQL | |
| | PGEKKNGLFGNLIALSLGLTPNFKSNFDLAEDAKLQLSKDTYDDDLDNLLAQIGDQYADL | |
| | FLAAKNLSDAILLSDILRVNTEITKAPLSASMIKRYDEHHQDLTLLKALVRQQLPEKYKE | |
| | IFFDQSKNGYAGYIDGGASQEEFYKFIKPILEKMDGTEELLVKLNREDLLRKQRTFDNGS | |
| | IPHQIHLGELHAILRRQEDFYPFLKDNREKIEKILTFRIPYYVGPLARGNSRFAWMTRKS | |
| | EETITPWNFEEVVDKGASAQSFIERMTNFDKNLPNEKVLPKHSLLYEYFTVYNELTKVKY | |
| | VTEGMRKPAFLSGEQKKAIVDLLFKTNRKVTVKQLKEDYFKKIECFDSVEISGVEDRFNA | |
| | SLGTYHDLLKIIKDKDFLDNEENEDILEDIVLTLTLFEDREMIEERLKTYAHLFDDKVMK | |
| | QLKRRRYTGWGRLSRKLINGIRDKQSGKTILDFLKSDGFANRNFMQLIHDDSLTFKEDIQ | |
| | KAQVSGQGDSLHEHIANLAGSPAIKKGILQTVKVVDELVKVMGRHKPENIVIEMARENQT | |
| | TQKGQKNSRERMKRIEEGIKELGSQILKEHPVENTQLQNEKLYLYYLQNGRDMYVDQELD | |
| | INRLSDYDVDHIVPQSFLKDDSIDNKVLTRSDKARGKSDNVPSEEVVKKMKNYWRQLLNA | |
| | KLITQRKFDNLTKAERGGLSELDKAGFIKRQLVETRQITKHVAQILDSRMNTKYDENDKL | |
| | IREVKVITLKSKLVSDFRKDFQFYKVREINNYHHAHDAYLNAVVGTALIKKYPKLESEFV | |
| | YGDYKVYDVRKMIAKSEQEIGKATAKYFFYSNIMNFFKTEITLANGEIRKRPLIETNGET | |
| | GEIVWDKGRDFATVRKVLSMPQVNIVKKTEVQTGGFSKESILPKRNSDKLIARKKDWDPK | |
| | KYGGFDSPTVAYSVLVVAKVEKGKSKKLKSVKELLGITIMERSSFEKNPIDFLEAKGYKE | |
| | VKKDLIIKLPKYSLFELENGRKRMLASAGELQKGNELALPSKYVNFLYLASHYEKLKGSP | |
| | EDNEQKQLFVEQHKHYLDEIIEQISEFSKRVILADANLDKVLSAYNKHRDKPIREQAENI | |
| | IHLFTLTNLGAPAAFKYFDTTIDRKRYTSTKEVLDATLIHQSITGLYETRIDLSQLGGDA | |
| | EAAAKEAAAKEAAAKEAAAKALEAEAAAKEAAAKEAAAKEAAAKATLNIEDEHRLHETSK | |
| | EPDVSLGSTWLSDFPQAWAETGGMGLAVRQAPLIIPLKATSTPVSIKQYPMSQEARLGIK | |
| | PHIQRLLDQGILVPCQSPWNTPLLPVKKPGTNDYRPVQDLREVNKRVEDIHPTVPNPYNL | |
| | LSGLPPSHQWYTVLDLKDAFFCLRLHPTSQPLFAFEWRDPEMGISGQLTWTRLPQGFKNS | |
| | PTLFNEALHRDLADFRIQHPDLILLQYVDDLLLAATSELDCQQGTRALLQTLGNLGYRAS | |
| | AKKAQICQKQVKYLGYLLKEGQRWLTEARKETVMGQPTPKTPRQLREFLGKAGFCRLFIP | |
| | GFAEMAAPLYPLTKPGTLFNWGPDQQKAYQEIKQALLTAPALGLPDLTKPFELFVDEKQG | |
| | YAKGVLTQKLGPWRRPVAYLSKKLDPVAAGWPPCLRMVAAIAVLTKDAGKLTMGQPLVIL | |
| | APHAVEALVKQPPDRWLSNARMTHYQALLLDTDRVQFGPVVALNPATLLPLPEEGLQHNC | |
| | LDILAEAHGTRPDLTDQPLPDADHTWYTDGSSLLQEGQRKAGAAVTTETEVIWAKALPAG | |
| | TSAQRAELIALTQALKMAEGKKLNVYTDSRYAFATAHIHGEIYRRRGWLTSEGKEIKNKD | |
| | EILALLKALFLPKRLSIIHCPGHQKGHSAEARGNRMADQAARKAAITETPDTSTLLGSSG | |
| | SSGSSGSSGSSGSSMASNFTQFVLVDNGGTGDVTVAPSNFANGIAEWISSNSRSQAYKVT | |
| | CSVRQSSAQNRKYTIKVEVPKGAWRSYLNMELTIPIFATNSDCELIVKAMQGLLKDGNPI | |
| | PSAIAANSGIYGGSGGSMASNFTQFVLVDNGGTGDVTVAPSNFANGIAEWISSNSRSQAY | |
| | KVTCSVRQSSAQNRKYTIKVEVPKGAWRSYLNMELTIPIFATNSDCELIVKAMQGLLKDG | |
| | NPIPSAIAANSGIYGGGSGGGSGGGSGGGSMASNFTQFVLVDNGGTGDVTVAPSNFANGI | |
| | AEWISSNSRSQAYKVTCSVRQSSAQNRKYTIKVEVPKGAWRSYLNMELTIPIFATNSDCE | |
| | LIVKAMQGLLKDGNPIPSAIAANSGIYGGSGGSMASNFTQFVLVDNGGTGDVTVAPSNFA | |
| | NGIAEWISSNSRSQAYKVTCSVRQSSAQNRKYTIKVEVPKGAWRSYLNMELTIPIFATNS | |
| | DCELIVKAMQGLLKDGNPIPSAIAANSGIYKRTADGSEFESPKKKAKVE | |
| PL12106 | MPAAKRVKLDGGDKKYSIGLDIGTNSVGWAVITDEYKVPSKKFKVLGNTDRHSIKKNLIG | 16,221 |
| | ALLFDSGETAEATRLKRTARRRYTRRKNRICYLQEIFSNEMAKVDDSFFHRLEESFLVEE | |
| | DKKHERHPIFGNIVDEVAYHEKYPTIYHLRKKLVDSTDKADLRLIYLALAHMIKFRGHFL | |
| | IEGDLNPDNSDVDKLFIQLVQTYNQLFEENPINASGVDAKAILSARLSKSRRLENLIAQL | |
| | PGEKKNGLFGNLIALSLGLTPNFKSNFDLAEDAKLQLSKDTYDDDLDNLLAQIGDQYADL | |
| | FLAAKNLSDAILLSDILRVNTEITKAPLSASMIKRYDEHHQDLTLLKALVRQQLPEKYKE | |
| | IFFDQSKNGYAGYIDGGASQEEFYKFIKPILEKMDGTEELLVKLNREDLLRKQRTFDNGS | |
| | IPHQIHLGELHAILRRQEDFYPFLKDNREKIEKILTFRIPYYVGPLARGNSRFAWMTRKS | |
| | EETITPWNFEEVVDKGASAQSFIERMTNFDKNLPNEKVLPKHSLLYEYFTVYNELTKVKY | |
| | VTEGMRKPAFLSGEQKKAIVDLLFKTNRKVTVKQLKEDYFKKIECFDSVEISGVEDRFNA | |
| | SLGTYHDLLKIIKDKDFLDNEENEDILEDIVLTLTLFEDREMIEERLKTYAHLFDDKVMK | |
| | QLKRRRYTGWGRLSRKLINGIRDKQSGKTILDFLKSDGFANRNFMQLIHDDSLTFKEDIQ | |
| | KAQVSGQGDSLHEHIANLAGSPAIKKGILQTVKVVDELVKVMGRHKPENIVIEMARENQT | |
| | TQKGQKNSRERMKRIEEGIKELGSQILKEHPVENTQLQNEKLYLYYLQNGRDMYVDQELD | |
| | INRLSDYDVDHIVPQSFLKDDSIDNKVLTRSDKARGKSDNVPSEEVVKKMKNYWRQLLNA | |
| | KLITQRKFDNLTKAERGGLSELDKAGFIKRQLVETRQITKHVAQILDSRMNTKYDENDKL | |
| | IREVKVITLKSKLVSDFRKDFQFYKVREINNYHHAHDAYLNAVVGTALIKKYPKLESEFV | |
| | YGDYKVYDVRKMIAKSEQEIGKATAKYFFYSNIMNFFKTEITLANGEIRKRPLIETNGET | |
| | GEIVWDKGRDFATVRKVLSMPQVNIVKKTEVQTGGFSKESILPKRNSDKLIARKKDWDPK | |
| | KYGGFDSPTVAYSVLVVAKVEKGKSKKLKSVKELLGITIMERSSFEKNPIDFLEAKGYKE | |
| | VKKDLIIKLPKYSLFELENGRKRMLASAGELQKGNELALPSKYVNFLYLASHYEKLKGSP | |
| | EDNEQKQLFVEQHKHYLDEIIEQISEFSKRVILADANLDKVLSAYNKHRDKPIREQAENI | |
| | IHLFTLTNLGAPAAFKYFDTTIDRKRYTSTKEVLDATLIHQSITGLYETRIDLSQLGGDA | |
| | EAAAKEAAAKEAAAKEAAAKALEAEAAAKEAAAKEAAAKEAAAKATLNIEDEHRLHETSK | |
| | EPDVSLGSTWLSDFPQAWAETGGMGLAVRQAPLIIPLKATSTPVSIKQYPMSQEARLGIK | |
| | PHIQRLLDQGILVPCQSPWNTPLLPVKKPGTNDYRPVQDLREVNKRVEDIHPTVPNPYNL | |
| | LSGLPPSHQWYTVLDLKDAFFCLRLHPTSQPLFAFEWRDPEMGISGQLTWTRLPQGFKNS | |
| | PTLFNEALHRDLADFRIQHPDLILLQYVDDLLLAATSELDCQQGTRALLQTLGNLGYRAS | |
| | AKKAQICQKQVKYLGYLLKEGQRWLTEARKETVMGQPTPKTPRQLREFLGKAGFCRLFIP | |
| | GFAEMAAPLYPLTKPGTLFNWGPDQQKAYQEIKQALLTAPALGLPDLTKPFELFVDEKQG | |
| | YAKGVLTQKLGPWRRPVAYLSKKLDPVAAGWPPCLRMVAAIAVLTKDAGKLTMGQPLVIL | |
| | APHAVEALVKQPPDRWLSNARMTHYQALLLDTDRVQFGPVVALNPATLLPLPEEGLQHNC | |
| | LDILAEAHGTRPDLTDQPLPDADHTWYTDGSSLLQEGQRKAGAAVTTETEVIWAKALPAG | |
| | TSAQRAELIALTQALKMAEGKKLNVYTDSRYAFATAHIHGEIYRRRGWLTSEGKEIKNKD | |
| | EILALLKALFLPKRLSIIHCPGHQKGHSAEARGNRMADQAARKAAITETPDTSTLLGSSG | |
| | GGEAAAKMASNFTQFVLVDNGGTGDVTVAPSNFANGIAEWISSNSRSQAYKVTCSVRQSS | |
| | AQNRKYTIKVEVPKGAWRSYLNMELTIPIFATNSDCELIVKAMQGLLKDGNPIPSAIAAN | |
| | SGIYKRTADGSEFESPKKKAKVE | |
| PL12107 | MPAAKRVKLDGGDKKYSIGLDIGTNSVGWAVITDEYKVPSKKFKVLGNTDRHSIKKNLIG | 16,222 |
| | ALLFDSGETAEATRLKRTARRRYTRRKNRICYLQEIFSNEMAKVDDSFFHRLEESFLVEE | |
| | DKKHERHPIFGNIVDEVAYHEKYPTIYHLRKKLVDSTDKADLRLIYLALAHMIKFRGHFL | |
| | IEGDLNPDNSDVDKLFIQLVQTYNQLFEENPINASGVDAKAILSARLSKSRRLENLIAQL | |
| | PGEKKNGLFGNLIALSLGLTPNFKSNFDLAEDAKLQLSKDTYDDDLDNLLAQIGDQYADL | |
| | FLAAKNLSDAILLSDILRVNTEITKAPLSASMIKRYDEHHQDLTLLKALVRQQLPEKYKE | |
| | IFFDQSKNGYAGYIDGGASQEEFYKFIKPILEKMDGTEELLVKLNREDLLRKQRTFDNGS | |
| | IPHQIHLGELHAILRRQEDFYPFLKDNREKIEKILTFRIPYYVGPLARGNSRFAWMTRKS | |
| | EETITPWNFEEVVDKGASAQSFIERMTNFDKNLPNEKVLPKHSLLYEYFTVYNELTKVKY | |
| | VTEGMRKPAFLSGEQKKAIVDLLFKTNRKVTVKQLKEDYFKKIECFDSVEISGVEDRFNA | |
| | SLGTYHDLLKIIKDKDFLDNEENEDILEDIVLTLTLFEDREMIEERLKTYAHLFDDKVMK | |
| | QLKRRRYTGWGRLSRKLINGIRDKQSGKTILDFLKSDGFANRNFMQLIHDDSLTFKEDIQ | |
| | KAQVSGQGDSLHEHIANLAGSPAIKKGILQTVKVVDELVKVMGRHKPENIVIEMARENQT | |
| | TQKGQKNSRERMKRIEEGIKELGSQILKEHPVENTQLQNEKLYLYYLQNGRDMYVDQELD | |
| | INRLSDYDVDHIVPQSFLKDDSIDNKVLTRSDKARGKSDNVPSEEVVKKMKNYWRQLLNA | |
| | KLITQRKFDNLTKAERGGLSELDKAGFIKRQLVETRQITKHVAQILDSRMNTKYDENDKL | |
| | IREVKVITLKSKLVSDFRKDFQFYKVREINNYHHAHDAYLNAVVGTALIKKYPKLESEFV | |
| | YGDYKVYDVRKMIAKSEQEIGKATAKYFFYSNIMNFFKTEITLANGEIRKRPLIETNGET | |
| | GEIVWDKGRDFATVRKVLSMPQVNIVKKTEVQTGGFSKESILPKRNSDKLIARKKDWDPK | |
| | KYGGFDSPTVAYSVLVVAKVEKGKSKKLKSVKELLGITIMERSSFEKNPIDFLEAKGYKE | |
| | VKKDLIIKLPKYSLFELENGRKRMLASAGELQKGNELALPSKYVNFLYLASHYEKLKGSP | |
| | EDNEQKQLFVEQHKHYLDEIIEQISEFSKRVILADANLDKVLSAYNKHRDKPIREQAENI | |
| | IHLFTLTNLGAPAAFKYFDTTIDRKRYTSTKEVLDATLIHQSITGLYETRIDLSQLGGDA | |
| | EAAAKEAAAKEAAAKEAAAKALEAEAAAKEAAAKEAAAKEAAAKATLNIEDEHRLHETSK | |
| | EPDVSLGSTWLSDFPQAWAETGGMGLAVRQAPLIIPLKATSTPVSIKQYPMSQEARLGIK | |
| | PHIQRLLDQGILVPCQSPWNTPLLPVKKPGTNDYRPVQDLREVNKRVEDIHPTVPNPYNL | |
| | LSGLPPSHQWYTVLDLKDAFFCLRLHPTSQPLFAFEWRDPEMGISGQLTWTRLPQGFKNS | |
| | PTLFNEALHRDLADFRIQHPDLILLQYVDDLLLAATSELDCQQGTRALLQTLGNLGYRAS | |
| | AKKAQICQKQVKYLGYLLKEGQRWLTEARKETVMGQPTPKTPRQLREFLGKAGFCRLFIP | |
| | GFAEMAAPLYPLTKPGTLFNWGPDQQKAYQEIKQALLTAPALGLPDLTKPFELFVDEKQG | |
| | YAKGVLTQKLGPWRRPVAYLSKKLDPVAAGWPPCLRMVAAIAVLTKDAGKLTMGQPLVIL | |
| | APHAVEALVKQPPDRWLSNARMTHYQALLLDTDRVQFGPVVALNPATLLPLPEEGLQHNC | |
| | LDILAEAHGTRPDLTDQPLPDADHTWYTDGSSLLQEGQRKAGAAVTTETEVIWAKALPAG | |
| | TSAQRAELIALTQALKMAEGKKLNVYTDSRYAFATAHIHGEIYRRRGWLTSEGKEIKNKD | |
| | EILALLKALFLPKRLSIIHCPGHQKGHSAEARGNRMADQAARKAAITETPDTSTLLGSSG | |
| | GGEAAAKMASNFTQFVLVDNGGTGDVTVAPSNFANGIAEWISSNSRSQAYKVTCSVRQSS | |
| | AQNRKYTIKVEVPKGAWRSYLNMELTIPIFATNSDCELIVKAMQGLLKDGNPIPSAIAAN | |
| | SGIYGGSGGSMASNFTQFVLVDNGGTGDVTVAPSNFANGIAEWISSNSRSQAYKVTCSVR | |
| | QSSAQNRKYTIKVEVPKGAWRSYLNMELTIPIFATNSDCELIVKAMQGLLKDGNPIPSAI | |
| | AANSGIYKRTADGSEFESPKKKAKVE | |
| PL12108 | MPAAKRVKLDGGDKKYSIGLDIGTNSVGWAVITDEYKVPSKKFKVLGNTDRHSIKKNLIG | 16,223 |
| | ALLFDSGETAEATRLKRTARRRYTRRKNRICYLQEIFSNEMAKVDDSFFHRLEESFLVEE | |
| | DKKHERHPIFGNIVDEVAYHEKYPTIYHLRKKLVDSTDKADLRLIYLALAHMIKFRGHFL | |
| | IEGDLNPDNSDVDKLFIQLVQTYNQLFEENPINASGVDAKAILSARLSKSRRLENLIAQL | |
| | PGEKKNGLFGNLIALSLGLTPNFKSNFDLAEDAKLQLSKDTYDDDLDNLLAQIGDQYADL | |
| | FLAAKNLSDAILLSDILRVNTEITKAPLSASMIKRYDEHHQDLTLLKALVRQQLPEKYKE | |
| | IFFDQSKNGYAGYIDGGASQEEFYKFIKPILEKMDGTEELLVKLNREDLLRKQRTFDNGS | |
| | IPHQIHLGELHAILRRQEDFYPFLKDNREKIEKILTFRIPYYVGPLARGNSRFAWMTRKS | |
| | EETITPWNFEEVVDKGASAQSFIERMTNFDKNLPNEKVLPKHSLLYEYFTVYNELTKVKY | |
| | VTEGMRKPAFLSGEQKKAIVDLLFKTNRKVTVKQLKEDYFKKIECFDSVEISGVEDRFNA | |
| | SLGTYHDLLKIIKDKDFLDNEENEDILEDIVLTLTLFEDREMIEERLKTYAHLFDDKVMK | |
| | QLKRRRYTGWGRLSRKLINGIRDKQSGKTILDFLKSDGFANRNFMQLIHDDSLTFKEDIQ | |
| | KAQVSGQGDSLHEHIANLAGSPAIKKGILQTVKVVDELVKVMGRHKPENIVIEMARENQT | |
| | TQKGQKNSRERMKRIEEGIKELGSQILKEHPVENTQLQNEKLYLYYLQNGRDMYVDQELD | |
| | INRLSDYDVDHIVPQSFLKDDSIDNKVLTRSDKARGKSDNVPSEEVVKKMKNYWRQLLNA | |
| | KLITQRKFDNLTKAERGGLSELDKAGFIKRQLVETRQITKHVAQILDSRMNTKYDENDKL | |
| | IREVKVITLKSKLVSDFRKDFQFYKVREINNYHHAHDAYLNAVVGTALIKKYPKLESEFV | |
| | YGDYKVYDVRKMIAKSEQEIGKATAKYFFYSNIMNFFKTEITLANGEIRKRPLIETNGET | |
| | GEIVWDKGRDFATVRKVLSMPQVNIVKKTEVQTGGFSKESILPKRNSDKLIARKKDWDPK | |
| | KYGGFDSPTVAYSVLVVAKVEKGKSKKLKSVKELLGITIMERSSFEKNPIDFLEAKGYKE | |
| | VKKDLIIKLPKYSLFELENGRKRMLASAGELQKGNELALPSKYVNFLYLASHYEKLKGSP | |
| | EDNEQKQLFVEQHKHYLDEIIEQISEFSKRVILADANLDKVLSAYNKHRDKPIREQAENI | |
| | IHLFTLTNLGAPAAFKYFDTTIDRKRYTSTKEVLDATLIHQSITGLYETRIDLSQLGGDA | |
| | EAAAKEAAAKEAAAKEAAAKALEAEAAAKEAAAKEAAAKEAAAKATLNIEDEHRLHETSK | |
| | EPDVSLGSTWLSDFPQAWAETGGMGLAVRQAPLIIPLKATSTPVSIKQYPMSQEARLGIK | |
| | PHIQRLLDQGILVPCQSPWNTPLLPVKKPGTNDYRPVQDLREVNKRVEDIHPTVPNPYNL | |
| | LSGLPPSHQWYTVLDLKDAFFCLRLHPTSQPLFAFEWRDPEMGISGQLTWTRLPQGFKNS | |
| | PTLFNEALHRDLADFRIQHPDLILLQYVDDLLLAATSELDCQQGTRALLQTLGNLGYRAS | |
| | AKKAQICQKQVKYLGYLLKEGQRWLTEARKETVMGQPTPKTPRQLREFLGKAGFCRLFIP | |
| | GFAEMAAPLYPLTKPGTLFNWGPDQQKAYQEIKQALLTAPALGLPDLTKPFELFVDEKQG | |
| | YAKGVLTQKLGPWRRPVAYLSKKLDPVAAGWPPCLRMVAAIAVLTKDAGKLTMGQPLVIL | |
| | APHAVEALVKQPPDRWLSNARMTHYQALLLDTDRVQFGPVVALNPATLLPLPEEGLQHNC | |
| | LDILAEAHGTRPDLTDQPLPDADHTWYTDGSSLLQEGQRKAGAAVTTETEVIWAKALPAG | |
| | TSAQRAELIALTQALKMAEGKKLNVYTDSRYAFATAHIHGEIYRRRGWLTSEGKEIKNKD | |
| | EILALLKALFLPKRLSIIHCPGHQKGHSAEARGNRMADQAARKAAITETPDTSTLLGSSG | |
| | GGEAAAKMASNFTQFVLVDNGGTGDVTVAPSNFANGIAEWISSNSRSQAYKVTCSVRQSS | |
| | AQNRKYTIKVEVPKGAWRSYLNMELTIPIFATNSDCELIVKAMQGLLKDGNPIPSAIAAN | |
| | SGIYGGSGGSMASNFTQFVLVDNGGTGDVTVAPSNFANGIAEWISSNSRSQAYKVTCSVR | |
| | QSSAQNRKYTIKVEVPKGAWRSYLNMELTIPIFATNSDCELIVKAMQGLLKDGNPIPSAI | |
| | AANSGIYGGGSGGGSGGGSGGGSMASNFTQFVLVDNGGTGDVTVAPSNFANGIAEWISSN | |
| | SRSQAYKVTCSVRQSSAQNRKYTIKVEVPKGAWRSYLNMELTIPIFATNSDCELIVKAMQ | |
| | GLLKDGNPIPSAIAANSGIYGGSGGSMASNFTQFVLVDNGGTGDVTVAPSNFANGIAEWI | |
| | SSNSRSQAYKVTCSVRQSSAQNRKYTIKVEVPKGAWRSYLNMELTIPIFATNSDCELIVK | |
| | AMQGLLKDGNPIPSAIAANSGIYKRTADGSEFESPKKKAKVE | |

### 2) Guide RNA:

The guide RNA (gRNA) molecule (5′-GCCGAAGCACTGCACGCCGTGTTTTAGAGCTAGAAATAGCAAGTTAAAATAAGGCTAGTCCGTT ATCAACTTGAAAAAGTGGCACCGAGTCGGTGC-3′; SEQ ID NO: 16,708) binds Cas9 and contains a pro-spacer sequence complementary to the target locus, resulting in localization of the gene modifying complex to the target genomic locus.

### 3) Trans-template RNA:

A series of 384 ttRNAs were constructed (288 experimental configurations and 96 negative controls) with each of the following regions:
[0878] 1. a primer binding site (PBS) that is 8, 13, or 17 nucleotides in length that basepairs with the nicked DNA strand allowing primer extension of the nicked DNA, followed immediately by
[0879] 2. a homology 1 region with homology to the target BFP/GFP locus
[0880] 3. the exemplary desired modification: a C to T substitution (the edit) which converts the BFP target to GFP, as well as a PAM-nullifying mutation to prevent multiple turnover cutting at the target site.
[0881] 4. either a 12 nucleotide or 63 nucleotide homology 2 region with homology to the target BFP/GFP locus.
[0882] 5. an RBP recruitment site (RRS) containing 1, 2, or 4 MS2 sequences (1×, 2×, or 4×MS2) with intervening RNA linker sequences.
[0883] 6. either a 3′ end-protecting RNA secondary structure comprising ePEG with an 8 nt linker sequence or no 3′ end-protecting RNA secondary structure.
[0884] 7. either no 5′ end-protecting RNA secondary structure or one of the following 5′end-protecting RNA secondary structures:
   [0885] a. ePEG
   [0886] b. a Cas9 scaffold lacking a spacer sequence
   [0887] c. a Cas9 scaffold with a 16 nucleotide spacer sequence
[0888] 8. either an 8 or 16 nucleotide linker between the RRS and PBS
   These components were assembled in the below configuration (if no 3′ or 5′ end protecting structure was selected, then no such structure was included in that template RNA):
[0889] 3′-endblock-(RRS)ₙ-linker-PBS-template-5′ end block
   Template sequences are included in Table S4 below.

TABLE S4
Exemplary template sequences

| | | SEQ ID |
|---|---|---|
| Identifier | Template sequence | NO: |
| PL13280 | GACCACCCTGACGTACGGCGTGCAGACATACAAgcACATGAGGATCACCCATGTgc | 16,301 |
| PL13281 | GACCACCCTGACGTACGGCGTGCAGACATACAAgcACATGAGGATCACCCATGTgcTCTCTCTCGGGTCAGGAGCCCCCCCCTGAACCCAGGATA | 16,302 |
| | ACCCTCAAAGTCGGGGGGC | |
| PL13282 | GACCACCCTGACGTACGGCGTGCAGACATACAAgggagcACATGAGGATCACCCATGTgcgactcCCACAGTCACTGGGgagtcttccc | 16,303 |
| PL13283 | GACCACCCTGACGTACGGCGTGCAGACATACAAgggagcACATGAGGATCACCCATGTgcgactcCCACAGTCACTGGGgagtcttcccTCTCTCTCGGG | 16,304 |
| | TCAGGAGCCCCCCCCTGAACCCAGGATAACCCTCAAAGTCGGGGGGC | |
| PL13284 | GACCACCCTGACGTACGGCGTGCAGACATACAAgggagcACATGAGGATCACCCATGTgcgactcCCACAGTCACTGGGgagtcttccctctctctctctctctc | 16,305 |
| | tctcgggagcACATGAGGATCACCCATGTgcgactcCCACAGTCACTGGGgagtcttccc | |
| PL13285 | GACCACCCTGACGTACGGCGTGCAGACATACAAgggagcACATGAGGATCACCCATGTgcgactcCCACAGTCACTGGGgagtcttccctctctctctctctctc | 16,306 |
| | tctcgggagcACATGAGGATCACCCATGTgcgactcCCACAGTCACTGGGgagtcttcccTCTCTCTCGGGTCAGGAGCCCCCCCCTGAACCCAGGATAAC | |
| | CCTCAAAGTCGGGGGGC | |
| PL13286 | GACCACCCTGACGTACGGCGTGCAGACATACAACTAACATAgcACATGAGGATCACCCATGTgc | 16,307 |
| PL13287 | GACCACCCTGACGTACGGCGTGCAGACATACAACTAACATAgcACATGAGGATCACCCATGTgcTCTCTCTCGGGTCAGGAGCCCCCCCCTGAACC | 16,308 |
| | CAGGATAACCCTCAAAGTCGGGGGGC | |
| PL13288 | GACCACCCTGACGTACGGCGTGCAGACATACAACTAACATAgggagcACATGAGGATCACCCATGTgcgactcCCACAGTCACTGGGgagtcttccc | 16,309 |
| PL13289 | GACCACCCTGACGTACGGCGTGCAGACATACAACTAACATAgggagcACATGAGGATCACCCATGTgcgactcCCACAGTCACTGGGgagtcttcccTCT | 16,310 |
| | CTCTCGGGTCAGGAGCCCCCCCCTGAACCCAGGATAACCCTCAAAGTCGGGGGGC | |
| PL13290 | GACCACCCTGACGTACGGCGTGCAGACATACAACTAACATAgggagcACATGAGGATCACCCATGTgcgactcCCACAGTCACTGGGgagtcttccctctc | 16,311 |
| | tctctctctctctctcgggagcACATGAGGATCACCCATGTgcgactcCCACAGTCACTGGGgagtcttccc | |
| PL13291 | GACCACCCTGACGTACGGCGTGCAGACATACAACTAACATAgggagcACATGAGGATCACCCATGTgcgactcCCACAGTCACTGGGgagtcttccctctc | 16,312 |
| | tctctctctctctctcgggagcACATGAGGATCACCCATGTgcgactcCCACAGTCACTGGGgagtcttcccTCTCTCTCGGGTCAGGAGCCCCCCCCTGAACCC | |
| | AGGATAACCCTCAAAGTCGGGGGGC | |
| PL13292 | GACCACCCTGACGTACGGCGTGCAGTGCTTACATACAAgcACATGAGGATCACCCATGTgc | 16,313 |
| PL13293 | GACCACCCTGACGTACGGCGTGCAGTGCTTACATACAAgcACATGAGGATCACCCATGTgcTCTCTCTCGGGTCAGGAGCCCCCCCCTGAACCCAG | 16,314 |
| | GATAACCCTCAAAGTCGGGGGGC | |
| PL13294 | GACCACCCTGACGTACGGCGTGCAGTGCTTACATACAAgggagcACATGAGGATCACCCATGTgcgactcCCACAGTCACTGGGgagtcttccc | 16,315 |
| PL13295 | GACCACCCTGACGTACGGCGTGCAGTGCTTACATACAAgggagcACATGAGGATCACCCATGTgcgactcCCACAGTCACTGGGgagtcttcccTCTCTC | 16,316 |
| | TCGGGTCAGGAGCCCCCCCCTGAACCCAGGATAACCCTCAAAGTCGGGGGGC | |
| PL13296 | GACCACCCTGACGTACGGCGTGCAGTGCTTACATACAAgggagcACATGAGGATCACCCATGTgcgactcCCACAGTCACTGGGgagtcttccctctctctct | 16,317 |
| | ctctctctctcgggagcACATGAGGATCACCCATGTgcgactcCCACAGTCACTGGGgagtcttccc | |
| PL13297 | GACCACCCTGACGTACGGCGTGCAGTGCTTACATACAAgggagcACATGAGGATCACCCATGTgcgactcCCACAGTCACTGGGgagtcttccctctctctct | 16,318 |
| | ctctctctctcgggagcACATGAGGATCACCCATGTgcgactcCCACAGTCACTGGGgagtcttcccTCTCTCTCGGGTCAGGAGCCCCCCCCTGAACCCAGG | |
| | ATAACCCTCAAAGTCGGGGGGC | |
| PL13298 | GACCACCCTGACGTACGGCGTGCAGTGCTTACATACAACTAACATAgcACATGAGGATCACCCATGTgc | 16,319 |
| PL13299 | GACCACCCTGACGTACGGCGTGCAGTGCTTACATACAACTAACATAgcACATGAGGATCACCCATGTgcTCTCTCTCGGGTCAGGAGCCCCCCCCT | 16,320 |
| | GAACCCAGGATAACCCTCAAAGTCGGGGGGC | |
| PL13300 | GACCACCCTGACGTACGGCGTGCAGTGCTTACATACAACTAACATAgggagcACATGAGGATCACCCATGTgcgactcCCACAGTCACTGGGgagtctt | 16,321 |
| | ccc | |
| PL13301 | GACCACCCTGACGTACGGCGTGCAGTGCTTACATACAACTAACATAgggagcACATGAGGATCACCCATGTgcgactcCCACAGTCACTGGGgagtctt | 16,322 |
| | cccTCTCTCTCGGGTCAGGAGCCCCCCCCTGAACCCAGGATAACCCTCAAAGTCGGGGGGC | |
| PL13302 | GACCACCCTGACGTACGGCGTGCAGTGCTTACATACAACTAACATAgggagcACATGAGGATCACCCATGTgcgactcCCACAGTCACTGGGgagtctt | 16,323 |
| | ccctctctctctctctctctctcgggagcACATGAGGATCACCCATGTgcgactcCCACAGTCACTGGGgagtcttccc | |
| PL13303 | GACCACCCTGACGTACGGCGTGCAGTGCTTACATACAACTAACATAgggagcACATGAGGATCACCCATGTgcgactcCCACAGTCACTGGGgagtctt | 16,324 |
| | ccctctctctctctctctctctcgggagcACATGAGGATCACCCATGTgcgactcCCACAGTCACTGGGgagtcttcccTCTCTCTCGGGTCAGGAGCCCCCCCCTG | |
| | AACCCAGGATAACCCTCAAAGTCGGGGGGC | |
| PL13304 | GACCACCCTGACGTACGGCGTGCAGTGCTTCGGCACATACAAgcACATGAGGATCACCCATGTgc | 16,325 |
| PL13305 | GACCACCCTGACGTACGGCGTGCAGTGCTTCGGCACATACAAgcACATGAGGATCACCCATGTgcTCTCTCTCGGGTCAGGAGCCCCCCCCTGAAC | 16,326 |
| | CCAGGATAACCCTCAAAGTCGGGGGGC | |
| PL13306 | GACCACCCTGACGTACGGCGTGCAGTGCTTCGGCACATACAAgggagcACATGAGGATCACCCATGTgcgactcCCACAGTCACTGGGgagtcttccc | 16,327 |
| PL13307 | GACCACCCTGACGTACGGCGTGCAGTGCTTCGGCACATACAAgggagcACATGAGGATCACCCATGTgcgactcCCACAGTCACTGGGgagtcttcccTC | 16,328 |
| | TCTCTCGGGTCAGGAGCCCCCCCCTGAACCCAGGATAACCCTCAAAGTCGGGGGGC | |
| PL13308 | GACCACCCTGACGTACGGCGTGCAGTGCTTCGGCACATACAAgggagcACATGAGGATCACCCATGTgcgactcCCACAGTCACTGGGgagtcttccctct | 16,329 |
| | ctctctctctctctctcgggagcACATGAGGATCACCCATGTgcgactcCCACAGTCACTGGGgagtcttccc | |
| PL13309 | GACCACCCTGACGTACGGCGTGCAGTGCTTCGGCACATACAAgggagcACATGAGGATCACCCATGTgcgactcCCACAGTCACTGGGgagtcttccctct | 16,330 |
| | ctctctctctctctctcgggagcACATGAGGATCACCCATGTgcgactcCCACAGTCACTGGGgagtcttcccTCTCTCTCGGGTCAGGAGCCCCCCCCTGAACCC | |
| | AGGATAACCCTCAAAGTCGGGGGGC | |
| PL13310 | GACCACCCTGACGTACGGCGTGCAGTGCTTCGGCACATACAACTAACATAgcACATGAGGATCACCCATGTgc | 16,331 |
| PL13311 | GACCACCCTGACGTACGGCGTGCAGTGCTTCGGCACATACAACTAACATAgcACATGAGGATCACCCATGTgcTCTCTCTCGGGTCAGGAGCCCCC | 16,332 |
| | CCCTGAACCCAGGATAACCCTCAAAGTCGGGGGGC | |
| PL13312 | GACCACCCTGACGTACGGCGTGCAGTGCTTCGGCACATACAACTAACATAgggagcACATGAGGATCACCCATGTgcgactcCCACAGTCACTGGGg | 16,333 |
| | agtcttccc | |
| PL13313 | GACCACCCTGACGTACGGCGTGCAGTGCTTCGGCACATACAACTAACATAgggagcACATGAGGATCACCCATGTgcgactcCCACAGTCACTGGGg | 16,334 |
| | agtcttcccTCTCTCTCGGGTCAGGAGCCCCCCCCTGAACCCAGGATAACCCTCAAAGTCGGGGGGC | |
| PL13314 | GACCACCCTGACGTACGGCGTGCAGTGCTTCGGCACATACAACTAACATAgggagcACATGAGGATCACCCATGTgcgactcCCACAGTCACTGGGg | 16,335 |
| | agtcttccctctctctctctctctctctcgggagcACATGAGGATCACCCATGTgcgactcCCACAGTCACTGGGgagtcttccc | |
| PL13315 | GACCACCCTGACGTACGGCGTGCAGTGCTTCGGCACATACAACTAACATAgggagcACATGAGGATCACCCATGTgcgactcCCACAGTCACTGGGg | 16,336 |
| | agtcttccctctctctctctctctctctcgggagcACATGAGGATCACCCATGTgcgactcCCACAGTCACTGGGgagtcttcccTCTCTCTCGGGTCAGGAGCCCCCC | |
| | CCTGAACCCAGGATAACCCTCAAAGTCGGGGGGC | |
| PL13316 | GACCACCCTGACGTACGGTCCTGTGAGCTTACATACAAgcACATGAGGATCACCCATGTgc | 16,337 |
| PL13317 | GACCACCCTGACGTACGGTCCTGTGAGCTTACATACAAgcACATGAGGATCACCCATGTgcTCTCTCTCGGGTCAGGAGCCCCCCCCTGAACCCAG | 16,338 |
| | GATAACCCTCAAAGTCGGGGGGC | |
| PL13318 | GACCACCCTGACGTACGGTCCTGTGAGCTTACATACAAgggagcACATGAGGATCACCCATGTgcgactcCCACAGTCACTGGGgagtcttccc | 16,339 |
| PL13319 | GACCACCCTGACGTACGGTCCTGTGAGCTTACATACAAgggagcACATGAGGATCACCCATGTgcgactcCCACAGTCACTGGGgagtcttcccTCTCTCT | 16,340 |
| | CGGGTCAGGAGCCCCCCCCTGAACCCAGGATAACCCTCAAAGTCGGGGGGC | |
| PL13320 | GACCACCCTGACGTACGGTCCTGTGAGCTTACATACAAgggagcACATGAGGATCACCCATGTgcgactcCCACAGTCACTGGGgagtcttccctctctctct | 16,341 |
| | ctctctctctcgggagcACATGAGGATCACCCATGTgcgactcCCACAGTCACTGGGgagtcttccc | |
| PL13321 | GACCACCCTGACGTACGGTCCTGTGAGCTTACATACAAgggagcACATGAGGATCACCCATGTgcgactcCCACAGTCACTGGGgagtcttccctctctctct | 16,342 |
| | ctctctctctcgggagcACATGAGGATCACCCATGTgcgactcCCACAGTCACTGGGgagtcttcccTCTCTCTCGGGTCAGGAGCCCCCCCCTGAACCCAGG | |
| | ATAACCCTCAAAGTCGGGGGGC | |
| PL13322 | GACCACCCTGACGTACGGTCCTGTGAGCTTACATACAACTAACATAgcACATGAGGATCACCCATGTgc | 16,343 |
| PL13323 | GACCACCCTGACGTACGGTCCTGTGAGCTTACATACAACTAACATAgcACATGAGGATCACCCATGTgcTCTCTCTCGGGTCAGGAGCCCCCCCCT | 16,344 |
| | GAACCCAGGATAACCCTCAAAGTCGGGGGGC | |
| PL13324 | GACCACCCTGACGTACGGTCCTGTGAGCTTACATACAACTAACATAgggagcACATGAGGATCACCCATGTgcgactcCCACAGTCACTGGGgagtcttc | 16,345 |
| | CC | |
| PL13325 | GACCACCCTGACGTACGGTCCTGTGAGCTTACATACAACTAACATAgggagcACATGAGGATCACCCATGTgcgactcCCACAGTCACTGGGgagtcttc | 16,346 |
| | ccTCTCTCTCGGGTCAGGAGCCCCCCCCTGAACCCAGGATAACCCTCAAAGTCGGGGGGC | |
| PL13326 | GACCACCCTGACGTACGGTCCTGTGAGCTTACATACAACTAACATAgggagcACATGAGGATCACCCATGTgcgactcCCACAGTCACTGGGgagtcttc | 16,347 |
| | cctctctctctctctctctctcgggagcACATGAGGATCACCCATGTgcgactcCCACAGTCACTGGGgagtcttccc | |
| PL13327 | GACCACCCTGACGTACGGTCCTGTGAGCTTACATACAACTAACATAgggagcACATGAGGATCACCCATGTgcgactcCCACAGTCACTGGGgagtcttc | 16,348 |
| | cctctctctctctctctctctcgggagcACATGAGGATCACCCATGTgcgactcCCACAGTCACTGGGgagtcttcccTCTCTCTCGGGTCAGGAGCCCCCCCCTGA | |
| | ACCCAGGATAACCCTCAAAGTCGGGGGGC | |
| PL13328 | GAAGTTCATCTGTACCACCGGCAAACTGCCCGTGCCTTGGCCCACCCTCGTCACCACCCTGACGTACGGCGTGCAGACATACAAgcACATGAGGA | 16,349 |
| | TCACCCATGTgc | |
| PL13329 | GAAGTTCATCTGTACCACCGGCAAACTGCCCGTGCCTTGGCCCACCCTCGTCACCACCCTGACGTACGGCGTGCAGACATACAAgcACATGAGGA | 16,350 |
| | TCACCCATGTgcTCTCTCTCGGGTCAGGAGCCCCCCCCTGAACCCAGGATAACCCTCAAAGTCGGGGGGC | |
| PL13330 | GAAGTTCATCTGTACCACCGGCAAACTGCCCGTGCCTTGGCCCACCCTCGTCACCACCCTGACGTACGGCGTGCAGACATACAAgggagcACATGA | 16,351 |
| | GGATCACCCATGTgcgactcCCACAGTCACTGGGgagtcttccc | |
| PL13331 | GAAGTTCATCTGTACCACCGGCAAACTGCCCGTGCCTTGGCCCACCCTCGTCACCACCCTGACGTACGGCGTGCAGACATACAAgggagcACATGA | 16,352 |
| | GGATCACCCATGTgcgactcCCACAGTCACTGGGgagtcttcccTCTCTCTCGGGTCAGGAGCCCCCCCCTGAACCCAGGATAACCCTCAAAGTCGGGG | |
| | GGC | |
| PL13332 | GAAGTTCATCTGTACCACCGGCAAACTGCCCGTGCCTTGGCCCACCCTCGTCACCACCCTGACGTACGGCGTGCAGACATACAAgggagcACATGA | 16,353 |
| | GGATCACCCATGTgcgactcCCACAGTCACTGGGgagtcttccctctctctctctctctctctcgggagcACATGAGGATCACCCATGTgcgactcCCACAGTCACTG | |
| | GGgagtcttccc | |
| PL13333 | GAAGTTCATCTGTACCACCGGCAAACTGCCCGTGCCTTGGCCCACCCTCGTCACCACCCTGACGTACGGCGTGCAGACATACAAgggagcACATGA | 16,354 |
| | GGATCACCCATGTgcgactcCCACAGTCACTGGGgagtcttccctctctctctctctctctctcgggagcACATGAGGATCACCCATGTgcgactcCCACAGTCACTG | |
| | GGgagtcttcccTCTCTCTCGGGTCAGGAGCCCCCCCCTGAACCCAGGATAACCCTCAAAGTCGGGGGGC | |
| PL13334 | GAAGTTCATCTGTACCACCGGCAAACTGCCCGTGCCTTGGCCCACCCTCGTCACCACCCTGACGTACGGCGTGCAGACATACAACTAACATAgcAC | 16,355 |
| | ATGAGGATCACCCATGTgc | |
| PL13335 | GAAGTTCATCTGTACCACCGGCAAACTGCCCGTGCCTTGGCCCACCCTCGTCACCACCCTGACGTACGGCGTGCAGACATACAACTAACATAgcAC | 16,356 |
| | ATGAGGATCACCCATGTgcTCTCTCTCGGGTCAGGAGCCCCCCCCTGAACCCAGGATAACCCTCAAAGTCGGGGGGC | |
| PL13336 | GAAGTTCATCTGTACCACCGGCAAACTGCCCGTGCCTTGGCCCACCCTCGTCACCACCCTGACGTACGGCGTGCAGACATACAACTAACATAggga | 16,357 |
| | gcACATGAGGATCACCCATGTgcgactcCCACAGTCACTGGGgagtcttccc | |
| PL13337 | GAAGTTCATCTGTACCACCGGCAAACTGCCCGTGCCTTGGCCCACCCTCGTCACCACCCTGACGTACGGCGTGCAGACATACAACTAACATAggga | 16,358 |
| | gcACATGAGGATCACCCATGTgcgactcCCACAGTCACTGGGgagtcttcccTCTCTCTCGGGTCAGGAGCCCCCCCCTGAACCCAGGATAACCCTCAAA | |
| | GTCGGGGGGC | |
| PL13338 | GAAGTTCATCTGTACCACCGGCAAACTGCCCGTGCCTTGGCCCACCCTCGTCACCACCCTGACGTACGGCGTGCAGACATACAACTAACATAggga | 16,359 |
| | gcACATGAGGATCACCCATGTgcgactcCCACAGTCACTGGGgagtcttccctctctctctctctctctctcgggagcACATGAGGATCACCCATGTgcgactcCCAC | |
| | AGTCACTGGGgagtcttccc | |
| PL13339 | GAAGTTCATCTGTACCACCGGCAAACTGCCCGTGCCTTGGCCCACCCTCGTCACCACCCTGACGTACGGCGTGCAGACATACAACTAACATAggga | 16,360 |
| | gcACATGAGGATCACCCATGTgcgactcCCACAGTCACTGGGgagtcttccctctctctctctctctctctcgggagcACATGAGGATCACCCATGTgcgactcCCAC | |
| | AGTCACTGGGgagtcttcccTCTCTCTCGGGTCAGGAGCCCCCCCCTGAACCCAGGATAACCCTCAAAGTCGGGGGGC | |
| PL13340 | GAAGTTCATCTGTACCACCGGCAAACTGCCCGTGCCTTGGCCCACCCTCGTCACCACCCTGACGTACGGCGTGCAGTGCTTACATACAAgcACATG | 16,361 |
| | AGGATCACCCATGTgc | |
| PL13341 | GAAGTTCATCTGTACCACCGGCAAACTGCCCGTGCCTTGGCCCACCCTCGTCACCACCCTGACGTACGGCGTGCAGTGCTTACATACAAgcACATG | 16,362 |
| | AGGATCACCCATGTgcTCTCTCTCGGGTCAGGAGCCCCCCCCTGAACCCAGGATAACCCTCAAAGTCGGGGGGC | |
| PL13342 | GAAGTTCATCTGTACCACCGGCAAACTGCCCGTGCCTTGGCCCACCCTCGTCACCACCCTGACGTACGGCGTGCAGTGCTTACATACAAgggagcA | 16,363 |
| | CATGAGGATCACCCATGTgcgactcCCACAGTCACTGGGgagtcttccc | |
| PL13343 | GAAGTTCATCTGTACCACCGGCAAACTGCCCGTGCCTTGGCCCACCCTCGTCACCACCCTGACGTACGGCGTGCAGTGCTTACATACAAgggagcA | 16,364 |
| | CATGAGGATCACCCATGTgcgactcCCACAGTCACTGGGgagtcttcccTCTCTCTCGGGTCAGGAGCCCCCCCCTGAACCCAGGATAACCCTCAAAGT | |
| | CGGGGGGC | |
| PL13344 | GAAGTTCATCTGTACCACCGGCAAACTGCCCGTGCCTTGGCCCACCCTCGTCACCACCCTGACGTACGGCGTGCAGTGCTTACATACAAgggagcA | 16,365 |
| | CATGAGGATCACCCATGTgcgactcCCACAGTCACTGGGgagtcttccctctctctctctctctctctcgggagcACATGAGGATCACCCATGTgcgactcCCACAGT | |
| | CACTGGGgagtcttccc | |
| PL13345 | GAAGTTCATCTGTACCACCGGCAAACTGCCCGTGCCTTGGCCCACCCTCGTCACCACCCTGACGTACGGCGTGCAGTGCTTACATACAAgggagcA | 16,366 |
| | CATGAGGATCACCCATGTgcgactcCCACAGTCACTGGGgagtcttccctctctctctctctctctctcgggagcACATGAGGATCACCCATGTgcgactcCCACAGT | |
| | CACTGGGgagtcttcccTCTCTCTCGGGTCAGGAGCCCCCCCCTGAACCCAGGATAACCCTCAAAGTCGGGGGGC | |
| PL13346 | GAAGTTCATCTGTACCACCGGCAAACTGCCCGTGCCTTGGCCCACCCTCGTCACCACCCTGACGTACGGCGTGCAGTGCTTACATACAACTAACAT | 16,367 |
| | AgcACATGAGGATCACCCATGTgc | |
| PL13347 | GAAGTTCATCTGTACCACCGGCAAACTGCCCGTGCCTTGGCCCACCCTCGTCACCACCCTGACGTACGGCGTGCAGTGCTTACATACAACTAACAT | 16,368 |
| | AgcACATGAGGATCACCCATGTgcTCTCTCTCGGGTCAGGAGCCCCCCCCTGAACCCAGGATAACCCTCAAAGTCGGGGGGC | |
| PL13348 | GAAGTTCATCTGTACCACCGGCAAACTGCCCGTGCCTTGGCCCACCCTCGTCACCACCCTGACGTACGGCGTGCAGTGCTTACATACAACTAACAT | 16,369 |
| | AgggagcACATGAGGATCACCCATGTgcgactcCCACAGTCACTGGGgagtcttccc | |
| PL13349 | GAAGTTCATCTGTACCACCGGCAAACTGCCCGTGCCTTGGCCCACCCTCGTCACCACCCTGACGTACGGCGTGCAGTGCTTACATACAACTAACAT | 16,370 |
| | AgggagcACATGAGGATCACCCATGTgcgactcCCACAGTCACTGGGgagtcttcccTCTCTCTCGGGTCAGGAGCCCCCCCCTGAACCCAGGATAACCC | |
| | TCAAAGTCGGGGGGC | |
| PL13350 | GAAGTTCATCTGTACCACCGGCAAACTGCCCGTGCCTTGGCCCACCCTCGTCACCACCCTGACGTACGGCGTGCAGTGCTTACATACAACTAACAT | 16,371 |
| | AgggagcACATGAGGATCACCCATGTgcgactcCCACAGTCACTGGGgagtcttccctctctctctctctctctctcgggagcACATGAGGATCACCCATGTgcgactc | |
| | CCACAGTCACTGGGgagtcttccc | |
| PL13351 | GAAGTTCATCTGTACCACCGGCAAACTGCCCGTGCCTTGGCCCACCCTCGTCACCACCCTGACGTACGGCGTGCAGTGCTTACATACAACTAACAT | 16,372 |
| | AgggagcACATGAGGATCACCCATGTgcgactcCCACAGTCACTGGGgagtcttccctctctctctctctctctctcgggagcACATGAGGATCACCCATGTgcgactc | |
| | CCACAGTCACTGGGgagtcttcccTCTCTCTCGGGTCAGGAGCCCCCCCCTGAACCCAGGATAACCCTCAAAGTCGGGGGGC | |
| PL13352 | GAAGTTCATCTGTACCACCGGCAAACTGCCCGTGCCTTGGCCCACCCTCGTCACCACCCTGACGTACGGCGTGCAGTGCTTCGGCACATACAAgCA | 16,373 |
| | CATGAGGATCACCCATGTgc | |
| PL13353 | GAAGTTCATCTGTACCACCGGCAAACTGCCCGTGCCTTGGCCCACCCTCGTCACCACCCTGACGTACGGCGTGCAGTGCTTCGGCACATACAAgcA | 16,374 |
| | CATGAGGATCACCCATGTgcTCTCTCTCGGGTCAGGAGCCCCCCCCTGAACCCAGGATAACCCTCAAAGTCGGGGGGC | |
| PL13354 | GAAGTTCATCTGTACCACCGGCAAACTGCCCGTGCCTTGGCCCACCCTCGTCACCACCCTGACGTACGGCGTGCAGTGCTTCGGCACATACAAggg | 16,375 |
| | agcACATGAGGATCACCCATGTgcgactcCCACAGTCACTGGGgagtcttccc | |
| PL13355 | GAAGTTCATCTGTACCACCGGCAAACTGCCCGTGCCTTGGCCCACCCTCGTCACCACCCTGACGTACGGCGTGCAGTGCTTCGGCACATACAAggg | 16,376 |
| | agcACATGAGGATCACCCATGTgcgactcCCACAGTCACTGGGgagtcttcccTCTCTCTCGGGTCAGGAGCCCCCCCCTGAACCCAGGATAACCCTCAA | |
| | AGTCGGGGGGC | |
| PL13356 | GAAGTTCATCTGTACCACCGGCAAACTGCCCGTGCCTTGGCCCACCCTCGTCACCACCCTGACGTACGGCGTGCAGTGCTTCGGCACATACAAggg | 16,377 |
| | agcACATGAGGATCACCCATGTgcgactcCCACAGTCACTGGGgagtcttccctctctctctctctctctctcgggagcACATGAGGATCACCCATGTgcgactcCCA | |
| | CAGTCACTGGGgagtcttccc | |
| PL13357 | GAAGTTCATCTGTACCACCGGCAAACTGCCCGTGCCTTGGCCCACCCTCGTCACCACCCTGACGTACGGCGTGCAGTGCTTCGGCACATACAAggg | 16,378 |
| | agcACATGAGGATCACCCATGTgcgactcCCACAGTCACTGGGgagtcttccctctctctctctctctctctcgggagcACATGAGGATCACCCATGTgcgactcCCA | |
| | CAGTCACTGGGgagtcttcccTCTCTCTCGGGTCAGGAGCCCCCCCCTGAACCCAGGATAACCCTCAAAGTCGGGGGGC | |
| PL13358 | GAAGTTCATCTGTACCACCGGCAAACTGCCCGTGCCTTGGCCCACCCTCGTCACCACCCTGACGTACGGCGTGCAGTGCTTCGGCACATACAACT | 16,379 |
| | AACATAgcACATGAGGATCACCCATGTgc | |
| PL13359 | GAAGTTCATCTGTACCACCGGCAAACTGCCCGTGCCTTGGCCCACCCTCGTCACCACCCTGACGTACGGCGTGCAGTGCTTCGGCACATACAACT | 16,380 |
| | AACATAgcACATGAGGATCACCCATGTgcTCTCTCTCGGGTCAGGAGCCCCCCCCTGAACCCAGGATAACCCTCAAAGTCGGGGGGC | |
| PL13360 | GAAGTTCATCTGTACCACCGGCAAACTGCCCGTGCCTTGGCCCACCCTCGTCACCACCCTGACGTACGGCGTGCAGTGCTTCGGCACATACAACT | 16,381 |
| | AACATAgggagcACATGAGGATCACCCATGTgcgactcCCACAGTCACTGGGgagtcttccc | |
| PL13361 | GAAGTTCATCTGTACCACCGGCAAACTGCCCGTGCCTTGGCCCACCCTCGTCACCACCCTGACGTACGGCGTGCAGTGCTTCGGCACATACAACT | 16,382 |
| | AACATAgggagcACATGAGGATCACCCATGTgcgactcCCACAGTCACTGGGgagtcttcccTCTCTCTCGGGTCAGGAGCCCCCCCCTGAACCCAGGAT | |
| | AACCCTCAAAGTCGGGGGGC | |
| PL13362 | GAAGTTCATCTGTACCACCGGCAAACTGCCCGTGCCTTGGCCCACCCTCGTCACCACCCTGACGTACGGCGTGCAGTGCTTCGGCACATACAACT | 16,383 |
| | AACATAgggagcACATGAGGATCACCCATGTgcgactcCCACAGTCACTGGGgagtcttccctctctctctctctctctctcgggagcACATGAGGATCACCCATGT | |
| | gcgactcCCACAGTCACTGGGgagtcttccc | |
| PL13363 | GAAGTTCATCTGTACCACCGGCAAACTGCCCGTGCCTTGGCCCACCCTCGTCACCACCCTGACGTACGGCGTGCAGTGCTTCGGCACATACAACT | 16,384 |
| | AACATAgggagcACATGAGGATCACCCATGTgcgactcCCACAGTCACTGGGgagtcttccctctctctctctctctctctcgggagcACATGAGGATCACCCATGT | |
| | gcgactcCCACAGTCACTGGGgagtcttcccTCTCTCTCGGGTCAGGAGCCCCCCCCTGAACCCAGGATAACCCTCAAAGTCGGGGGGC | |
| PL13364 | GAAGTTCATCTGTACCACCGGCAAACTGCCCGTGCCTTGGCCCACCCTCGTCACCACCCTGACGTACGGTCCTGTGAGCTTACATACAAgcACATG | 16,385 |
| | AGGATCACCCATGTgc | |
| PL13365 | GAAGTTCATCTGTACCACCGGCAAACTGCCCGTGCCTTGGCCCACCCTCGTCACCACCCTGACGTACGGTCCTGTGAGCTTACATACAAgcACATG | 16,386 |
| | AGGATCACCCATGTgcTCTCTCTCGGGTCAGGAGCCCCCCCCTGAACCCAGGATAACCCTCAAAGTCGGGGGGC | |
| PL13366 | GAAGTTCATCTGTACCACCGGCAAACTGCCCGTGCCTTGGCCCACCCTCGTCACCACCCTGACGTACGGTCCTGTGAGCTTACATACAAgggagcAC | 16,387 |
| | ATGAGGATCACCCATGTgcgactcCCACAGTCACTGGGgagtcttccc | |
| PL13367 | GAAGTTCATCTGTACCACCGGCAAACTGCCCGTGCCTTGGCCCACCCTCGTCACCACCCTGACGTACGGTCCTGTGAGCTTACATACAAgggagcAC | 16,388 |
| | ATGAGGATCACCCATGTgcgactcCCACAGTCACTGGGgagtcttcccTCTCTCTCGGGTCAGGAGCCCCCCCCTGAACCCAGGATAACCCTCAAAGTC | |
| | GGGGGGC | |
| PL13368 | GAAGTTCATCTGTACCACCGGCAAACTGCCCGTGCCTTGGCCCACCCTCGTCACCACCCTGACGTACGGTCCTGTGAGCTTACATACAAgggagcAC | 16,389 |
| | ATGAGGATCACCCATGTgcgactcCCACAGTCACTGGGgagtcttccctctctctctctctctctctcgggagcACATGAGGATCACCCATGTgcgactcCCACAGTC | |
| | ACTGGGgagtcttccc | |
| PL13369 | GAAGTTCATCTGTACCACCGGCAAACTGCCCGTGCCTTGGCCCACCCTCGTCACCACCCTGACGTACGGTCCTGTGAGCTTACATACAAgggagcAC | 16,390 |
| | ATGAGGATCACCCATGTgcgactcCCACAGTCACTGGGgagtcttccctctctctctctctctctctcgggagcACATGAGGATCACCCATGTgcgactcCCACAGTC | |
| | ACTGGGgagtcttcccTCTCTCTCGGGTCAGGAGCCCCCCCCTGAACCCAGGATAACCCTCAAAGTCGGGGGGC | |
| PL13370 | GAAGTTCATCTGTACCACCGGCAAACTGCCCGTGCCTTGGCCCACCCTCGTCACCACCCTGACGTACGGTCCTGTGAGCTTACATACAACTAACAT | 16,391 |
| | AgcACATGAGGATCACCCATGTgc | |
| PL13371 | GAAGTTCATCTGTACCACCGGCAAACTGCCCGTGCCTTGGCCCACCCTCGTCACCACCCTGACGTACGGTCCTGTGAGCTTACATACAACTAACAT | 16,392 |
| | AgcACATGAGGATCACCCATGTgcTCTCTCTCGGGTCAGGAGCCCCCCCCTGAACCCAGGATAACCCTCAAAGTCGGGGGGC | |
| PL13372 | GAAGTTCATCTGTACCACCGGCAAACTGCCCGTGCCTTGGCCCACCCTCGTCACCACCCTGACGTACGGTCCTGTGAGCTTACATACAACTAACAT | 16,393 |
| | AgggagcACATGAGGATCACCCATGTgcgactcCCACAGTCACTGGGgagtcttccc | |
| PL13373 | GAAGTTCATCTGTACCACCGGCAAACTGCCCGTGCCTTGGCCCACCCTCGTCACCACCCTGACGTACGGTCCTGTGAGCTTACATACAACTAACAT | 16,394 |
| | AgggagcACATGAGGATCACCCATGTgcgactcCCACAGTCACTGGGgagtcttcccTCTCTCTCGGGTCAGGAGCCCCCCCCTGAACCCAGGATAACCC | |
| | TCAAAGTCGGGGGGC | |
| PL13374 | GAAGTTCATCTGTACCACCGGCAAACTGCCCGTGCCTTGGCCCACCCTCGTCACCACCCTGACGTACGGTCCTGTGAGCTTACATACAACTAACAT | 16,395 |
| | AgggagcACATGAGGATCACCCATGTgcgactcCCACAGTCACTGGGgagtcttccctctctctctctctctctctcgggagcACATGAGGATCACCCATGTgcgactc | |
| | CCACAGTCACTGGGgagtcttccc | |
| PL13375 | GAAGTTCATCTGTACCACCGGCAAACTGCCCGTGCCTTGGCCCACCCTCGTCACCACCCTGACGTACGGTCCTGTGAGCTTACATACAACTAACAT | 16,396 |
| | AgggagcACATGAGGATCACCCATGTgcgactcCCACAGTCACTGGGgagtcttccctctctctctctctctctctcgggagcACATGAGGATCACCCATGTgcgactc | |
| | CCACAGTCACTGGGgagtcttcccTCTCTCTCGGGTCAGGAGCCCCCCCCTGAACCCAGGATAACCCTCAAAGTCGGGGGGC | |
| PL13376 | CGCGGTTCTATCTAGTTACGCGTTAAACCAACTAGAAGACCACCCTGACGTACGGCGTGCAGACATACAAgcACATGAGGATCACCCATGTgc | 16,397 |
| PL13377 | CGCGGTTCTATCTAGTTACGCGTTAAACCAACTAGAAGACCACCCTGACGTACGGCGTGCAGACATACAAgcACATGAGGATCACCCATGTgcTCT | 16,398 |
| | CTCTCGGGTCAGGAGCCCCCCCCTGAACCCAGGATAACCCTCAAAGTCGGGGGGC | |
| PL13378 | CGCGGTTCTATCTAGTTACGCGTTAAACCAACTAGAAGACCACCCTGACGTACGGCGTGCAGACATACAAgggagcACATGAGGATCACCCATGTg | 16,399 |
| | cgactcCCACAGTCACTGGGgagtcttccc | |
| PL13379 | CGCGGTTCTATCTAGTTACGCGTTAAACCAACTAGAAGACCACCCTGACGTACGGCGTGCAGACATACAAgggagcACATGAGGATCACCCATGTg | 16,400 |
| | cgactcCCACAGTCACTGGGgagtcttcccTCTCTCTCGGGTCAGGAGCCCCCCCCTGAACCCAGGATAACCCTCAAAGTCGGGGGGC | |
| PL13380 | CGCGGTTCTATCTAGTTACGCGTTAAACCAACTAGAAGACCACCCTGACGTACGGCGTGCAGACATACAAgggagcACATGAGGATCACCCATGTg | 16,401 |
| | cgactcCCACAGTCACTGGGgagtcttccctctctctctctctctctctcgggagcACATGAGGATCACCCATGTgcgactcCCACAGTCACTGGGgagtcttccc | |
| PL13381 | CGCGGTTCTATCTAGTTACGCGTTAAACCAACTAGAAGACCACCCTGACGTACGGCGTGCAGACATACAAgggagcACATGAGGATCACCCATGTg | 16,402 |
| | cgactcCCACAGTCACTGGGgagtcttccctctctctctctctctctctcgggagcACATGAGGATCACCCATGTgcgactcCCACAGTCACTGGGgagtcttcccTCTCT | |
| | CTCGGGTCAGGAGCCCCCCCCTGAACCCAGGATAACCCTCAAAGTCGGGGGGC | |
| PL13382 | CGCGGTTCTATCTAGTTACGCGTTAAACCAACTAGAAGACCACCCTGACGTACGGCGTGCAGACATACAACTAACATAgcACATGAGGATCACCC | 16,403 |
| | ATGTgc | |
| PL13383 | CGCGGTTCTATCTAGTTACGCGTTAAACCAACTAGAAGACCACCCTGACGTACGGCGTGCAGACATACAACTAACATAgcACATGAGGATCACCC | 16,404 |
| | ATGTgcTCTCTCTCGGGTCAGGAGCCCCCCCCTGAACCCAGGATAACCCTCAAAGTCGGGGGGC | |
| PL13384 | CGCGGTTCTATCTAGTTACGCGTTAAACCAACTAGAAGACCACCCTGACGTACGGCGTGCAGACATACAACTAACATAgggagcACATGAGGATCA | 16,405 |
| | CCCATGTgcgactcCCACAGTCACTGGGgagtcttccc | |
| PL13385 | CGCGGTTCTATCTAGTTACGCGTTAAACCAACTAGAAGACCACCCTGACGTACGGCGTGCAGACATACAACTAACATAgggagcACATGAGGATCA | 16,406 |
| | CCCATGTgcgactcCCACAGTCACTGGGgagtcttcccTCTCTCTCGGGTCAGGAGCCCCCCCCTGAACCCAGGATAACCCTCAAAGTCGGGGGGC | |
| PL13386 | CGCGGTTCTATCTAGTTACGCGTTAAACCAACTAGAAGACCACCCTGACGTACGGCGTGCAGACATACAACTAACATAgggagcACATGAGGATCA | 16,407 |
| | CCCATGTgcgactcCCACAGTCACTGGGgagtcttccctctctctctctctctctctcgggagcACATGAGGATCACCCATGTgcgactcCCACAGTCACTGGGgagtc | |
| | ttccc | |
| PL13387 | CGCGGTTCTATCTAGTTACGCGTTAAACCAACTAGAAGACCACCCTGACGTACGGCGTGCAGACATACAACTAACATAgggagcACATGAGGATCA | 16,408 |
| | CCCATGTgcgactcCCACAGTCACTGGGgagtcttccctctctctctctctctctctcgggagcACATGAGGATCACCCATGTgcgactcCCACAGTCACTGGGgagtc | |
| | ttcccTCTCTCTCGGGTCAGGAGCCCCCCCCTGAACCCAGGATAACCCTCAAAGTCGGGGGGC | |
| PL13388 | CGCGGTTCTATCTAGTTACGCGTTAAACCAACTAGAAGACCACCCTGACGTACGGCGTGCAGTGCTTACATACAAgcACATGAGGATCACCCATG | 16,409 |
| | Tgc | |
| PL13389 | CGCGGTTCTATCTAGTTACGCGTTAAACCAACTAGAAGACCACCCTGACGTACGGCGTGCAGTGCTTACATACAAgcACATGAGGATCACCCATG | 16,410 |
| | TgcTCTCTCTCGGGTCAGGAGCCCCCCCCTGAACCCAGGATAACCCTCAAAGTCGGGGGGC | |
| PL13390 | CGCGGTTCTATCTAGTTACGCGTTAAACCAACTAGAAGACCACCCTGACGTACGGCGTGCAGTGCTTACATACAAgggagcACATGAGGATCACCC | 16,411 |
| | ATGTgcgactcCCACAGTCACTGGGgagtcttccc | |
| PL13391 | CGCGGTTCTATCTAGTTACGCGTTAAACCAACTAGAAGACCACCCTGACGTACGGCGTGCAGTGCTTACATACAAgggagcACATGAGGATCACCC | 16,412 |
| | ATGTgcgactcCCACAGTCACTGGGgagtcttcccTCTCTCTCGGGTCAGGAGCCCCCCCCTGAACCCAGGATAACCCTCAAAGTCGGGGGGC | |
| PL13392 | CGCGGTTCTATCTAGTTACGCGTTAAACCAACTAGAAGACCACCCTGACGTACGGCGTGCAGTGCTTACATACAAgggagcACATGAGGATCACCC | 16,413 |
| | ATGTgcgactcCCACAGTCACTGGGgagtcttccctctctctctctctctctctcgggagcACATGAGGATCACCCATGTgcgactcCCACAGTCACTGGGgagtcttcc | |
| | C | |
| PL13393 | CGCGGTTCTATCTAGTTACGCGTTAAACCAACTAGAAGACCACCCTGACGTACGGCGTGCAGTGCTTACATACAAgggagcACATGAGGATCACCC | 16,414 |
| | ATGTgcgactcCCACAGTCACTGGGgagtcttccctctctctctctctctctctcgggagcACATGAGGATCACCCATGTgcgactcCCACAGTCACTGGGgagtcttcc | |
| | cTCTCTCTCGGGTCAGGAGCCCCCCCCTGAACCCAGGATAACCCTCAAAGTCGGGGGGC | |
| PL13394 | CGCGGTTCTATCTAGTTACGCGTTAAACCAACTAGAAGACCACCCTGACGTACGGCGTGCAGTGCTTACATACAACTAACATAgcACATGAGGAT | 16,415 |
| | CACCCATGTgc | |
| PL13395 | CGCGGTTCTATCTAGTTACGCGTTAAACCAACTAGAAGACCACCCTGACGTACGGCGTGCAGTGCTTACATACAACTAACATAgcACATGAGGAT | 16,416 |
| | CACCCATGTgcTCTCTCTCGGGTCAGGAGCCCCCCCCTGAACCCAGGATAACCCTCAAAGTCGGGGGGC | |
| PL13396 | CGCGGTTCTATCTAGTTACGCGTTAAACCAACTAGAAGACCACCCTGACGTACGGCGTGCAGTGCTTACATACAACTAACATAgggagcACATGAG | 16,417 |
| | GATCACCCATGTgcgactcCCACAGTCACTGGGgagtcttccc | |
| PL13397 | CGCGGTTCTATCTAGTTACGCGTTAAACCAACTAGAAGACCACCCTGACGTACGGCGTGCAGTGCTTACATACAACTAACATAgggagcACATGAG | 16,418 |
| | GATCACCCATGTgcgactcCCACAGTCACTGGGgagtcttcccTCTCTCTCGGGTCAGGAGCCCCCCCCTGAACCCAGGATAACCCTCAAAGTCGGGGG | |
| | GC | |
| PL13398 | CGCGGTTCTATCTAGTTACGCGTTAAACCAACTAGAAGACCACCCTGACGTACGGCGTGCAGTGCTTACATACAACTAACATAgggagcACATGAG | 16,419 |
| | GATCACCCATGTgcgactcCCACAGTCACTGGGgagtcttccctctctctctctctctctctcgggagcACATGAGGATCACCCATGTgcgactcCCACAGTCACTGG | |
| | Ggagtcttccc | |
| PL13399 | CGCGGTTCTATCTAGTTACGCGTTAAACCAACTAGAAGACCACCCTGACGTACGGCGTGCAGTGCTTACATACAACTAACATAgggagcACATGAG | 16,420 |
| | GATCACCCATGTgcgactcCCACAGTCACTGGGgagtcttccctctctctctctctctctctcgggagcACATGAGGATCACCCATGTgcgactcCCACAGTCACTGG | |
| | GgagtcttcccTCTCTCTCGGGTCAGGAGCCCCCCCCTGAACCCAGGATAACCCTCAAAGTCGGGGGGC | |
| PL13400 | CGCGGTTCTATCTAGTTACGCGTTAAACCAACTAGAAGACCACCCTGACGTACGGCGTGCAGTGCTTCGGCACATACAAgcACATGAGGATCACC | 16,421 |
| | CATGTgc | |
| PL13401 | CGCGGTTCTATCTAGTTACGCGTTAAACCAACTAGAAGACCACCCTGACGTACGGCGTGCAGTGCTTCGGCACATACAAgCACATGAGGATCACC | 16,422 |
| | CATGTgcTCTCTCTCGGGTCAGGAGCCCCCCCCTGAACCCAGGATAACCCTCAAAGTCGGGGGGC | |
| PL13402 | CGCGGTTCTATCTAGTTACGCGTTAAACCAACTAGAAGACCACCCTGACGTACGGCGTGCAGTGCTTCGGCACATACAAgggagcACATGAGGATC | 16,423 |
| | ACCCATGTgcgactcCCACAGTCACTGGGgagtcttccc | |
| PL13403 | CGCGGTTCTATCTAGTTACGCGTTAAACCAACTAGAAGACCACCCTGACGTACGGCGTGCAGTGCTTCGGCACATACAAgggagcACATGAGGATC | 16,424 |
| | ACCCATGTgcgactcCCACAGTCACTGGGgagtcttcccTCTCTCTCGGGTCAGGAGCCCCCCCCTGAACCCAGGATAACCCTCAAAGTCGGGGGGC | |
| PL13404 | CGCGGTTCTATCTAGTTACGCGTTAAACCAACTAGAAGACCACCCTGACGTACGGCGTGCAGTGCTTCGGCACATACAAgggagcACATGAGGATC | 16,425 |
| | ACCCATGTgcgactcCCACAGTCACTGGGgagtcttccctctctctctctctctctctcgggagcACATGAGGATCACCCATGTgcgactcCCACAGTCACTGGGgagt | |
| | cttccc | |
| PL13405 | CGCGGTTCTATCTAGTTACGCGTTAAACCAACTAGAAGACCACCCTGACGTACGGCGTGCAGTGCTTCGGCACATACAAgggagcACATGAGGATC | 16,426 |
| | ACCCATGTgcgactcCCACAGTCACTGGGgagtcttccctctctctctctctctctctcgggagcACATGAGGATCACCCATGTgcgactcCCACAGTCACTGGGgagt | |
| | cttcccTCTCTCTCGGGTCAGGAGCCCCCCCCTGAACCCAGGATAACCCTCAAAGTCGGGGGGC | |
| PL13406 | CGCGGTTCTATCTAGTTACGCGTTAAACCAACTAGAAGACCACCCTGACGTACGGCGTGCAGTGCTTCGGCACATACAACTAACATAgcACATGA | 16,427 |
| | GGATCACCCATGTgc | |
| PL13407 | CGCGGTTCTATCTAGTTACGCGTTAAACCAACTAGAAGACCACCCTGACGTACGGCGTGCAGTGCTTCGGCACATACAACTAACATAgcACATGA | 16,428 |
| | GGATCACCCATGTgcTCTCTCTCGGGTCAGGAGCCCCCCCCTGAACCCAGGATAACCCTCAAAGTCGGGGGGC | |
| PL13408 | CGCGGTTCTATCTAGTTACGCGTTAAACCAACTAGAAGACCACCCTGACGTACGGCGTGCAGTGCTTCGGCACATACAACTAACATAgggagcACA | 16,429 |
| | TGAGGATCACCCATGTgcgactcCCACAGTCACTGGGgagtcttccc | |
| PL13409 | CGCGGTTCTATCTAGTTACGCGTTAAACCAACTAGAAGACCACCCTGACGTACGGCGTGCAGTGCTTCGGCACATACAACTAACATAgggagcACA | 16,430 |
| | TGAGGATCACCCATGTgcgactcCCACAGTCACTGGGgagtcttcccTCTCTCTCGGGTCAGGAGCCCCCCCCTGAACCCAGGATAACCCTCAAAGTCG | |
| | GGGGGC | |
| PL13410 | CGCGGTTCTATCTAGTTACGCGTTAAACCAACTAGAAGACCACCCTGACGTACGGCGTGCAGTGCTTCGGCACATACAACTAACATAgggagcACA | 16,431 |
| | TGAGGATCACCCATGTgcgactcCCACAGTCACTGGGgagtcttccctctctctctctctctctctcgggagcACATGAGGATCACCCATGTgcgactcCCACAGTCA | |
| | CTGGGgagtcttccc | |
| PL13411 | CGCGGTTCTATCTAGTTACGCGTTAAACCAACTAGAAGACCACCCTGACGTACGGCGTGCAGTGCTTCGGCACATACAACTAACATAgggagcACA | 16,432 |
| | TGAGGATCACCCATGTgcgactcCCACAGTCACTGGGgagtcttccctctctctctctctctctctcgggagcACATGAGGATCACCCATGTgcgactcCCACAGTCA | |
| | CTGGGgagtcttcccTCTCTCTCGGGTCAGGAGCCCCCCCCTGAACCCAGGATAACCCTCAAAGTCGGGGGGC | |
| PL13412 | CGCGGTTCTATCTAGTTACGCGTTAAACCAACTAGAAGACCACCCTGACGTACGGTCCTGTGAGCTTACATACAAgcACATGAGGATCACCCATGT | 16,433 |
| | gc | |
| PL13413 | CGCGGTTCTATCTAGTTACGCGTTAAACCAACTAGAAGACCACCCTGACGTACGGTCCTGTGAGCTTACATACAAgcACATGAGGATCACCCATGT | 16,434 |
| | gcTCTCTCTCGGGTCAGGAGCCCCCCCCTGAACCCAGGATAACCCTCAAAGTCGGGGGGC | |
| PL13414 | CGCGGTTCTATCTAGTTACGCGTTAAACCAACTAGAAGACCACCCTGACGTACGGTCCTGTGAGCTTACATACAAgggagcACATGAGGATCACCC | 16,435 |
| | ATGTgcgactcCCACAGTCACTGGGgagtcttccc | |
| PL13415 | CGCGGTTCTATCTAGTTACGCGTTAAACCAACTAGAAGACCACCCTGACGTACGGTCCTGTGAGCTTACATACAAgggagcACATGAGGATCACCC | 16,436 |
| | ATGTgcgactcCCACAGTCACTGGGgagtcttcccTCTCTCTCGGGTCAGGAGCCCCCCCCTGAACCCAGGATAACCCTCAAAGTCGGGGGGC | |
| PL13416 | CGCGGTTCTATCTAGTTACGCGTTAAACCAACTAGAAGACCACCCTGACGTACGGTCCTGTGAGCTTACATACAAgggagcACATGAGGATCACCC | 16,437 |
| | ATGTgcgactcCCACAGTCACTGGGgagtcttccctctctctctctctctctctcgggagcACATGAGGATCACCCATGTgcgactcCCACAGTCACTGGGgagtcttcc | |
| | C | |
| PL13417 | CGCGGTTCTATCTAGTTACGCGTTAAACCAACTAGAAGACCACCCTGACGTACGGTCCTGTGAGCTTACATACAAgggagcACATGAGGATCACCC | 16,438 |
| | ATGTgcgactcCCACAGTCACTGGGgagtcttccctctctctctctctctctctcgggagcACATGAGGATCACCCATGTgcgactcCCACAGTCACTGGGgagtcttcc | |
| | CTCTCTCTCGGGTCAGGAGCCCCCCCCTGAACCCAGGATAACCCTCAAAGTCGGGGGGC | |
| PL13418 | CGCGGTTCTATCTAGTTACGCGTTAAACCAACTAGAAGACCACCCTGACGTACGGTCCTGTGAGCTTACATACAACTAACATAgcACATGAGGATC | 16,439 |
| | ACCCATGTgc | |
| PL13419 | CGCGGTTCTATCTAGTTACGCGTTAAACCAACTAGAAGACCACCCTGACGTACGGTCCTGTGAGCTTACATACAACTAACATAgcACATGAGGATC | 16,440 |
| | ACCCATGTgcTCTCTCTCGGGTCAGGAGCCCCCCCCTGAACCCAGGATAACCCTCAAAGTCGGGGGGC | |
| PL13420 | CGCGGTTCTATCTAGTTACGCGTTAAACCAACTAGAAGACCACCCTGACGTACGGTCCTGTGAGCTTACATACAACTAACATAgggagcACATGAG | 16,441 |
| | GATCACCCATGTgcgactcCCACAGTCACTGGGgagtcttccc | |
| PL13421 | CGCGGTTCTATCTAGTTACGCGTTAAACCAACTAGAAGACCACCCTGACGTACGGTCCTGTGAGCTTACATACAACTAACATAgggagcACATGAG | 16,442 |
| | GATCACCCATGTgcgactcCCACAGTCACTGGGgagtcttcccTCTCTCTCGGGTCAGGAGCCCCCCCCTGAACCCAGGATAACCCTCAAAGTCGGGGG | |
| | GC | |
| PL13422 | CGCGGTTCTATCTAGTTACGCGTTAAACCAACTAGAAGACCACCCTGACGTACGGTCCTGTGAGCTTACATACAACTAACATAgggagcACATGAG | 16,443 |
| | GATCACCCATGTgcgactcCCACAGTCACTGGGgagtcttccctctctctctctctctctctcgggagcACATGAGGATCACCCATGTgcgactcCCACAGTCACTGG | |
| | Ggagtcttccc | |
| PL13423 | CGCGGTTCTATCTAGTTACGCGTTAAACCAACTAGAAGACCACCCTGACGTACGGTCCTGTGAGCTTACATACAACTAACATAgggagcACATGAG | 16,444 |
| | GATCACCCATGTgcgactcCCACAGTCACTGGGgagtcttccctctctctctctctctctctcgggagcACATGAGGATCACCCATGTgcgactcCCACAGTCACTGG | |
| | GgagtcttcccTCTCTCTCGGGTCAGGAGCCCCCCCCTGAACCCAGGATAACCCTCAAAGTCGGGGGGC | |
| PL13424 | CGCGGTTCTATCTAGTTACGCGTTAAACCAACTAGAAGAAGTTCATCTGTACCACCGGCAAACTGCCCGTGCCTTGGCCCACCCTCGTCACCACCC | 16,445 |
| | TGACGTACGGCGTGCAGACATACAAgcACATGAGGATCACCCATGTgc | |
| PL13425 | CGCGGTTCTATCTAGTTACGCGTTAAACCAACTAGAAGAAGTTCATCTGTACCACCGGCAAACTGCCCGTGCCTTGGCCCACCCTCGTCACCACCC | 16,446 |
| | TGACGTACGGCGTGCAGACATACAAgcACATGAGGATCACCCATGTgcTCTCTCTCGGGTCAGGAGCCCCCCCCTGAACCCAGGATAACCCTCAA | |
| | AGTCGGGGGGC | |
| PL13426 | CGCGGTTCTATCTAGTTACGCGTTAAACCAACTAGAAGAAGTTCATCTGTACCACCGGCAAACTGCCCGTGCCTTGGCCCACCCTCGTCACCACCC | 16,447 |
| | TGACGTACGGCGTGCAGACATACAAgggagcACATGAGGATCACCCATGTgcgactcCCACAGTCACTGGGgagtcttccc | |
| PL13427 | CGCGGTTCTATCTAGTTACGCGTTAAACCAACTAGAAGAAGTTCATCTGTACCACCGGCAAACTGCCCGTGCCTTGGCCCACCCTCGTCACCACCC | 16,448 |
| | TGACGTACGGCGTGCAGACATACAAgggagcACATGAGGATCACCCATGTgcgactcCCACAGTCACTGGGgagtcttcccTCTCTCTCGGGTCAGGAG | |
| | CCCCCCCCTGAACCCAGGATAACCCTCAAAGTCGGGGGGC | |
| PL13428 | CGCGGTTCTATCTAGTTACGCGTTAAACCAACTAGAAGAAGTTCATCTGTACCACCGGCAAACTGCCCGTGCCTTGGCCCACCCTCGTCACCACCC | 16,449 |
| | TGACGTACGGCGTGCAGACATACAAgggagcACATGAGGATCACCCATGTgcgactcCCACAGTCACTGGGgagtcttccctctctctctctctctctctcgggagc | |
| | ACATGAGGATCACCCATGTgcgactcCCACAGTCACTGGGgagtcttccc | |
| PL13429 | CGCGGTTCTATCTAGTTACGCGTTAAACCAACTAGAAGAAGTTCATCTGTACCACCGGCAAACTGCCCGTGCCTTGGCCCACCCTCGTCACCACCC | 16,450 |
| | TGACGTACGGCGTGCAGACATACAAgggagcACATGAGGATCACCCATGTgcgactcCCACAGTCACTGGGgagtcttccctctctctctctctctctctcgggagc | |
| | ACATGAGGATCACCCATGTgcgactcCCACAGTCACTGGGgagtcttcccTCTCTCTCGGGTCAGGAGCCCCCCCCTGAACCCAGGATAACCCTCAAAG | |
| | TCGGGGGGC | |
| PL13430 | CGCGGTTCTATCTAGTTACGCGTTAAACCAACTAGAAGAAGTTCATCTGTACCACCGGCAAACTGCCCGTGCCTTGGCCCACCCTCGTCACCACCC | 16,451 |
| | TGACGTACGGCGTGCAGACATACAACTAACATAgcACATGAGGATCACCCATGTgc | |
| PL13431 | CGCGGTTCTATCTAGTTACGCGTTAAACCAACTAGAAGAAGTTCATCTGTACCACCGGCAAACTGCCCGTGCCTTGGCCCACCCTCGTCACCACCC | 16,452 |
| | TGACGTACGGCGTGCAGACATACAACTAACATAgcACATGAGGATCACCCATGTgcTCTCTCTCGGGTCAGGAGCCCCCCCCTGAACCCAGGATA | |
| | ACCCTCAAAGTCGGGGGGC | |
| PL13432 | CGCGGTTCTATCTAGTTACGCGTTAAACCAACTAGAAGAAGTTCATCTGTACCACCGGCAAACTGCCCGTGCCTTGGCCCACCCTCGTCACCACCC | 16,453 |
| | TGACGTACGGCGTGCAGACATACAACTAACATAgggagcACATGAGGATCACCCATGTgcgactcCCACAGTCACTGGGgagtcttccc | |
| PL13433 | CGCGGTTCTATCTAGTTACGCGTTAAACCAACTAGAAGAAGTTCATCTGTACCACCGGCAAACTGCCCGTGCCTTGGCCCACCCTCGTCACCACCC | 16,454 |
| | TGACGTACGGCGTGCAGACATACAACTAACATAgggagcACATGAGGATCACCCATGTgcgactcCCACAGTCACTGGGgagtcttcccTCTCTCTCGGG | |
| | TCAGGAGCCCCCCCCTGAACCCAGGATAACCCTCAAAGTCGGGGGGC | |
| PL13434 | CGCGGTTCTATCTAGTTACGCGTTAAACCAACTAGAAGAAGTTCATCTGTACCACCGGCAAACTGCCCGTGCCTTGGCCCACCCTCGTCACCACCC | 16,455 |
| | TGACGTACGGCGTGCAGACATACAACTAACATAgggagcACATGAGGATCACCCATGTgcgactcCCACAGTCACTGGGgagtcttccctctctctctctctctc | |
| | tctcgggagcACATGAGGATCACCCATGTgcgactcCCACAGTCACTGGGgagtcttccc | |
| PL13435 | CGCGGTTCTATCTAGTTACGCGTTAAACCAACTAGAAGAAGTTCATCTGTACCACCGGCAAACTGCCCGTGCCTTGGCCCACCCTCGTCACCACCC | 16,456 |
| | TGACGTACGGCGTGCAGACATACAACTAACATAgggagcACATGAGGATCACCCATGTgcgactcCCACAGTCACTGGGgagtcttccctctctctctctctctc | |
| | tctcgggagcACATGAGGATCACCCATGTgcgactcCCACAGTCACTGGGgagtcttcccTCTCTCTCGGGTCAGGAGCCCCCCCCTGAACCCAGGATAAC | |
| | CCTCAAAGTCGGGGGGC | |
| PL13436 | CGCGGTTCTATCTAGTTACGCGTTAAACCAACTAGAAGAAGTTCATCTGTACCACCGGCAAACTGCCCGTGCCTTGGCCCACCCTCGTCACCACCC | 16,457 |
| | TGACGTACGGCGTGCAGTGCTTACATACAAgcACATGAGGATCACCCATGTgc | |
| PL13437 | CGCGGTTCTATCTAGTTACGCGTTAAACCAACTAGAAGAAGTTCATCTGTACCACCGGCAAACTGCCCGTGCCTTGGCCCACCCTCGTCACCACCC | 16,458 |
| | TGACGTACGGCGTGCAGTGCTTACATACAAgcACATGAGGATCACCCATGTgcTCTCTCTCGGGTCAGGAGCCCCCCCCTGAACCCAGGATAACCC | |
| | TCAAAGTCGGGGGGC | |
| PL13438 | CGCGGTTCTATCTAGTTACGCGTTAAACCAACTAGAAGAAGTTCATCTGTACCACCGGCAAACTGCCCGTGCCTTGGCCCACCCTCGTCACCACCC | 16,459 |
| | TGACGTACGGCGTGCAGTGCTTACATACAAgggagcACATGAGGATCACCCATGTgcgactcCCACAGTCACTGGGgagtcttccc | |
| PL13439 | CGCGGTTCTATCTAGTTACGCGTTAAACCAACTAGAAGAAGTTCATCTGTACCACCGGCAAACTGCCCGTGCCTTGGCCCACCCTCGTCACCACCC | 16,460 |
| | TGACGTACGGCGTGCAGTGCTTACATACAAgggagcACATGAGGATCACCCATGTgcgactcCCACAGTCACTGGGgagtcttcccTCTCTCTCGGGTCA | |
| | GGAGCCCCCCCCTGAACCCAGGATAACCCTCAAAGTCGGGGGGC | |
| PL13440 | CGCGGTTCTATCTAGTTACGCGTTAAACCAACTAGAAGAAGTTCATCTGTACCACCGGCAAACTGCCCGTGCCTTGGCCCACCCTCGTCACCACCC | 16,461 |
| | TGACGTACGGCGTGCAGTGCTTACATACAAgggagcACATGAGGATCACCCATGTgcgactcCCACAGTCACTGGGgagtcttccctctctctctctctctctctc | |
| | gggagcACATGAGGATCACCCATGTgcgactcCCACAGTCACTGGGgagtcttccc | |
| PL13441 | CGCGGTTCTATCTAGTTACGCGTTAAACCAACTAGAAGAAGTTCATCTGTACCACCGGCAAACTGCCCGTGCCTTGGCCCACCCTCGTCACCACCC | 16,462 |
| | TGACGTACGGCGTGCAGTGCTTACATACAAgggagcACATGAGGATCACCCATGTgcgactcCCACAGTCACTGGGgagtcttccctctctctctctctctctctc | |
| | gggagcACATGAGGATCACCCATGTgcgactcCCACAGTCACTGGGgagtcttcccTCTCTCTCGGGTCAGGAGCCCCCCCCTGAACCCAGGATAACCCT | |
| | CAAAGTCGGGGGGC | |
| PL13442 | CGCGGTTCTATCTAGTTACGCGTTAAACCAACTAGAAGAAGTTCATCTGTACCACCGGCAAACTGCCCGTGCCTTGGCCCACCCTCGTCACCACCC | 16,463 |
| | TGACGTACGGCGTGCAGTGCTTACATACAACTAACATAgcACATGAGGATCACCCATGTgc | |
| PL13443 | CGCGGTTCTATCTAGTTACGCGTTAAACCAACTAGAAGAAGTTCATCTGTACCACCGGCAAACTGCCCGTGCCTTGGCCCACCCTCGTCACCACCC | 16,464 |
| | TGACGTACGGCGTGCAGTGCTTACATACAACTAACATAgcACATGAGGATCACCCATGTgcTCTCTCTCGGGTCAGGAGCCCCCCCCTGAACCCAG | |
| | GATAACCCTCAAAGTCGGGGGGC | |
| PL13444 | CGCGGTTCTATCTAGTTACGCGTTAAACCAACTAGAAGAAGTTCATCTGTACCACCGGCAAACTGCCCGTGCCTTGGCCCACCCTCGTCACCACCC | 16,465 |
| | TGACGTACGGCGTGCAGTGCTTACATACAACTAACATAgggagcACATGAGGATCACCCATGTgcgactcCCACAGTCACTGGGgagtcttccc | |
| PL13445 | CGCGGTTCTATCTAGTTACGCGTTAAACCAACTAGAAGAAGTTCATCTGTACCACCGGCAAACTGCCCGTGCCTTGGCCCACCCTCGTCACCACCC | 16,466 |
| | TGACGTACGGCGTGCAGTGCTTACATACAACTAACATAgggagcACATGAGGATCACCCATGTgcgactcCCACAGTCACTGGGgagtcttcccTCTCTCT | |
| | CGGGTCAGGAGCCCCCCCCTGAACCCAGGATAACCCTCAAAGTCGGGGGGC | |
| PL13446 | CGCGGTTCTATCTAGTTACGCGTTAAACCAACTAGAAGAAGTTCATCTGTACCACCGGCAAACTGCCCGTGCCTTGGCCCACCCTCGTCACCACCC | 16,467 |
| | TGACGTACGGCGTGCAGTGCTTACATACAACTAACATAgggagcACATGAGGATCACCCATGTgcgactcCCACAGTCACTGGGgagtcttccctctctctct | |
| | ctctctctctcgggagcACATGAGGATCACCCATGTgcgactcCCACAGTCACTGGGgagtcttccc | |
| PL13447 | CGCGGTTCTATCTAGTTACGCGTTAAACCAACTAGAAGAAGTTCATCTGTACCACCGGCAAACTGCCCGTGCCTTGGCCCACCCTCGTCACCACCC | 16,468 |
| | TGACGTACGGCGTGCAGTGCTTACATACAACTAACATAgggagcACATGAGGATCACCCATGTgcgactcCCACAGTCACTGGGgagtcttccctctctctct | |
| | ctctctctctcgggagcACATGAGGATCACCCATGTgcgactcCCACAGTCACTGGGgagtcttcccTCTCTCTCGGGTCAGGAGCCCCCCCCTGAACCCAGG | |
| | ATAACCCTCAAAGTCGGGGGGC | |
| PL13448 | CGCGGTTCTATCTAGTTACGCGTTAAACCAACTAGAAGAAGTTCATCTGTACCACCGGCAAACTGCCCGTGCCTTGGCCCACCCTCGTCACCACCC | 16,469 |
| | TGACGTACGGCGTGCAGTGCTTCGGCACATACAAgcACATGAGGATCACCCATGTgc | |
| PL13450 | CGCGGTTCTATCTAGTTACGCGTTAAACCAACTAGAAGAAGTTCATCTGTACCACCGGCAAACTGCCCGTGCCTTGGCCCACCCTCGTCACCACCC | 16,471 |
| | TGACGTACGGCGTGCAGTGCTTCGGCACATACAAgggagcACATGAGGATCACCCATGTgcgactcCCACAGTCACTGGGgagtcttccc | |
| PL13451 | CGCGGTTCTATCTAGTTACGCGTTAAACCAACTAGAAGAAGTTCATCTGTACCACCGGCAAACTGCCCGTGCCTTGGCCCACCCTCGTCACCACCC | 16,472 |
| | TGACGTACGGCGTGCAGTGCTTCGGCACATACAAgggagcACATGAGGATCACCCATGTgcgactcCCACAGTCACTGGGgagtcttcccTCTCTCTCGG | |
| | GTCAGGAGCCCCCCCCTGAACCCAGGATAACCCTCAAAGTCGGGGGGC | |
| PL13452 | CGCGGTTCTATCTAGTTACGCGTTAAACCAACTAGAAGAAGTTCATCTGTACCACCGGCAAACTGCCCGTGCCTTGGCCCACCCTCGTCACCACCC | 16,473 |
| | TGACGTACGGCGTGCAGTGCTTCGGCACATACAAgggagcACATGAGGATCACCCATGTgcgactcCCACAGTCACTGGGgagtcttccctctctctctctctc | |
| | tctctcgggagcACATGAGGATCACCCATGTgcgactcCCACAGTCACTGGGgagtcttccc | |
| PL13453 | CGCGGTTCTATCTAGTTACGCGTTAAACCAACTAGAAGAAGTTCATCTGTACCACCGGCAAACTGCCCGTGCCTTGGCCCACCCTCGTCACCACCC | 16,474 |
| | TGACGTACGGCGTGCAGTGCTTCGGCACATACAAgggagcACATGAGGATCACCCATGTgcgactcCCACAGTCACTGGGgagtcttccctctctctctctctc | |
| | tctctcgggagcACATGAGGATCACCCATGTgcgactcCCACAGTCACTGGGgagtcttcccTCTCTCTCGGGTCAGGAGCCCCCCCCTGAACCCAGGATAA | |
| | CCCTCAAAGTCGGGGGGC | |
| PL13454 | CGCGGTTCTATCTAGTTACGCGTTAAACCAACTAGAAGAAGTTCATCTGTACCACCGGCAAACTGCCCGTGCCTTGGCCCACCCTCGTCACCACCC | 16,475 |
| | TGACGTACGGCGTGCAGTGCTTCGGCACATACAACTAACATAgcACATGAGGATCACCCATGTgc | |
| PL13455 | CGCGGTTCTATCTAGTTACGCGTTAAACCAACTAGAAGAAGTTCATCTGTACCACCGGCAAACTGCCCGTGCCTTGGCCCACCCTCGTCACCACCC | 16,476 |
| | TGACGTACGGCGTGCAGTGCTTCGGCACATACAACTAACATAgcACATGAGGATCACCCATGTgcTCTCTCTCGGGTCAGGAGCCCCCCCCTGAAC | |
| | CCAGGATAACCCTCAAAGTCGGGGGGC | |
| PL13456 | CGCGGTTCTATCTAGTTACGCGTTAAACCAACTAGAAGAAGTTCATCTGTACCACCGGCAAACTGCCCGTGCCTTGGCCCACCCTCGTCACCACCC | 16,477 |
| | TGACGTACGGCGTGCAGTGCTTCGGCACATACAACTAACATAgggagcACATGAGGATCACCCATGTgcgactcCCACAGTCACTGGGgagtcttccc | |
| PL13457 | CGCGGTTCTATCTAGTTACGCGTTAAACCAACTAGAAGAAGTTCATCTGTACCACCGGCAAACTGCCCGTGCCTTGGCCCACCCTCGTCACCACCC | 16,478 |
| | TGACGTACGGCGTGCAGTGCTTCGGCACATACAACTAACATAgggagcACATGAGGATCACCCATGTgcgactcCCACAGTCACTGGGgagtcttcccTC | |
| | TCTCTCGGGTCAGGAGCCCCCCCCTGAACCCAGGATAACCCTCAAAGTCGGGGGGC | |
| PL13458 | CGCGGTTCTATCTAGTTACGCGTTAAACCAACTAGAAGAAGTTCATCTGTACCACCGGCAAACTGCCCGTGCCTTGGCCCACCCTCGTCACCACCC | 16,479 |
| | TGACGTACGGCGTGCAGTGCTTCGGCACATACAACTAACATAgggagcACATGAGGATCACCCATGTgcgactcCCACAGTCACTGGGgagtcttccctct | |
| | ctctctctctctctctcgggagcACATGAGGATCACCCATGTgcgactcCCACAGTCACTGGGgagtcttccc | |
| PL13459 | CGCGGTTCTATCTAGTTACGCGTTAAACCAACTAGAAGAAGTTCATCTGTACCACCGGCAAACTGCCCGTGCCTTGGCCCACCCTCGTCACCACCC | 16,480 |
| | TGACGTACGGCGTGCAGTGCTTCGGCACATACAACTAACATAgggagcACATGAGGATCACCCATGTgcgactcCCACAGTCACTGGGgagtcttccctct | |
| | ctctctctctctctctcgggagcACATGAGGATCACCCATGTgcgactcCCACAGTCACTGGGgagtcttcccTCTCTCTCGGGTCAGGAGCCCCCCCCTGAACCC | |
| | AGGATAACCCTCAAAGTCGGGGGGC | |
| PL13460 | CGCGGTTCTATCTAGTTACGCGTTAAACCAACTAGAAGAAGTTCATCTGTACCACCGGCAAACTGCCCGTGCCTTGGCCCACCCTCGTCACCACCC | 16,481 |
| | TGACGTACGGTCCTGTGAGCTTACATACAAgcACATGAGGATCACCCATGTgc | |
| PL13461 | CGCGGTTCTATCTAGTTACGCGTTAAACCAACTAGAAGAAGTTCATCTGTACCACCGGCAAACTGCCCGTGCCTTGGCCCACCCTCGTCACCACCC | 16,482 |
| | TGACGTACGGTCCTGTGAGCTTACATACAAgcACATGAGGATCACCCATGTgcTCTCTCTCGGGTCAGGAGCCCCCCCCTGAACCCAGGATAACCC | |
| | TCAAAGTCGGGGGGC | |
| PL13462 | CGCGGTTCTATCTAGTTACGCGTTAAACCAACTAGAAGAAGTTCATCTGTACCACCGGCAAACTGCCCGTGCCTTGGCCCACCCTCGTCACCACCC | 16,483 |
| | TGACGTACGGTCCTGTGAGCTTACATACAAgggagcACATGAGGATCACCCATGTgcgactcCCACAGTCACTGGGgagtcttccc | |
| PL13463 | CGCGGTTCTATCTAGTTACGCGTTAAACCAACTAGAAGAAGTTCATCTGTACCACCGGCAAACTGCCCGTGCCTTGGCCCACCCTCGTCACCACCC | 16,484 |
| | TGACGTACGGTCCTGTGAGCTTACATACAAgggagcACATGAGGATCACCCATGTgcgactcCCACAGTCACTGGGgagtcttcccTCTCTCTCGGGTCA | |
| | GGAGCCCCCCCCTGAACCCAGGATAACCCTCAAAGTCGGGGGGC | |
| PL13464 | CGCGGTTCTATCTAGTTACGCGTTAAACCAACTAGAAGAAGTTCATCTGTACCACCGGCAAACTGCCCGTGCCTTGGCCCACCCTCGTCACCACCC | 16,485 |
| | TGACGTACGGTCCTGTGAGCTTACATACAAgggagcACATGAGGATCACCCATGTgcgactcCCACAGTCACTGGGgagtcttccctctctctctctctctctctcg | |
| | ggagcACATGAGGATCACCCATGTgcgactcCCACAGTCACTGGGgagtcttccc | |
| PL13465 | CGCGGTTCTATCTAGTTACGCGTTAAACCAACTAGAAGAAGTTCATCTGTACCACCGGCAAACTGCCCGTGCCTTGGCCCACCCTCGTCACCACCC | 16,486 |
| | TGACGTACGGTCCTGTGAGCTTACATACAAgggagcACATGAGGATCACCCATGTgcgactcCCACAGTCACTGGGgagtcttccctctctctctctctctctctcg | |
| | ggagcACATGAGGATCACCCATGTgcgactcCCACAGTCACTGGGgagtcttcccTCTCTCTCGGGTCAGGAGCCCCCCCCTGAACCCAGGATAACCCTC | |
| | AAAGTCGGGGGGC | |
| PL13466 | CGCGGTTCTATCTAGTTACGCGTTAAACCAACTAGAAGAAGTTCATCTGTACCACCGGCAAACTGCCCGTGCCTTGGCCCACCCTCGTCACCACCC | 16,487 |
| | TGACGTACGGTCCTGTGAGCTTACATACAACTAACATAgcACATGAGGATCACCCATGTgc | |
| PL13467 | CGCGGTTCTATCTAGTTACGCGTTAAACCAACTAGAAGAAGTTCATCTGTACCACCGGCAAACTGCCCGTGCCTTGGCCCACCCTCGTCACCACCC | 16,488 |
| | TGACGTACGGTCCTGTGAGCTTACATACAACTAACATAgcACATGAGGATCACCCATGTgcTCTCTCTCGGGTCAGGAGCCCCCCCCTGAACCCAG | |
| | GATAACCCTCAAAGTCGGGGGGC | |
| PL13468 | CGCGGTTCTATCTAGTTACGCGTTAAACCAACTAGAAGAAGTTCATCTGTACCACCGGCAAACTGCCCGTGCCTTGGCCCACCCTCGTCACCACCC | 16,489 |
| | TGACGTACGGTCCTGTGAGCTTACATACAACTAACATAgggagcACATGAGGATCACCCATGTgcgactcCCACAGTCACTGGGgagtcttccc | |
| PL13469 | CGCGGTTCTATCTAGTTACGCGTTAAACCAACTAGAAGAAGTTCATCTGTACCACCGGCAAACTGCCCGTGCCTTGGCCCACCCTCGTCACCACCC | 16,490 |
| | TGACGTACGGTCCTGTGAGCTTACATACAACTAACATAgggagcACATGAGGATCACCCATGTgcgactcCCACAGTCACTGGGgagtcttcccTCTCTCT | |
| | CGGGTCAGGAGCCCCCCCCTGAACCCAGGATAACCCTCAAAGTCGGGGGGC | |
| PL13470 | CGCGGTTCTATCTAGTTACGCGTTAAACCAACTAGAAGAAGTTCATCTGTACCACCGGCAAACTGCCCGTGCCTTGGCCCACCCTCGTCACCACCC | 16,491 |
| | TGACGTACGGTCCTGTGAGCTTACATACAACTAACATAgggagcACATGAGGATCACCCATGTgcgactcCCACAGTCACTGGGgagtcttccctctctctct | |
| | ctctctctctcgggagcACATGAGGATCACCCATGTgcgactcCCACAGTCACTGGGgagtcttccc | |
| PL13471 | CGCGGTTCTATCTAGTTACGCGTTAAACCAACTAGAAGAAGTTCATCTGTACCACCGGCAAACTGCCCGTGCCTTGGCCCACCCTCGTCACCACCC | 16,492 |
| | TGACGTACGGTCCTGTGAGCTTACATACAACTAACATAgggagcACATGAGGATCACCCATGTgcgactcCCACAGTCACTGGGgagtcttccctctctctct | |
| | ctctctctctcgggagcACATGAGGATCACCCATGTgcgactcCCACAGTCACTGGGgagtcttcccTCTCTCTCGGGTCAGGAGCCCCCCCCTGAACCCAGG | |
| | ATAACCCTCAAAGTCGGGGGGC | |
| PL13472 | CAAGCTGCCCGTGCCCGTTTTAGAGCTAGAAATAGCAAGTTAAAATAAGGCTAGTCCGTTATCAACTTGAAAAAGTGGCACCGAGTCGGTGCGA | 16,493 |
| | CCACCCTGACGTACGGCGTGCAGACATACAAgcACATGAGGATCACCCATGTgc | |
| PL13473 | CAAGCTGCCCGTGCCCGTTTTAGAGCTAGAAATAGCAAGTTAAAATAAGGCTAGTCCGTTATCAACTTGAAAAAGTGGCACCGAGTCGGTGCGA | 16,494 |
| | CCACCCTGACGTACGGCGTGCAGACATACAAgcACATGAGGATCACCCATGTgcTCTCTCTCGGGTCAGGAGCCCCCCCCTGAACCCAGGATAACC | |
| | CTCAAAGTCGGGGGGC | |
| PL13474 | CAAGCTGCCCGTGCCCGTTTTAGAGCTAGAAATAGCAAGTTAAAATAAGGCTAGTCCGTTATCAACTTGAAAAAGTGGCACCGAGTCGGTGCGA | 16,495 |
| | CCACCCTGACGTACGGCGTGCAGACATACAAgggagcACATGAGGATCACCCATGTgcgactcCCACAGTCACTGGGgagtcttccc | |
| PL13475 | CAAGCTGCCCGTGCCCGTTTTAGAGCTAGAAATAGCAAGTTAAAATAAGGCTAGTCCGTTATCAACTTGAAAAAGTGGCACCGAGTCGGTGCGA | 16,496 |
| | CCACCCTGACGTACGGCGTGCAGACATACAAgggagcACATGAGGATCACCCATGTgcgactcCCACAGTCACTGGGgagtcttcccTCTCTCTCGGGTC | |
| | AGGAGCCCCCCCCTGAACCCAGGATAACCCTCAAAGTCGGGGGGC | |
| PL13476 | CAAGCTGCCCGTGCCCGTTTTAGAGCTAGAAATAGCAAGTTAAAATAAGGCTAGTCCGTTATCAACTTGAAAAAGTGGCACCGAGTCGGTGCGA | 16,497 |
| | CCACCCTGACGTACGGCGTGCAGACATACAAgggagcACATGAGGATCACCCATGTgcgactcCCACAGTCACTGGGgagtcttccctctctctctctctctctct | |
| | cgggagcACATGAGGATCACCCATGTgcgactcCCACAGTCACTGGGgagtcttccc | |
| PL13477 | CAAGCTGCCCGTGCCCGTTTTAGAGCTAGAAATAGCAAGTTAAAATAAGGCTAGTCCGTTATCAACTTGAAAAAGTGGCACCGAGTCGGTGCGA | 16,498 |
| | CCACCCTGACGTACGGCGTGCAGACATACAAgggagcACATGAGGATCACCCATGTgcgactcCCACAGTCACTGGGgagtcttccctctctctctctctctctct | |
| | cgggagcACATGAGGATCACCCATGTgcgactcCCACAGTCACTGGGgagtcttcccTCTCTCTCGGGTCAGGAGCCCCCCCCTGAACCCAGGATAACCC | |
| | TCAAAGTCGGGGGGC | |
| PL13478 | CAAGCTGCCCGTGCCCGTTTTAGAGCTAGAAATAGCAAGTTAAAATAAGGCTAGTCCGTTATCAACTTGAAAAAGTGGCACCGAGTCGGTGCGA | 16,499 |
| | CCACCCTGACGTACGGCGTGCAGACATACAACTAACATAgcACATGAGGATCACCCATGTgc | |
| PL13479 | CAAGCTGCCCGTGCCCGTTTTAGAGCTAGAAATAGCAAGTTAAAATAAGGCTAGTCCGTTATCAACTTGAAAAAGTGGCACCGAGTCGGTGCGA | 16,500 |
| | CCACCCTGACGTACGGCGTGCAGACATACAACTAACATAgcACATGAGGATCACCCATGTgcTCTCTCTCGGGTCAGGAGCCCCCCCCTGAACCCA | |
| | GGATAACCCTCAAAGTCGGGGGGC | |
| PL13480 | CAAGCTGCCCGTGCCCGTTTTAGAGCTAGAAATAGCAAGTTAAAATAAGGCTAGTCCGTTATCAACTTGAAAAAGTGGCACCGAGTCGGTGCGA | 16,501 |
| | CCACCCTGACGTACGGCGTGCAGACATACAACTAACATAgggagcACATGAGGATCACCCATGTgcgactcCCACAGTCACTGGGgagtcttccc | |
| PL13481 | CAAGCTGCCCGTGCCCGTTTTAGAGCTAGAAATAGCAAGTTAAAATAAGGCTAGTCCGTTATCAACTTGAAAAAGTGGCACCGAGTCGGTGCGA | 16,502 |
| | CCACCCTGACGTACGGCGTGCAGACATACAACTAACATAgggagcACATGAGGATCACCCATGTgcgactcCCACAGTCACTGGGgagtcttcccTCTCT | |
| | CTCGGGTCAGGAGCCCCCCCCTGAACCCAGGATAACCCTCAAAGTCGGGGGGC | |
| PL13482 | CAAGCTGCCCGTGCCCGTTTTAGAGCTAGAAATAGCAAGTTAAAATAAGGCTAGTCCGTTATCAACTTGAAAAAGTGGCACCGAGTCGGTGCGA | 16,503 |
| | CCACCCTGACGTACGGCGTGCAGACATACAACTAACATAgggagcACATGAGGATCACCCATGTgcgactcCCACAGTCACTGGGgagtcttccctctctct | |
| | ctctctctctctcgggagcACATGAGGATCACCCATGTgcgactcCCACAGTCACTGGGgagtcttccc | |
| PL13483 | CAAGCTGCCCGTGCCCGTTTTAGAGCTAGAAATAGCAAGTTAAAATAAGGCTAGTCCGTTATCAACTTGAAAAAGTGGCACCGAGTCGGTGCGA | 16,504 |
| | CCACCCTGACGTACGGCGTGCAGACATACAACTAACATAgggagcACATGAGGATCACCCATGTgcgactcCCACAGTCACTGGGgagtcttccctctctct | |
| | ctctctctctctcgggagcACATGAGGATCACCCATGTgcgactcCCACAGTCACTGGGgagtcttcccTCTCTCTCGGGTCAGGAGCCCCCCCCTGAACCCAG | |
| | GATAACCCTCAAAGTCGGGGGGC | |
| PL13484 | CAAGCTGCCCGTGCCCGTTTTAGAGCTAGAAATAGCAAGTTAAAATAAGGCTAGTCCGTTATCAACTTGAAAAAGTGGCACCGAGTCGGTGCGA | 16,505 |
| | CCACCCTGACGTACGGCGTGCAGTGCTTACATACAAgcACATGAGGATCACCCATGTgc | |
| PL13485 | CAAGCTGCCCGTGCCCGTTTTAGAGCTAGAAATAGCAAGTTAAAATAAGGCTAGTCCGTTATCAACTTGAAAAAGTGGCACCGAGTCGGTGCGA | 16,506 |
| | CCACCCTGACGTACGGCGTGCAGTGCTTACATACAAgcACATGAGGATCACCCATGTgcTCTCTCTCGGGTCAGGAGCCCCCCCCTGAACCCAGGA | |
| | TAACCCTCAAAGTCGGGGGGC | |
| PL13486 | CAAGCTGCCCGTGCCCGTTTTAGAGCTAGAAATAGCAAGTTAAAATAAGGCTAGTCCGTTATCAACTTGAAAAAGTGGCACCGAGTCGGTGCGA | 16,507 |
| | CCACCCTGACGTACGGCGTGCAGTGCTTACATACAAgggagcACATGAGGATCACCCATGTgcgactcCCACAGTCACTGGGgagtcttccc | |
| PL13487 | CAAGCTGCCCGTGCCCGTTTTAGAGCTAGAAATAGCAAGTTAAAATAAGGCTAGTCCGTTATCAACTTGAAAAAGTGGCACCGAGTCGGTGCGA | 16,508 |
| | CCACCCTGACGTACGGCGTGCAGTGCTTACATACAAgggagcACATGAGGATCACCCATGTgcgactcCCACAGTCACTGGGgagtcttcccTCTCTCTC | |
| | GGGTCAGGAGCCCCCCCCTGAACCCAGGATAACCCTCAAAGTCGGGGGGC | |
| PL13488 | CAAGCTGCCCGTGCCCGTTTTAGAGCTAGAAATAGCAAGTTAAAATAAGGCTAGTCCGTTATCAACTTGAAAAAGTGGCACCGAGTCGGTGCGA | 16,509 |
| | CCACCCTGACGTACGGCGTGCAGTGCTTACATACAAgggagcACATGAGGATCACCCATGTgcgactcCCACAGTCACTGGGgagtcttccctctctctctctc | |
| | tctctctcgggagcACATGAGGATCACCCATGTgcgactcCCACAGTCACTGGGgagtcttccc | |
| PL13489 | CAAGCTGCCCGTGCCCGTTTTAGAGCTAGAAATAGCAAGTTAAAATAAGGCTAGTCCGTTATCAACTTGAAAAAGTGGCACCGAGTCGGTGCGA | 16,510 |
| | CCACCCTGACGTACGGCGTGCAGTGCTTACATACAAgggagcACATGAGGATCACCCATGTgcgactcCCACAGTCACTGGGgagtcttccctctctctctctc | |
| | tctctctcgggagcACATGAGGATCACCCATGTgcgactcCCACAGTCACTGGGgagtcttcccTCTCTCTCGGGTCAGGAGCCCCCCCCTGAACCCAGGATA | |
| | ACCCTCAAAGTCGGGGGGC | |
| PL13490 | CAAGCTGCCCGTGCCCGTTTTAGAGCTAGAAATAGCAAGTTAAAATAAGGCTAGTCCGTTATCAACTTGAAAAAGTGGCACCGAGTCGGTGCGA | 16,511 |
| | CCACCCTGACGTACGGCGTGCAGTGCTTACATACAACTAACATAgcACATGAGGATCACCCATGTgc | |
| PL13491 | CAAGCTGCCCGTGCCCGTTTTAGAGCTAGAAATAGCAAGTTAAAATAAGGCTAGTCCGTTATCAACTTGAAAAAGTGGCACCGAGTCGGTGCGA | 16,512 |
| | CCACCCTGACGTACGGCGTGCAGTGCTTACATACAACTAACATAgcACATGAGGATCACCCATGTgcTCTCTCTCGGGTCAGGAGCCCCCCCCTGA | |
| | ACCCAGGATAACCCTCAAAGTCGGGGGGC | |
| PL13492 | CAAGCTGCCCGTGCCCGTTTTAGAGCTAGAAATAGCAAGTTAAAATAAGGCTAGTCCGTTATCAACTTGAAAAAGTGGCACCGAGTCGGTGCGA | 16,513 |
| | CCACCCTGACGTACGGCGTGCAGTGCTTACATACAACTAACATAgggagcACATGAGGATCACCCATGTgcgactcCCACAGTCACTGGGgagtcttccc | |
| PL13493 | CAAGCTGCCCGTGCCCGTTTTAGAGCTAGAAATAGCAAGTTAAAATAAGGCTAGTCCGTTATCAACTTGAAAAAGTGGCACCGAGTCGGTGCGA | 16,514 |
| | CCACCCTGACGTACGGCGTGCAGTGCTTACATACAACTAACATAgggagcACATGAGGATCACCCATGTgcgactcCCACAGTCACTGGGgagtcttccc | |
| | TCTCTCTCGGGTCAGGAGCCCCCCCCTGAACCCAGGATAACCCTCAAAGTCGGGGGGC | |
| PL13494 | CAAGCTGCCCGTGCCCGTTTTAGAGCTAGAAATAGCAAGTTAAAATAAGGCTAGTCCGTTATCAACTTGAAAAAGTGGCACCGAGTCGGTGCGA | 16,515 |
| | CCACCCTGACGTACGGCGTGCAGTGCTTACATACAACTAACATAgggagcACATGAGGATCACCCATGTgcgactcCCACAGTCACTGGGgagtcttccc | |
| | tctctctctctctctctctcgggagcACATGAGGATCACCCATGTgcgactcCCACAGTCACTGGGgagtcttccc | |
| PL13495 | CAAGCTGCCCGTGCCCGTTTTAGAGCTAGAAATAGCAAGTTAAAATAAGGCTAGTCCGTTATCAACTTGAAAAAGTGGCACCGAGTCGGTGCGA | 16,516 |
| | CCACCCTGACGTACGGCGTGCAGTGCTTACATACAACTAACATAgggagcACATGAGGATCACCCATGTgcgactcCCACAGTCACTGGGgagtcttccc | |
| | tctctctctctctctctctcgggagcACATGAGGATCACCCATGTgcgactcCCACAGTCACTGGGgagtcttcccTCTCTCTCGGGTCAGGAGCCCCCCCCTGAAC | |
| | CCAGGATAACCCTCAAAGTCGGGGGGC | |
| PL13496 | CAAGCTGCCCGTGCCCGTTTTAGAGCTAGAAATAGCAAGTTAAAATAAGGCTAGTCCGTTATCAACTTGAAAAAGTGGCACCGAGTCGGTGCGA | 16,517 |
| | CCACCCTGACGTACGGCGTGCAGTGCTTCGGCACATACAAgcACATGAGGATCACCCATGTgc | |
| PL13497 | CAAGCTGCCCGTGCCCGTTTTAGAGCTAGAAATAGCAAGTTAAAATAAGGCTAGTCCGTTATCAACTTGAAAAAGTGGCACCGAGTCGGTGCGA | 16,518 |
| | CCACCCTGACGTACGGCGTGCAGTGCTTCGGCACATACAAgcACATGAGGATCACCCATGTgcTCTCTCTCGGGTCAGGAGCCCCCCCCTGAACCC | |
| | AGGATAACCCTCAAAGTCGGGGGGC | |
| PL13498 | CAAGCTGCCCGTGCCCGTTTTAGAGCTAGAAATAGCAAGTTAAAATAAGGCTAGTCCGTTATCAACTTGAAAAAGTGGCACCGAGTCGGTGCGA | 16,519 |
| | CCACCCTGACGTACGGCGTGCAGTGCTTCGGCACATACAAgggagcACATGAGGATCACCCATGTgcgactcCCACAGTCACTGGGgagtcttccc | |
| PL13499 | CAAGCTGCCCGTGCCCGTTTTAGAGCTAGAAATAGCAAGTTAAAATAAGGCTAGTCCGTTATCAACTTGAAAAAGTGGCACCGAGTCGGTGCGA | 16,520 |
| | CCACCCTGACGTACGGCGTGCAGTGCTTCGGCACATACAAgggagcACATGAGGATCACCCATGTgcgactcCCACAGTCACTGGGgagtcttcccTCTC | |
| | TCTCGGGTCAGGAGCCCCCCCCTGAACCCAGGATAACCCTCAAAGTCGGGGGGC | |
| PL13500 | CAAGCTGCCCGTGCCCGTTTTAGAGCTAGAAATAGCAAGTTAAAATAAGGCTAGTCCGTTATCAACTTGAAAAAGTGGCACCGAGTCGGTGCGA | 16,521 |
| | CCACCCTGACGTACGGCGTGCAGTGCTTCGGCACATACAAgggagcACATGAGGATCACCCATGTgcgactcCCACAGTCACTGGGgagtcttccctctctc | |
| | tctctctctctctcgggagcACATGAGGATCACCCATGTgcgactcCCACAGTCACTGGGgagtcttccc | |
| PL13501 | CAAGCTGCCCGTGCCCGTTTTAGAGCTAGAAATAGCAAGTTAAAATAAGGCTAGTCCGTTATCAACTTGAAAAAGTGGCACCGAGTCGGTGCGA | 16,522 |
| | CCACCCTGACGTACGGCGTGCAGTGCTTCGGCACATACAAgggagcACATGAGGATCACCCATGTgcgactcCCACAGTCACTGGGgagtcttccctctctc | |
| | tctctctctctctcgggagcACATGAGGATCACCCATGTgcgactcCCACAGTCACTGGGgagtcttcccTCTCTCTCGGGTCAGGAGCCCCCCCCTGAACCCAG | |
| | GATAACCCTCAAAGTCGGGGGGC | |
| PL13502 | CAAGCTGCCCGTGCCCGTTTTAGAGCTAGAAATAGCAAGTTAAAATAAGGCTAGTCCGTTATCAACTTGAAAAAGTGGCACCGAGTCGGTGCGA | 16,523 |
| | CCACCCTGACGTACGGCGTGCAGTGCTTCGGCACATACAACTAACATAgcACATGAGGATCACCCATGTgc | |
| PL13503 | CAAGCTGCCCGTGCCCGTTTTAGAGCTAGAAATAGCAAGTTAAAATAAGGCTAGTCCGTTATCAACTTGAAAAAGTGGCACCGAGTCGGTGCGA | 16,524 |
| | CCACCCTGACGTACGGCGTGCAGTGCTTCGGCACATACAACTAACATAgcACATGAGGATCACCCATGTgcTCTCTCTCGGGTCAGGAGCCCCCCC | |
| | CTGAACCCAGGATAACCCTCAAAGTCGGGGGGC | |
| PL13504 | CAAGCTGCCCGTGCCCGTTTTAGAGCTAGAAATAGCAAGTTAAAATAAGGCTAGTCCGTTATCAACTTGAAAAAGTGGCACCGAGTCGGTGCGA | 16,525 |
| | CCACCCTGACGTACGGCGTGCAGTGCTTCGGCACATACAACTAACATAgggagcACATGAGGATCACCCATGTgcgactcCCACAGTCACTGGGgagt | |
| | cttccc | |
| PL13505 | CAAGCTGCCCGTGCCCGTTTTAGAGCTAGAAATAGCAAGTTAAAATAAGGCTAGTCCGTTATCAACTTGAAAAAGTGGCACCGAGTCGGTGCGA | 16,526 |
| | CCACCCTGACGTACGGCGTGCAGTGCTTCGGCACATACAACTAACATAgggagcACATGAGGATCACCCATGTgcgactcCCACAGTCACTGGGgagt | |
| | cttcccTCTCTCTCGGGTCAGGAGCCCCCCCCTGAACCCAGGATAACCCTCAAAGTCGGGGGGC | |
| PL13506 | CAAGCTGCCCGTGCCCGTTTTAGAGCTAGAAATAGCAAGTTAAAATAAGGCTAGTCCGTTATCAACTTGAAAAAGTGGCACCGAGTCGGTGCGA | 16,527 |
| | CCACCCTGACGTACGGCGTGCAGTGCTTCGGCACATACAACTAACATAgggagcACATGAGGATCACCCATGTgcgactcCCACAGTCACTGGGgagt | |
| | cttccctctctctctctctctctctcgggagcACATGAGGATCACCCATGTgcgactcCCACAGTCACTGGGgagtcttccc | |
| PL13507 | CAAGCTGCCCGTGCCCGTTTTAGAGCTAGAAATAGCAAGTTAAAATAAGGCTAGTCCGTTATCAACTTGAAAAAGTGGCACCGAGTCGGTGCGA | 16,528 |
| | CCACCCTGACGTACGGCGTGCAGTGCTTCGGCACATACAACTAACATAgggagcACATGAGGATCACCCATGTgcgactcCCACAGTCACTGGGgagt | |
| | cttccctctctctctctctctctctcgggagcACATGAGGATCACCCATGTgcgactcCCACAGTCACTGGGgagtcttcccTCTCTCTCGGGTCAGGAGCCCCCCCCT | |
| | GAACCCAGGATAACCCTCAAAGTCGGGGGGC | |
| PL13508 | CAAGCTGCCCGTGCCCGTTTTAGAGCTAGAAATAGCAAGTTAAAATAAGGCTAGTCCGTTATCAACTTGAAAAAGTGGCACCGAGTCGGTGCGA | 16,529 |
| | CCACCCTGACGTACGGTCCTGTGAGCTTACATACAAgcACATGAGGATCACCCATGTgc | |
| PL13509 | CAAGCTGCCCGTGCCCGTTTTAGAGCTAGAAATAGCAAGTTAAAATAAGGCTAGTCCGTTATCAACTTGAAAAAGTGGCACCGAGTCGGTGCGA | 16,530 |
| | CCACCCTGACGTACGGTCCTGTGAGCTTACATACAAgcACATGAGGATCACCCATGTgcTCTCTCTCGGGTCAGGAGCCCCCCCCTGAACCCAGGA | |
| | TAACCCTCAAAGTCGGGGGGC | |
| PL13510 | CAAGCTGCCCGTGCCCGTTTTAGAGCTAGAAATAGCAAGTTAAAATAAGGCTAGTCCGTTATCAACTTGAAAAAGTGGCACCGAGTCGGTGCGA | 16,531 |
| | CCACCCTGACGTACGGTCCTGTGAGCTTACATACAAgggagcACATGAGGATCACCCATGTgcgactcCCACAGTCACTGGGgagtcttccc | |
| PL13511 | CAAGCTGCCCGTGCCCGTTTTAGAGCTAGAAATAGCAAGTTAAAATAAGGCTAGTCCGTTATCAACTTGAAAAAGTGGCACCGAGTCGGTGCGA | 16,532 |
| | CCACCCTGACGTACGGTCCTGTGAGCTTACATACAAgggagcACATGAGGATCACCCATGTgcgactcCCACAGTCACTGGGgagtcttcccTCTCTCTCG | |
| | GGTCAGGAGCCCCCCCCTGAACCCAGGATAACCCTCAAAGTCGGGGGGC | |
| PL13512 | CAAGCTGCCCGTGCCCGTTTTAGAGCTAGAAATAGCAAGTTAAAATAAGGCTAGTCCGTTATCAACTTGAAAAAGTGGCACCGAGTCGGTGCGA | 16,533 |
| | CCACCCTGACGTACGGTCCTGTGAGCTTACATACAAgggagcACATGAGGATCACCCATGTgcgactcCCACAGTCACTGGGgagtcttccctctctctctctc | |
| | tctctctcgggagcACATGAGGATCACCCATGTgcgactcCCACAGTCACTGGGgagtcttccc | |
| PL13513 | CAAGCTGCCCGTGCCCGTTTTAGAGCTAGAAATAGCAAGTTAAAATAAGGCTAGTCCGTTATCAACTTGAAAAAGTGGCACCGAGTCGGTGCGA | 16,534 |
| | CCACCCTGACGTACGGTCCTGTGAGCTTACATACAAgggagcACATGAGGATCACCCATGTgcgactcCCACAGTCACTGGGgagtcttccctctctctctctc | |
| | tctctctcgggagcACATGAGGATCACCCATGTgcgactcCCACAGTCACTGGGgagtcttcccTCTCTCTCGGGTCAGGAGCCCCCCCCTGAACCCAGGATA | |
| | ACCCTCAAAGTCGGGGGGC | |
| PL13514 | CAAGCTGCCCGTGCCCGTTTTAGAGCTAGAAATAGCAAGTTAAAATAAGGCTAGTCCGTTATCAACTTGAAAAAGTGGCACCGAGTCGGTGCGA | 16,535 |
| | CCACCCTGACGTACGGTCCTGTGAGCTTACATACAACTAACATAgcACATGAGGATCACCCATGTgc | |
| PL13515 | CAAGCTGCCCGTGCCCGTTTTAGAGCTAGAAATAGCAAGTTAAAATAAGGCTAGTCCGTTATCAACTTGAAAAAGTGGCACCGAGTCGGTGCGA | 16,536 |
| | CCACCCTGACGTACGGTCCTGTGAGCTTACATACAACTAACATAgcACATGAGGATCACCCATGTgcTCTCTCTCGGGTCAGGAGCCCCCCCCTGA | |
| | ACCCAGGATAACCCTCAAAGTCGGGGGGC | |
| PL13516 | CAAGCTGCCCGTGCCCGTTTTAGAGCTAGAAATAGCAAGTTAAAATAAGGCTAGTCCGTTATCAACTTGAAAAAGTGGCACCGAGTCGGTGCGA | 16,537 |
| | CCACCCTGACGTACGGTCCTGTGAGCTTACATACAACTAACATAgggagcACATGAGGATCACCCATGTgcgactcCCACAGTCACTGGGgagtcttccc | |
| PL13517 | CAAGCTGCCCGTGCCCGTTTTAGAGCTAGAAATAGCAAGTTAAAATAAGGCTAGTCCGTTATCAACTTGAAAAAGTGGCACCGAGTCGGTGCGA | 16,538 |
| | CCACCCTGACGTACGGTCCTGTGAGCTTACATACAACTAACATAgggagcACATGAGGATCACCCATGTgcgactcCCACAGTCACTGGGgagtcttccc | |
| | TCTCTCTCGGGTCAGGAGCCCCCCCCTGAACCCAGGATAACCCTCAAAGTCGGGGGGC | |
| PL13519 | CAAGCTGCCCGTGCCCGTTTTAGAGCTAGAAATAGCAAGTTAAAATAAGGCTAGTCCGTTATCAACTTGAAAAAGTGGCACCGAGTCGGTGCGA | 16,540 |
| | CCACCCTGACGTACGGTCCTGTGAGCTTACATACAACTAACATAgggagcACATGAGGATCACCCATGTgcgactcCCACAGTCACTGGGgagtcttccct | |
| | ctctctctctctctctctcgggagcACATGAGGATCACCCATGTgcgactcCCACAGTCACTGGGgagtcttcccTCTCTCTCGGGTCAGGAGCCCCCCCCTGAAC | |
| | CCAGGATAACCCTCAAAGTCGGGGGGC | |
| PL13520 | AGGGCGATGCCACCTAGTITTAGAGCTAGAAATAGCAAGTTAAAATAAGGCTAGTCCGTTATCAACTTGAAAAAGTGGCACCGAGTCGGTGCGA | 16,541 |
| | AGTTCATCTGTACCACCGGCAAACTGCCCGTGCCTTGGCCCACCCTCGTCACCACCCTGACGTACGGCGTGCAGACATACAAgcACATGAGGATC | |
| | ACCCATGTgc | |
| PL13521 | AGGGCGATGCCACCTAGTTTTAGAGCTAGAAATAGCAAGTTAAAATAAGGCTAGTCCGTTATCAACTTGAAAAAGTGGCACCGAGTCGGTGCGA | 16,542 |
| | AGTTCATCTGTACCACCGGCAAACTGCCCGTGCCTTGGCCCACCCTCGTCACCACCCTGACGTACGGCGTGCAGACATACAAgcACATGAGGATC | |
| | ACCCATGTgcTCTCTCTCGGGTCAGGAGCCCCCCCCTGAACCCAGGATAACCCTCAAAGTCGGGGGGC | |
| PL13522 | AGGGCGATGCCACCTAGTTTTAGAGCTAGAAATAGCAAGTTAAAATAAGGCTAGTCCGTTATCAACTTGAAAAAGTGGCACCGAGTCGGTGCGA | 16,543 |
| | AGTTCATCTGTACCACCGGCAAACTGCCCGTGCCTTGGCCCACCCTCGTCACCACCCTGACGTACGGCGTGCAGACATACAAgggagcACATGAGG | |
| | ATCACCCATGTgcgactcCCACAGTCACTGGGgagtcttccc | |
| PL13523 | AGGGCGATGCCACCTAGTITTAGAGCTAGAAATAGCAAGTTAAAATAAGGCTAGTCCGTTATCAACTTGAAAAAGTGGCACCGAGTCGGTGCGA | 16,544 |
| | AGTTCATCTGTACCACCGGCAAACTGCCCGTGCCTTGGCCCACCCTCGTCACCACCCTGACGTACGGCGTGCAGACATACAAgggagcACATGAGG | |
| | ATCACCCATGTgcgactcCCACAGTCACTGGGgagtcttcccTCTCTCTCGGGTCAGGAGCCCCCCCCTGAACCCAGGATAACCCTCAAAGTCGGGGGG | |
| | C | |
| PL13524 | AGGGCGATGCCACCTAGTTTTAGAGCTAGAAATAGCAAGTTAAAATAAGGCTAGTCCGTTATCAACTTGAAAAAGTGGCACCGAGTCGGTGCGA | 16,545 |
| | AGTTCATCTGTACCACCGGCAAACTGCCCGTGCCTTGGCCCACCCTCGTCACCACCCTGACGTACGGCGTGCAGACATACAAgggagcACATGAGG | |
| | ATCACCCATGTgcgactcCCACAGTCACTGGGgagtcttccctctctctctctctctctctcgggagcACATGAGGATCACCCATGTgcgactcCCACAGTCACTGGG | |
| | gagtcttccc | |
| PL13525 | AGGGCGATGCCACCTAGTTTTAGAGCTAGAAATAGCAAGTTAAAATAAGGCTAGTCCGTTATCAACTTGAAAAAGTGGCACCGAGTCGGTGCGA | 16,546 |
| | AGTTCATCTGTACCACCGGCAAACTGCCCGTGCCTTGGCCCACCCTCGTCACCACCCTGACGTACGGCGTGCAGACATACAAgggagcACATGAGG | |
| | ATCACCCATGTgcgactcCCACAGTCACTGGGgagtcttccctctctctctctctctctctcgggagcACATGAGGATCACCCATGTgcgactcCCACAGTCACTGGG | |
| | gagtcttcccTCTCTCTCGGGTCAGGAGCCCCCCCCTGAACCCAGGATAACCCTCAAAGTCGGGGGGC | |
| PL13526 | AGGGCGATGCCACCTAGTTTTAGAGCTAGAAATAGCAAGTTAAAATAAGGCTAGTCCGTTATCAACTTGAAAAAGTGGCACCGAGTCGGTGCGA | 16,547 |
| | AGTTCATCTGTACCACCGGCAAACTGCCCGTGCCTTGGCCCACCCTCGTCACCACCCTGACGTACGGCGTGCAGACATACAACTAACATAgcACAT | |
| | GAGGATCACCCATGTgc | |
| PL13527 | AGGGCGATGCCACCTAGTTTTAGAGCTAGAAATAGCAAGTTAAAATAAGGCTAGTCCGTTATCAACTTGAAAAAGTGGCACCGAGTCGGTGCGA | 16,548 |
| | AGTTCATCTGTACCACCGGCAAACTGCCCGTGCCTTGGCCCACCCTCGTCACCACCCTGACGTACGGCGTGCAGACATACAACTAACATAgcACAT | |
| | GAGGATCACCCATGTgcTCTCTCTCGGGTCAGGAGCCCCCCCCTGAACCCAGGATAACCCTCAAAGTCGGGGGGC | |
| PL13528 | AGGGCGATGCCACCTAGTTTTAGAGCTAGAAATAGCAAGTTAAAATAAGGCTAGTCCGTTATCAACTTGAAAAAGTGGCACCGAGTCGGTGCGA | 16,549 |
| | AGTTCATCTGTACCACCGGCAAACTGCCCGTGCCTTGGCCCACCCTCGTCACCACCCTGACGTACGGCGTGCAGACATACAACTAACATAgggagc | |
| | ACATGAGGATCACCCATGTgcgactcCCACAGTCACTGGGgagtcttccc | |
| PL13529 | AGGGCGATGCCACCTAGTTTTAGAGCTAGAAATAGCAAGTTAAAATAAGGCTAGTCCGTTATCAACTTGAAAAAGTGGCACCGAGTCGGTGCGA | 16,550 |
| | AGTTCATCTGTACCACCGGCAAACTGCCCGTGCCTTGGCCCACCCTCGTCACCACCCTGACGTACGGCGTGCAGACATACAACTAACATAgggagc | |
| | ACATGAGGATCACCCATGTgcgactcCCACAGTCACTGGGgagtcttcccTCTCTCTCGGGTCAGGAGCCCCCCCCTGAACCCAGGATAACCCTCAAAG | |
| | TCGGGGGGC | |
| PL13530 | AGGGCGATGCCACCTAGTTTTAGAGCTAGAAATAGCAAGTTAAAATAAGGCTAGTCCGTTATCAACTTGAAAAAGTGGCACCGAGTCGGTGCGA | 16,551 |
| | AGTTCATCTGTACCACCGGCAAACTGCCCGTGCCTTGGCCCACCCTCGTCACCACCCTGACGTACGGCGTGCAGACATACAACTAACATAgggagc | |
| | ACATGAGGATCACCCATGTgcgactcCCACAGTCACTGGGgagtcttccctctctctctctctctctctcgggagcACATGAGGATCACCCATGTgcgactcCCACAG | |
| | TCACTGGGgagtcttccc | |
| PL13532 | AGGGCGATGCCACCTAGTTTTAGAGCTAGAAATAGCAAGTTAAAATAAGGCTAGTCCGTTATCAACTTGAAAAAGTGGCACCGAGTCGGTGCGA | 16,553 |
| | AGTTCATCTGTACCACCGGCAAACTGCCCGTGCCTTGGCCCACCCTCGTCACCACCCTGACGTACGGCGTGCAGTGCTTACATACAAgcACATGAG | |
| | GATCACCCATGTgc | |
| PL13533 | AGGGCGATGCCACCTAGTTTTAGAGCTAGAAATAGCAAGTTAAAATAAGGCTAGTCCGTTATCAACTTGAAAAAGTGGCACCGAGTCGGTGCGA | 16,554 |
| | AGTTCATCTGTACCACCGGCAAACTGCCCGTGCCTTGGCCCACCCTCGTCACCACCCTGACGTACGGCGTGCAGTGCTTACATACAAgcACATGAG | |
| | GATCACCCATGTgcTCTCTCTCGGGTCAGGAGCCCCCCCCTGAACCCAGGATAACCCTCAAAGTCGGGGGGC | |
| PL13534 | AGGGCGATGCCACCTAGTTTTAGAGCTAGAAATAGCAAGTTAAAATAAGGCTAGTCCGTTATCAACTTGAAAAAGTGGCACCGAGTCGGTGCGA | 16,555 |
| | AGTTCATCTGTACCACCGGCAAACTGCCCGTGCCTTGGCCCACCCTCGTCACCACCCTGACGTACGGCGTGCAGTGCTTACATACAAgggagcACAT | |
| | GAGGATCACCCATGTgcgactcCCACAGTCACTGGGgagtcttccc | |
| PL13535 | AGGGCGATGCCACCTAGTTTTAGAGCTAGAAATAGCAAGTTAAAATAAGGCTAGTCCGTTATCAACTTGAAAAAGTGGCACCGAGTCGGTGCGA | 16,556 |
| | AGTTCATCTGTACCACCGGCAAACTGCCCGTGCCTTGGCCCACCCTCGTCACCACCCTGACGTACGGCGTGCAGTGCTTACATACAAgggagcACAT | |
| | GAGGATCACCCATGTgcgactcCCACAGTCACTGGGgagtcttcccTCTCTCTCGGGTCAGGAGCCCCCCCCTGAACCCAGGATAACCCTCAAAGTCGG | |
| | GGGGC | |
| PL13536 | AGGGCGATGCCACCTAGTTTTAGAGCTAGAAATAGCAAGTTAAAATAAGGCTAGTCCGTTATCAACTTGAAAAAGTGGCACCGAGTCGGTGCGA | 16,557 |
| | AGTTCATCTGTACCACCGGCAAACTGCCCGTGCCTTGGCCCACCCTCGTCACCACCCTGACGTACGGCGTGCAGTGCTTACATACAAgggagcACAT | |
| | GAGGATCACCCATGTgcgactcCCACAGTCACTGGGgagtcttccctctctctctctctctctctcgggagcACATGAGGATCACCCATGTgcgactcCCACAGTCAC | |
| | TGGGgagtcttccc | |
| PL13537 | AGGGCGATGCCACCTAGTTTTAGAGCTAGAAATAGCAAGTTAAAATAAGGCTAGTCCGTTATCAACTTGAAAAAGTGGCACCGAGTCGGTGCGA | 16,558 |
| | AGTTCATCTGTACCACCGGCAAACTGCCCGTGCCTTGGCCCACCCTCGTCACCACCCTGACGTACGGCGTGCAGTGCTTACATACAAgggagcACAT | |
| | GAGGATCACCCATGTgcgactcCCACAGTCACTGGGgagtcttccctctctctctctctctctctcgggagcACATGAGGATCACCCATGTgcgactcCCACAGTCAC | |
| | TGGGgagtcttcccTCTCTCTCGGGTCAGGAGCCCCCCCCTGAACCCAGGATAACCCTCAAAGTCGGGGGGC | |
| PL13538 | AGGGCGATGCCACCTAGTITTAGAGCTAGAAATAGCAAGTTAAAATAAGGCTAGTCCGTTATCAACTTGAAAAAGTGGCACCGAGTCGGTGCGA | 16,559 |
| | AGTTCATCTGTACCACCGGCAAACTGCCCGTGCCTTGGCCCACCCTCGTCACCACCCTGACGTACGGCGTGCAGTGCTTACATACAACTAACATAg | |
| | cACATGAGGATCACCCATGTgc | |
| PL13539 | AGGGCGATGCCACCTAGTTTTAGAGCTAGAAATAGCAAGTTAAAATAAGGCTAGTCCGTTATCAACTTGAAAAAGTGGCACCGAGTCGGTGCGA | 16,560 |
| | AGTTCATCTGTACCACCGGCAAACTGCCCGTGCCTTGGCCCACCCTCGTCACCACCCTGACGTACGGCGTGCAGTGCTTACATACAACTAACATAg | |
| | CACATGAGGATCACCCATGTgcTCTCTCTCGGGTCAGGAGCCCCCCCCTGAACCCAGGATAACCCTCAAAGTCGGGGGGC | |
| PL13540 | AGGGCGATGCCACCTAGTTTTAGAGCTAGAAATAGCAAGTTAAAATAAGGCTAGTCCGTTATCAACTTGAAAAAGTGGCACCGAGTCGGTGCGA | 16,561 |
| | AGTTCATCTGTACCACCGGCAAACTGCCCGTGCCTTGGCCCACCCTCGTCACCACCCTGACGTACGGCGTGCAGTGCTTACATACAACTAACATAg | |
| | ggagcACATGAGGATCACCCATGTgcgactcCCACAGTCACTGGGgagtcttccc | |
| PL13541 | AGGGCGATGCCACCTAGTITTAGAGCTAGAAATAGCAAGTTAAAATAAGGCTAGTCCGTTATCAACTTGAAAAAGTGGCACCGAGTCGGTGCGA | 16,562 |
| | AGTTCATCTGTACCACCGGCAAACTGCCCGTGCCTTGGCCCACCCTCGTCACCACCCTGACGTACGGCGTGCAGTGCTTACATACAACTAACATAg | |
| | ggagcACATGAGGATCACCCATGTgcgactcCCACAGTCACTGGGgagtcttcccTCTCTCTCGGGTCAGGAGCCCCCCCCTGAACCCAGGATAACCCTC | |
| | AAAGTCGGGGGGC | |
| PL13542 | AGGGCGATGCCACCTAGTITTAGAGCTAGAAATAGCAAGTTAAAATAAGGCTAGTCCGTTATCAACTTGAAAAAGTGGCACCGAGTCGGTGCGA | 16,563 |
| | AGTTCATCTGTACCACCGGCAAACTGCCCGTGCCTTGGCCCACCCTCGTCACCACCCTGACGTACGGCGTGCAGTGCTTACATACAACTAACATAg | |
| | ggagcACATGAGGATCACCCATGTgcgactcCCACAGTCACTGGGgagtcttccctctctctctctctctctctcgggagcACATGAGGATCACCCATGTgcgactcCC | |
| | ACAGTCACTGGGgagtcttccc | |
| PL13543 | AGGGCGATGCCACCTAGTTTTAGAGCTAGAAATAGCAAGTTAAAATAAGGCTAGTCCGTTATCAACTTGAAAAAGTGGCACCGAGTCGGTGCGA | 16,564 |
| | AGTTCATCTGTACCACCGGCAAACTGCCCGTGCCTTGGCCCACCCTCGTCACCACCCTGACGTACGGCGTGCAGTGCTTACATACAACTAACATAg | |
| | ggagcACATGAGGATCACCCATGTgcgactcCCACAGTCACTGGGgagtcttccctctctctctctctctctctcgggagcACATGAGGATCACCCATGTgcgactcCC | |
| | ACAGTCACTGGGgagtcttcccTCTCTCTCGGGTCAGGAGCCCCCCCCTGAACCCAGGATAACCCTCAAAGTCGGGGGGC | |
| PL13544 | AGGGCGATGCCACCTAGTTTTAGAGCTAGAAATAGCAAGTTAAAATAAGGCTAGTCCGTTATCAACTTGAAAAAGTGGCACCGAGTCGGTGCGA | 16,565 |
| | AGTTCATCTGTACCACCGGCAAACTGCCCGTGCCTTGGCCCACCCTCGTCACCACCCTGACGTACGGCGTGCAGTGCTTCGGCACATACAAgcACA | |
| | TGAGGATCACCCATGTgc | |
| PL13545 | AGGGCGATGCCACCTAGTTTTAGAGCTAGAAATAGCAAGTTAAAATAAGGCTAGTCCGTTATCAACTTGAAAAAGTGGCACCGAGTCGGTGCGA | 16,566 |
| | AGTTCATCTGTACCACCGGCAAACTGCCCGTGCCTTGGCCCACCCTCGTCACCACCCTGACGTACGGCGTGCAGTGCTTCGGCACATACAAgcACA | |
| | TGAGGATCACCCATGTgcTCTCTCTCGGGTCAGGAGCCCCCCCCTGAACCCAGGATAACCCTCAAAGTCGGGGGGC | |
| PL13546 | AGGGCGATGCCACCTAGTTTTAGAGCTAGAAATAGCAAGTTAAAATAAGGCTAGTCCGTTATCAACTTGAAAAAGTGGCACCGAGTCGGTGCGA | 16,567 |
| | AGTTCATCTGTACCACCGGCAAACTGCCCGTGCCTTGGCCCACCCTCGTCACCACCCTGACGTACGGCGTGCAGTGCTTCGGCACATACAAgggag | |
| | CACATGAGGATCACCCATGTgcgactcCCACAGTCACTGGGgagtcttccc | |
| PL13547 | AGGGCGATGCCACCTAGTITTAGAGCTAGAAATAGCAAGTTAAAATAAGGCTAGTCCGTTATCAACTTGAAAAAGTGGCACCGAGTCGGTGCGA | 16,568 |
| | AGTTCATCTGTACCACCGGCAAACTGCCCGTGCCTTGGCCCACCCTCGTCACCACCCTGACGTACGGCGTGCAGTGCTTCGGCACATACAAgggag | |
| | CACATGAGGATCACCCATGTgcgactcCCACAGTCACTGGGgagtcttcccTCTCTCTCGGGTCAGGAGCCCCCCCCTGAACCCAGGATAACCCTCAAA | |
| | GTCGGGGGGC | |
| PL13548 | AGGGCGATGCCACCTAGTTTTAGAGCTAGAAATAGCAAGTTAAAATAAGGCTAGTCCGTTATCAACTTGAAAAAGTGGCACCGAGTCGGTGCGA | 16,569 |
| | AGTTCATCTGTACCACCGGCAAACTGCCCGTGCCTTGGCCCACCCTCGTCACCACCCTGACGTACGGCGTGCAGTGCTTCGGCACATACAAgggag | |
| | CACATGAGGATCACCCATGTgcgactcCCACAGTCACTGGGgagtcttccctctctctctctctctctctcgggagcACATGAGGATCACCCATGTgcgactcCCACA | |
| | GTCACTGGGgagtcttccc | |
| PL13549 | AGGGCGATGCCACCTAGTTTTAGAGCTAGAAATAGCAAGTTAAAATAAGGCTAGTCCGTTATCAACTTGAAAAAGTGGCACCGAGTCGGTGCGA | 16,570 |
| | AGTTCATCTGTACCACCGGCAAACTGCCCGTGCCTTGGCCCACCCTCGTCACCACCCTGACGTACGGCGTGCAGTGCTTCGGCACATACAAgggag | |
| | cACATGAGGATCACCCATGTgcgactcCCACAGTCACTGGGgagtcttccctctctctctctctctctctcgggagcACATGAGGATCACCCATGTgcgactcCCACA | |
| | GTCACTGGGgagtcttcccTCTCTCTCGGGTCAGGAGCCCCCCCCTGAACCCAGGATAACCCTCAAAGTCGGGGGGC | |
| PL13550 | AGGGCGATGCCACCTAGTITTAGAGCTAGAAATAGCAAGTTAAAATAAGGCTAGTCCGTTATCAACTTGAAAAAGTGGCACCGAGTCGGTGCGA | 16,571 |
| | AGTTCATCTGTACCACCGGCAAACTGCCCGTGCCTTGGCCCACCCTCGTCACCACCCTGACGTACGGCGTGCAGTGCTTCGGCACATACAACTAAC | |
| | ATAgcACATGAGGATCACCCATGTgc | |
| PL13551 | AGGGCGATGCCACCTAGTTTTAGAGCTAGAAATAGCAAGTTAAAATAAGGCTAGTCCGTTATCAACTTGAAAAAGTGGCACCGAGTCGGTGCGA | 16,572 |
| | AGTTCATCTGTACCACCGGCAAACTGCCCGTGCCTTGGCCCACCCTCGTCACCACCCTGACGTACGGCGTGCAGTGCTTCGGCACATACAACTAAC | |
| | ATAgcACATGAGGATCACCCATGTgcTCTCTCTCGGGTCAGGAGCCCCCCCCTGAACCCAGGATAACCCTCAAAGTCGGGGGGC | |
| PL13552 | AGGGCGATGCCACCTAGTTTTAGAGCTAGAAATAGCAAGTTAAAATAAGGCTAGTCCGTTATCAACTTGAAAAAGTGGCACCGAGTCGGTGCGA | 16,573 |
| | AGTTCATCTGTACCACCGGCAAACTGCCCGTGCCTTGGCCCACCCTCGTCACCACCCTGACGTACGGCGTGCAGTGCTTCGGCACATACAACTAAC | |
| | ATAgggagcACATGAGGATCACCCATGTgcgactcCCACAGTCACTGGGgagtcttccc | |
| PL13553 | AGGGCGATGCCACCTAGTTTTAGAGCTAGAAATAGCAAGTTAAAATAAGGCTAGTCCGTTATCAACTTGAAAAAGTGGCACCGAGTCGGTGCGA | 16,574 |
| | AGTTCATCTGTACCACCGGCAAACTGCCCGTGCCTTGGCCCACCCTCGTCACCACCCTGACGTACGGCGTGCAGTGCTTCGGCACATACAACTAAC | |
| | ATAgggagcACATGAGGATCACCCATGTgcgactcCCACAGTCACTGGGgagtcttcccTCTCTCTCGGGTCAGGAGCCCCCCCCTGAACCCAGGATAAC | |
| | CCTCAAAGTCGGGGGGC | |
| PL13554 | AGGGCGATGCCACCTAGTTTTAGAGCTAGAAATAGCAAGTTAAAATAAGGCTAGTCCGTTATCAACTTGAAAAAGTGGCACCGAGTCGGTGCGA | 16,575 |
| | AGTTCATCTGTACCACCGGCAAACTGCCCGTGCCTTGGCCCACCCTCGTCACCACCCTGACGTACGGCGTGCAGTGCTTCGGCACATACAACTAAC | |
| | ATAgggagcACATGAGGATCACCCATGTgcgactcCCACAGTCACTGGGgagtcttccctctctctctctctctctctcgggagcACATGAGGATCACCCATGTgcga | |
| | ctcCCACAGTCACTGGGgagtcttccc | |
| PL13555 | AGGGCGATGCCACCTAGTTTTAGAGCTAGAAATAGCAAGTTAAAATAAGGCTAGTCCGTTATCAACTTGAAAAAGTGGCACCGAGTCGGTGCGA | 16,576 |
| | AGTTCATCTGTACCACCGGCAAACTGCCCGTGCCTTGGCCCACCCTCGTCACCACCCTGACGTACGGCGTGCAGTGCTTCGGCACATACAACTAAC | |
| | ATAgggagcACATGAGGATCACCCATGTgcgactcCCACAGTCACTGGGgagtcttccctctctctctctctctctctcgggagcACATGAGGATCACCCATGTgcga | |
| | ctcCCACAGTCACTGGGgagtcttcccTCTCTCTCGGGTCAGGAGCCCCCCCCTGAACCCAGGATAACCCTCAAAGTCGGGGGGC | |
| PL13556 | AGGGCGATGCCACCTAGTTTTAGAGCTAGAAATAGCAAGTTAAAATAAGGCTAGTCCGTTATCAACTTGAAAAAGTGGCACCGAGTCGGTGCGA | 16,577 |
| | AGTTCATCTGTACCACCGGCAAACTGCCCGTGCCTTGGCCCACCCTCGTCACCACCCTGACGTACGGTCCTGTGAGCTTACATACAAgcACATGAG | |
| | GATCACCCATGTgc | |
| PL13557 | AGGGCGATGCCACCTAGTTTTAGAGCTAGAAATAGCAAGTTAAAATAAGGCTAGTCCGTTATCAACTTGAAAAAGTGGCACCGAGTCGGTGCGA | 16,578 |
| | AGTTCATCTGTACCACCGGCAAACTGCCCGTGCCTTGGCCCACCCTCGTCACCACCCTGACGTACGGTCCTGTGAGCTTACATACAAgcACATGAG | |
| | GATCACCCATGTgcTCTCTCTCGGGTCAGGAGCCCCCCCCTGAACCCAGGATAACCCTCAAAGTCGGGGGGC | |
| PL13558 | AGGGCGATGCCACCTAGTITTAGAGCTAGAAATAGCAAGTTAAAATAAGGCTAGTCCGTTATCAACTTGAAAAAGTGGCACCGAGTCGGTGCGA | 16,579 |
| | AGTTCATCTGTACCACCGGCAAACTGCCCGTGCCTTGGCCCACCCTCGTCACCACCCTGACGTACGGTCCTGTGAGCTTACATACAAgggagcACAT | |
| | GAGGATCACCCATGTgcgactcCCACAGTCACTGGGgagtcttccc | |
| PL13559 | AGGGCGATGCCACCTAGTTTTAGAGCTAGAAATAGCAAGTTAAAATAAGGCTAGTCCGTTATCAACTTGAAAAAGTGGCACCGAGTCGGTGCGA | 16,580 |
| | AGTTCATCTGTACCACCGGCAAACTGCCCGTGCCTTGGCCCACCCTCGTCACCACCCTGACGTACGGTCCTGTGAGCTTACATACAAgggagcACAT | |
| | GAGGATCACCCATGTgcgactcCCACAGTCACTGGGgagtcttcccTCTCTCTCGGGTCAGGAGCCCCCCCCTGAACCCAGGATAACCCTCAAAGTCGG | |
| | GGGGC | |
| PL13560 | AGGGCGATGCCACCTAGTTTTAGAGCTAGAAATAGCAAGTTAAAATAAGGCTAGTCCGTTATCAACTTGAAAAAGTGGCACCGAGTCGGTGCGA | 16,581 |
| | AGTTCATCTGTACCACCGGCAAACTGCCCGTGCCTTGGCCCACCCTCGTCACCACCCTGACGTACGGTCCTGTGAGCTTACATACAAgggagcACAT | |
| | GAGGATCACCCATGTgcgactcCCACAGTCACTGGGgagtcttccctctctctctctctctctctcgggagcACATGAGGATCACCCATGTgcgactcCCACAGTCAC | |
| | TGGGgagtcttccc | |
| PL13561 | AGGGCGATGCCACCTAGTTTTAGAGCTAGAAATAGCAAGTTAAAATAAGGCTAGTCCGTTATCAACTTGAAAAAGTGGCACCGAGTCGGTGCGA | 16,582 |
| | AGTTCATCTGTACCACCGGCAAACTGCCCGTGCCTTGGCCCACCCTCGTCACCACCCTGACGTACGGTCCTGTGAGCTTACATACAAgggagcACAT | |
| | GAGGATCACCCATGTgcgactcCCACAGTCACTGGGgagtcttccctctctctctctctctctctcgggagcACATGAGGATCACCCATGTgcgactcCCACAGTCAC | |
| | TGGGgagtcttcccTCTCTCTCGGGTCAGGAGCCCCCCCCTGAACCCAGGATAACCCTCAAAGTCGGGGGGC | |
| PL13562 | AGGGCGATGCCACCTAGTITTAGAGCTAGAAATAGCAAGTTAAAATAAGGCTAGTCCGTTATCAACTTGAAAAAGTGGCACCGAGTCGGTGCGA | 16,583 |
| | AGTTCATCTGTACCACCGGCAAACTGCCCGTGCCTTGGCCCACCCTCGTCACCACCCTGACGTACGGTCCTGTGAGCTTACATACAACTAACATAg | |
| | cACATGAGGATCACCCATGTgc | |
| PL13563 | AGGGCGATGCCACCTAGTTTTAGAGCTAGAAATAGCAAGTTAAAATAAGGCTAGTCCGTTATCAACTTGAAAAAGTGGCACCGAGTCGGTGCGA | 16,584 |
| | AGTTCATCTGTACCACCGGCAAACTGCCCGTGCCTTGGCCCACCCTCGTCACCACCCTGACGTACGGTCCTGTGAGCTTACATACAACTAACATAg | |
| | CACATGAGGATCACCCATGTgcTCTCTCTCGGGTCAGGAGCCCCCCCCTGAACCCAGGATAACCCTCAAAGTCGGGGGGC | |
| PL13564 | AGGGCGATGCCACCTAGTITTAGAGCTAGAAATAGCAAGTTAAAATAAGGCTAGTCCGTTATCAACTTGAAAAAGTGGCACCGAGTCGGTGCGA | 16,585 |
| | AGTTCATCTGTACCACCGGCAAACTGCCCGTGCCTTGGCCCACCCTCGTCACCACCCTGACGTACGGTCCTGTGAGCTTACATACAACTAACATAg | |
| | ggagcACATGAGGATCACCCATGTgcgactcCCACAGTCACTGGGgagtcttccc | |
| PL13565 | AGGGCGATGCCACCTAGTITTAGAGCTAGAAATAGCAAGTTAAAATAAGGCTAGTCCGTTATCAACTTGAAAAAGTGGCACCGAGTCGGTGCGA | 16,586 |
| | AGTTCATCTGTACCACCGGCAAACTGCCCGTGCCTTGGCCCACCCTCGTCACCACCCTGACGTACGGTCCTGTGAGCTTACATACAACTAACATAg | |
| | ggagcACATGAGGATCACCCATGTgcgactcCCACAGTCACTGGGgagtcttcccTCTCTCTCGGGTCAGGAGCCCCCCCCTGAACCCAGGATAACCCTC | |
| | AAAGTCGGGGGGC | |
| PL13566 | AGGGCGATGCCACCTAGTITTAGAGCTAGAAATAGCAAGTTAAAATAAGGCTAGTCCGTTATCAACTTGAAAAAGTGGCACCGAGTCGGTGCGA | 16,587 |
| | AGTTCATCTGTACCACCGGCAAACTGCCCGTGCCTTGGCCCACCCTCGTCACCACCCTGACGTACGGTCCTGTGAGCTTACATACAACTAACATAg | |
| | ggagcACATGAGGATCACCCATGTgcgactcCCACAGTCACTGGGgagtcttccctctctctctctctctctctcgggagcACATGAGGATCACCCATGTgcgactcCC | |
| | ACAGTCACTGGGgagtcttccc | |
| PL13567 | AGGGCGATGCCACCTAGTTTTAGAGCTAGAAATAGCAAGTTAAAATAAGGCTAGTCCGTTATCAACTTGAAAAAGTGGCACCGAGTCGGTGCGA | 16,588 |
| | AGTTCATCTGTACCACCGGCAAACTGCCCGTGCCTTGGCCCACCCTCGTCACCACCCTGACGTACGGTCCTGTGAGCTTACATACAACTAACATAg | |
| | ggagcACATGAGGATCACCCATGTgcgactcCCACAGTCACTGGGgagtcttccctctctctctctctctctctcgggagcACATGAGGATCACCCATGTgcgactcCC | |
| | ACAGTCACTGGGgagtcttcccTCTCTCTCGGGTCAGGAGCCCCCCCCTGAACCCAGGATAACCCTCAAAGTCGGGGGGC | |
| PL13568 | GTTTTAGAGCTAGAAATAGCAAGTTAAAATAAGGCTAGTCCGTTATCAACTTGAAAAAGTGGCACCGAGTCGGTGCGACCACCCTGACGTACGG | 16,589 |
| | CGTGCAGACATACAAgcACATGAGGATCACCCATGTgc | |
| PL13569 | GTTTTAGAGCTAGAAATAGCAAGTTAAAATAAGGCTAGTCCGTTATCAACTTGAAAAAGTGGCACCGAGTCGGTGCGACCACCCTGACGTACGG | 16,590 |
| | CGTGCAGACATACAAgcACATGAGGATCACCCATGTgcTCTCTCTCGGGTCAGGAGCCCCCCCCTGAACCCAGGATAACCCTCAAAGTCGGGGGG | |
| | C | |
| PL13570 | GTTTTAGAGCTAGAAATAGCAAGTTAAAATAAGGCTAGTCCGTTATCAACTTGAAAAAGTGGCACCGAGTCGGTGCGACCACCCTGACGTACGG | 16,591 |
| | CGTGCAGACATACAAgggagcACATGAGGATCACCCATGTgcgactcCCACAGTCACTGGGgagtcttccc | |
| PL13571 | GTTTTAGAGCTAGAAATAGCAAGTTAAAATAAGGCTAGTCCGTTATCAACTTGAAAAAGTGGCACCGAGTCGGTGCGACCACCCTGACGTACGG | 16,592 |
| | CGTGCAGACATACAAgggagcACATGAGGATCACCCATGTgcgactcCCACAGTCACTGGGgagtcttcccTCTCTCTCGGGTCAGGAGCCCCCCCCTGA | |
| | ACCCAGGATAACCCTCAAAGTCGGGGGGC | |
| PL13572 | GTTTTAGAGCTAGAAATAGCAAGTTAAAATAAGGCTAGTCCGTTATCAACTTGAAAAAGTGGCACCGAGTCGGTGCGACCACCCTGACGTACGG | 16,593 |
| | CGTGCAGACATACAAgggagcACATGAGGATCACCCATGTgcgactcCCACAGTCACTGGGgagtcttccctctctctctctctctctctcgggagcACATGAGGAT | |
| | CACCCATGTgcgactcCCACAGTCACTGGGgagtcttccc | |
| PL13573 | GTTTTAGAGCTAGAAATAGCAAGTTAAAATAAGGCTAGTCCGTTATCAACTTGAAAAAGTGGCACCGAGTCGGTGCGACCACCCTGACGTACGG | 16,594 |
| | CGTGCAGACATACAAgggagcACATGAGGATCACCCATGTgcgactcCCACAGTCACTGGGgagtcttccctctctctctctctctctctcgggagcACATGAGGAT | |
| | CACCCATGTgcgactcCCACAGTCACTGGGgagtcttcccTCTCTCTCGGGTCAGGAGCCCCCCCCTGAACCCAGGATAACCCTCAAAGTCGGGGGGC | |
| PL13574 | GTTTTAGAGCTAGAAATAGCAAGTTAAAATAAGGCTAGTCCGTTATCAACTTGAAAAAGTGGCACCGAGTCGGTGCGACCACCCTGACGTACGG | 16,595 |
| | CGTGCAGACATACAACTAACATAgcACATGAGGATCACCCATGTgc | |
| PL13575 | GTTTTAGAGCTAGAAATAGCAAGTTAAAATAAGGCTAGTCCGTTATCAACTTGAAAAAGTGGCACCGAGTCGGTGCGACCACCCTGACGTACGG | 16,596 |
| | CGTGCAGACATACAACTAACATAgcACATGAGGATCACCCATGTgcTCTCTCTCGGGTCAGGAGCCCCCCCCTGAACCCAGGATAACCCTCAAAGT | |
| | CGGGGGGC | |
| PL13576 | GTTTTAGAGCTAGAAATAGCAAGTTAAAATAAGGCTAGTCCGTTATCAACTTGAAAAAGTGGCACCGAGTCGGTGCGACCACCCTGACGTACGG | 16,597 |
| | CGTGCAGACATACAACTAACATAgggagcACATGAGGATCACCCATGTgcgactcCCACAGTCACTGGGgagtcttccc | |
| PL13577 | GTTTTAGAGCTAGAAATAGCAAGTTAAAATAAGGCTAGTCCGTTATCAACTTGAAAAAGTGGCACCGAGTCGGTGCGACCACCCTGACGTACGG | 16,598 |
| | CGTGCAGACATACAACTAACATAgggagcACATGAGGATCACCCATGTgcgactcCCACAGTCACTGGGgagtcttcccTCTCTCTCGGGTCAGGAGCCC | |
| | CCCCCTGAACCCAGGATAACCCTCAAAGTCGGGGGGC | |
| PL13578 | GTTTTAGAGCTAGAAATAGCAAGTTAAAATAAGGCTAGTCCGTTATCAACTTGAAAAAGTGGCACCGAGTCGGTGCGACCACCCTGACGTACGG | 16,599 |
| | CGTGCAGACATACAACTAACATAgggagcACATGAGGATCACCCATGTgcgactcCCACAGTCACTGGGgagtcttccctctctctctctctctctctcgggagcAC | |
| | ATGAGGATCACCCATGTgcgactcCCACAGTCACTGGGgagtcttccc | |
| PL13579 | GTTTTAGAGCTAGAAATAGCAAGTTAAAATAAGGCTAGTCCGTTATCAACTTGAAAAAGTGGCACCGAGTCGGTGCGACCACCCTGACGTACGG | 16,600 |
| | CGTGCAGACATACAACTAACATAgggagcACATGAGGATCACCCATGTgcgactcCCACAGTCACTGGGgagtcttccctctctctctctctctctctcgggagcAC | |
| | ATGAGGATCACCCATGTgcgactcCCACAGTCACTGGGgagtcttcccTCTCTCTCGGGTCAGGAGCCCCCCCCTGAACCCAGGATAACCCTCAAAGTC | |
| | GGGGGGC | |
| PL13580 | GTTTTAGAGCTAGAAATAGCAAGTTAAAATAAGGCTAGTCCGTTATCAACTTGAAAAAGTGGCACCGAGTCGGTGCGACCACCCTGACGTACGG | 16,601 |
| | CGTGCAGTGCTTACATACAAgcACATGAGGATCACCCATGTgc | |
| PL13581 | GTTTTAGAGCTAGAAATAGCAAGTTAAAATAAGGCTAGTCCGTTATCAACTTGAAAAAGTGGCACCGAGTCGGTGCGACCACCCTGACGTACGG | 16,602 |
| | CGTGCAGTGCTTACATACAAgcACATGAGGATCACCCATGTgcTCTCTCTCGGGTCAGGAGCCCCCCCCTGAACCCAGGATAACCCTCAAAGTCGG | |
| | GGGGC | |
| PL13582 | GTTTTAGAGCTAGAAATAGCAAGTTAAAATAAGGCTAGTCCGTTATCAACTTGAAAAAGTGGCACCGAGTCGGTGCGACCACCCTGACGTACGG | 16,603 |
| | CGTGCAGTGCTTACATACAAgggagcACATGAGGATCACCCATGTgcgactcCCACAGTCACTGGGgagtcttccc | |
| PL13583 | GTTTTAGAGCTAGAAATAGCAAGTTAAAATAAGGCTAGTCCGTTATCAACTTGAAAAAGTGGCACCGAGTCGGTGCGACCACCCTGACGTACGG | 16,604 |
| | CGTGCAGTGCTTACATACAAgggagcACATGAGGATCACCCATGTgcgactcCCACAGTCACTGGGgagtcttcccTCTCTCTCGGGTCAGGAGCCCCCC | |
| | CCTGAACCCAGGATAACCCTCAAAGTCGGGGGGC | |
| PL13584 | GTTTTAGAGCTAGAAATAGCAAGTTAAAATAAGGCTAGTCCGTTATCAACTTGAAAAAGTGGCACCGAGTCGGTGCGACCACCCTGACGTACGG | 16,605 |
| | CGTGCAGTGCTTACATACAAgggagcACATGAGGATCACCCATGTgcgactcCCACAGTCACTGGGgagtcttccctctctctctctctctctctcgggagcACATG | |
| | AGGATCACCCATGTgcgactcCCACAGTCACTGGGgagtcttccc | |
| PL13585 | GTTTTAGAGCTAGAAATAGCAAGTTAAAATAAGGCTAGTCCGTTATCAACTTGAAAAAGTGGCACCGAGTCGGTGCGACCACCCTGACGTACGG | 16,606 |
| | CGTGCAGTGCTTACATACAAgggagcACATGAGGATCACCCATGTgcgactcCCACAGTCACTGGGgagtcttccctctctctctctctctctctcgggagcACATG | |
| | AGGATCACCCATGTgcgactcCCACAGTCACTGGGgagtcttcccTCTCTCTCGGGTCAGGAGCCCCCCCCTGAACCCAGGATAACCCTCAAAGTCGGG | |
| | GGGC | |
| PL13586 | GTTTTAGAGCTAGAAATAGCAAGTTAAAATAAGGCTAGTCCGTTATCAACTTGAAAAAGTGGCACCGAGTCGGTGCGACCACCCTGACGTACGG | 16,607 |
| | CGTGCAGTGCTTACATACAACTAACATAgcACATGAGGATCACCCATGTgc | |
| PL13587 | GTTTTAGAGCTAGAAATAGCAAGTTAAAATAAGGCTAGTCCGTTATCAACTTGAAAAAGTGGCACCGAGTCGGTGCGACCACCCTGACGTACGG | 16,608 |
| | CGTGCAGTGCTTACATACAACTAACATAgcACATGAGGATCACCCATGTgcTCTCTCTCGGGTCAGGAGCCCCCCCCTGAACCCAGGATAACCCTC | |
| | AAAGTCGGGGGGC | |
| PL13588 | GTTTTAGAGCTAGAAATAGCAAGTTAAAATAAGGCTAGTCCGTTATCAACTTGAAAAAGTGGCACCGAGTCGGTGCGACCACCCTGACGTACGG | 16,609 |
| | CGTGCAGTGCTTACATACAACTAACATAgggagcACATGAGGATCACCCATGTgcgactcCCACAGTCACTGGGgagtcttccc | |
| PL13589 | GTTTTAGAGCTAGAAATAGCAAGTTAAAATAAGGCTAGTCCGTTATCAACTTGAAAAAGTGGCACCGAGTCGGTGCGACCACCCTGACGTACGG | 16,610 |
| | CGTGCAGTGCTTACATACAACTAACATAgggagcACATGAGGATCACCCATGTgcgactcCCACAGTCACTGGGgagtcttcccTCTCTCTCGGGTCAGG | |
| | AGCCCCCCCCTGAACCCAGGATAACCCTCAAAGTCGGGGGGC | |
| PL13590 | GTTTTAGAGCTAGAAATAGCAAGTTAAAATAAGGCTAGTCCGTTATCAACTTGAAAAAGTGGCACCGAGTCGGTGCGACCACCCTGACGTACGG | 16,611 |
| | CGTGCAGTGCTTACATACAACTAACATAgggagcACATGAGGATCACCCATGTgcgactcCCACAGTCACTGGGgagtcttccctctctctctctctctctctcggg | |
| | agcACATGAGGATCACCCATGTgcgactcCCACAGTCACTGGGgagtcttccc | |
| PL13591 | GTTTTAGAGCTAGAAATAGCAAGTTAAAATAAGGCTAGTCCGTTATCAACTTGAAAAAGTGGCACCGAGTCGGTGCGACCACCCTGACGTACGG | 16,612 |
| | CGTGCAGTGCTTACATACAACTAACATAgggagcACATGAGGATCACCCATGTgcgactcCCACAGTCACTGGGgagtcttccctctctctctctctctctctcggg | |
| | agcACATGAGGATCACCCATGTgcgactcCCACAGTCACTGGGgagtcttcccTCTCTCTCGGGTCAGGAGCCCCCCCCTGAACCCAGGATAACCCTCAA | |
| | AGTCGGGGGGC | |
| PL13592 | GTTTTAGAGCTAGAAATAGCAAGTTAAAATAAGGCTAGTCCGTTATCAACTTGAAAAAGTGGCACCGAGTCGGTGCGACCACCCTGACGTACGG | 16,613 |
| | CGTGCAGTGCTTCGGCACATACAAgcACATGAGGATCACCCATGTgc | |
| PL13593 | GTTTTAGAGCTAGAAATAGCAAGTTAAAATAAGGCTAGTCCGTTATCAACTTGAAAAAGTGGCACCGAGTCGGTGCGACCACCCTGACGTACGG | 16,614 |
| | CGTGCAGTGCTTCGGCACATACAAgcACATGAGGATCACCCATGTgcTCTCTCTCGGGTCAGGAGCCCCCCCCTGAACCCAGGATAACCCTCAAAG | |
| | TCGGGGGGC | |
| PL13594 | GTTTTAGAGCTAGAAATAGCAAGTTAAAATAAGGCTAGTCCGTTATCAACTTGAAAAAGTGGCACCGAGTCGGTGCGACCACCCTGACGTACGG | 16,615 |
| | CGTGCAGTGCTTCGGCACATACAAgggagcACATGAGGATCACCCATGTgcgactcCCACAGTCACTGGGgagtcttccc | |
| PL13595 | GTTTTAGAGCTAGAAATAGCAAGTTAAAATAAGGCTAGTCCGTTATCAACTTGAAAAAGTGGCACCGAGTCGGTGCGACCACCCTGACGTACGG | 16,616 |
| | CGTGCAGTGCTTCGGCACATACAAgggagcACATGAGGATCACCCATGTgcgactcCCACAGTCACTGGGgagtcttcccTCTCTCTCGGGTCAGGAGCC | |
| | CCCCCCTGAACCCAGGATAACCCTCAAAGTCGGGGGGC | |
| PL13596 | GTTTTAGAGCTAGAAATAGCAAGTTAAAATAAGGCTAGTCCGTTATCAACTTGAAAAAGTGGCACCGAGTCGGTGCGACCACCCTGACGTACGG | 16,617 |
| | CGTGCAGTGCTTCGGCACATACAAgggagcACATGAGGATCACCCATGTgcgactcCCACAGTCACTGGGgagtcttccctctctctctctctctctctcgggagcA | |
| | CATGAGGATCACCCATGTgcgactcCCACAGTCACTGGGgagtcttccc | |
| PL13597 | GTTTTAGAGCTAGAAATAGCAAGTTAAAATAAGGCTAGTCCGTTATCAACTTGAAAAAGTGGCACCGAGTCGGTGCGACCACCCTGACGTACGG | 16,618 |
| | CGTGCAGTGCTTCGGCACATACAAgggagcACATGAGGATCACCCATGTgcgactcCCACAGTCACTGGGgagtcttccctctctctctctctctctctcgggagcA | |
| | CATGAGGATCACCCATGTgcgactcCCACAGTCACTGGGgagtcttcccTCTCTCTCGGGTCAGGAGCCCCCCCCTGAACCCAGGATAACCCTCAAAGT | |
| | CGGGGGGC | |
| PL13598 | GTTTTAGAGCTAGAAATAGCAAGTTAAAATAAGGCTAGTCCGTTATCAACTTGAAAAAGTGGCACCGAGTCGGTGCGACCACCCTGACGTACGG | 16,619 |
| | CGTGCAGTGCTTCGGCACATACAACTAACATAgcACATGAGGATCACCCATGTgc | |
| PL13599 | GTTTTAGAGCTAGAAATAGCAAGTTAAAATAAGGCTAGTCCGTTATCAACTTGAAAAAGTGGCACCGAGTCGGTGCGACCACCCTGACGTACGG | 16,620 |
| | CGTGCAGTGCTTCGGCACATACAACTAACATAgcACATGAGGATCACCCATGTgcTCTCTCTCGGGTCAGGAGCCCCCCCCTGAACCCAGGATAAC | |
| | CCTCAAAGTCGGGGGGC | |
| PL13600 | GTTTTAGAGCTAGAAATAGCAAGTTAAAATAAGGCTAGTCCGTTATCAACTTGAAAAAGTGGCACCGAGTCGGTGCGACCACCCTGACGTACGG | 16,621 |
| | CGTGCAGTGCTTCGGCACATACAACTAACATAgggagcACATGAGGATCACCCATGTgcgactcCCACAGTCACTGGGgagtcttccc | |
| PL13601 | GTTTTAGAGCTAGAAATAGCAAGTTAAAATAAGGCTAGTCCGTTATCAACTTGAAAAAGTGGCACCGAGTCGGTGCGACCACCCTGACGTACGG | 16,622 |
| | CGTGCAGTGCTTCGGCACATACAACTAACATAgggagcACATGAGGATCACCCATGTgcgactcCCACAGTCACTGGGgagtcttcccTCTCTCTCGGGT | |
| | CAGGAGCCCCCCCCTGAACCCAGGATAACCCTCAAAGTCGGGGGGC | |
| PL13602 | GTTTTAGAGCTAGAAATAGCAAGTTAAAATAAGGCTAGTCCGTTATCAACTTGAAAAAGTGGCACCGAGTCGGTGCGACCACCCTGACGTACGG | 16,623 |
| | CGTGCAGTGCTTCGGCACATACAACTAACATAgggagcACATGAGGATCACCCATGTgcgactcCCACAGTCACTGGGgagtcttccctctctctctctctctctc | |
| | tcgggagcACATGAGGATCACCCATGTgcgactcCCACAGTCACTGGGgagtcttccc | |
| PL13603 | GTTTTAGAGCTAGAAATAGCAAGTTAAAATAAGGCTAGTCCGTTATCAACTTGAAAAAGTGGCACCGAGTCGGTGCGACCACCCTGACGTACGG | 16,624 |
| | CGTGCAGTGCTTCGGCACATACAACTAACATAgggagcACATGAGGATCACCCATGTgcgactcCCACAGTCACTGGGgagtcttccctctctctctctctctctc | |
| | tcgggagcACATGAGGATCACCCATGTgcgactcCCACAGTCACTGGGgagtcttcccTCTCTCTCGGGTCAGGAGCCCCCCCCTGAACCCAGGATAACCC | |
| | TCAAAGTCGGGGGGC | |
| PL13604 | GTTTTAGAGCTAGAAATAGCAAGTTAAAATAAGGCTAGTCCGTTATCAACTTGAAAAAGTGGCACCGAGTCGGTGCGACCACCCTGACGTACGG | 16,625 |
| | TCCTGTGAGCTTACATACAAgcACATGAGGATCACCCATGTgc | |
| PL13605 | GTTTTAGAGCTAGAAATAGCAAGTTAAAATAAGGCTAGTCCGTTATCAACTTGAAAAAGTGGCACCGAGTCGGTGCGACCACCCTGACGTACGG | 16,626 |
| | TCCTGTGAGCTTACATACAAgcACATGAGGATCACCCATGTgcTCTCTCTCGGGTCAGGAGCCCCCCCCTGAACCCAGGATAACCCTCAAAGTCGG | |
| | GGGGC | |
| PL13606 | GTTTTAGAGCTAGAAATAGCAAGTTAAAATAAGGCTAGTCCGTTATCAACTTGAAAAAGTGGCACCGAGTCGGTGCGACCACCCTGACGTACGG | 16,627 |
| | TCCTGTGAGCTTACATACAAgggagcACATGAGGATCACCCATGTgcgactcCCACAGTCACTGGGgagtcttccc | |
| PL13607 | GTTTTAGAGCTAGAAATAGCAAGTTAAAATAAGGCTAGTCCGTTATCAACTTGAAAAAGTGGCACCGAGTCGGTGCGACCACCCTGACGTACGG | 16,628 |
| | TCCTGTGAGCTTACATACAAgggagcACATGAGGATCACCCATGTgcgactcCCACAGTCACTGGGgagtcttcccTCTCTCTCGGGTCAGGAGCCCCCCC | |
| | CTGAACCCAGGATAACCCTCAAAGTCGGGGGGC | |
| PL13608 | GTTTTAGAGCTAGAAATAGCAAGTTAAAATAAGGCTAGTCCGTTATCAACTTGAAAAAGTGGCACCGAGTCGGTGCGACCACCCTGACGTACGG | 16,629 |
| | TCCTGTGAGCTTACATACAAgggagcACATGAGGATCACCCATGTgcgactcCCACAGTCACTGGGgagtcttccctctctctctctctctctctcgggagcACATGA | |
| | GGATCACCCATGTgcgactcCCACAGTCACTGGGgagtcttccc | |
| PL13609 | GTTTTAGAGCTAGAAATAGCAAGTTAAAATAAGGCTAGTCCGTTATCAACTTGAAAAAGTGGCACCGAGTCGGTGCGACCACCCTGACGTACGG | 16,630 |
| | TCCTGTGAGCTTACATACAAgggagcACATGAGGATCACCCATGTgcgactcCCACAGTCACTGGGgagtcttccctctctctctctctctctctcgggagcACATGA | |
| | GGATCACCCATGTgcgactcCCACAGTCACTGGGgagtcttcccTCTCTCTCGGGTCAGGAGCCCCCCCCTGAACCCAGGATAACCCTCAAAGTCGGGG | |
| | GGC | |
| PL13610 | GTTTTAGAGCTAGAAATAGCAAGTTAAAATAAGGCTAGTCCGTTATCAACTTGAAAAAGTGGCACCGAGTCGGTGCGACCACCCTGACGTACGG | 16,631 |
| | TCCTGTGAGCTTACATACAACTAACATAgcACATGAGGATCACCCATGTgc | |
| PL13612 | GTTTTAGAGCTAGAAATAGCAAGTTAAAATAAGGCTAGTCCGTTATCAACTTGAAAAAGTGGCACCGAGTCGGTGCGACCACCCTGACGTACGG | 16,633 |
| | TCCTGTGAGCTTACATACAACTAACATAgggagcACATGAGGATCACCCATGTgcgactcCCACAGTCACTGGGgagtcttccc | |
| PL13613 | GTTTTAGAGCTAGAAATAGCAAGTTAAAATAAGGCTAGTCCGTTATCAACTTGAAAAAGTGGCACCGAGTCGGTGCGACCACCCTGACGTACGG | 16,634 |
| | TCCTGTGAGCTTACATACAACTAACATAgggagcACATGAGGATCACCCATGTgcgactcCCACAGTCACTGGGgagtcttcccTCTCTCTCGGGTCAGGA | |
| | GCCCCCCCCTGAACCCAGGATAACCCTCAAAGTCGGGGGGC | |
| PL13614 | GTTTTAGAGCTAGAAATAGCAAGTTAAAATAAGGCTAGTCCGTTATCAACTTGAAAAAGTGGCACCGAGTCGGTGCGACCACCCTGACGTACGG | 16,635 |
| | TCCTGTGAGCTTACATACAACTAACATAgggagcACATGAGGATCACCCATGTgcgactcCCACAGTCACTGGGgagtcttccctctctctctctctctctctcggg | |
| | agcACATGAGGATCACCCATGTgcgactcCCACAGTCACTGGGgagtcttccc | |
| PL13615 | GTTTTAGAGCTAGAAATAGCAAGTTAAAATAAGGCTAGTCCGTTATCAACTTGAAAAAGTGGCACCGAGTCGGTGCGACCACCCTGACGTACGG | 16,636 |
| | TCCTGTGAGCTTACATACAACTAACATAgggagcACATGAGGATCACCCATGTgcgactcCCACAGTCACTGGGgagtcttccctctctctctctctctctctcggg | |
| | agcACATGAGGATCACCCATGTgcgactcCCACAGTCACTGGGgagtcttcccTCTCTCTCGGGTCAGGAGCCCCCCCCTGAACCCAGGATAACCCTCAA | |
| | AGTCGGGGGGC | |
| PL13616 | GTTTTAGAGCTAGAAATAGCAAGTTAAAATAAGGCTAGTCCGTTATCAACTTGAAAAAGTGGCACCGAGTCGGTGCGAAGTTCATCTGTACCACC | 16,637 |
| | GGCAAACTGCCCGTGCCTTGGCCCACCCTCGTCACCACCCTGACGTACGGCGTGCAGACATACAAgcACATGAGGATCACCCATGTgc | |
| PL13617 | GTTTTAGAGCTAGAAATAGCAAGTTAAAATAAGGCTAGTCCGTTATCAACTTGAAAAAGTGGCACCGAGTCGGTGCGAAGTTCATCTGTACCACC | 16,638 |
| | GGCAAACTGCCCGTGCCTTGGCCCACCCTCGTCACCACCCTGACGTACGGCGTGCAGACATACAAgcACATGAGGATCACCCATGTgcTCTCTCTC | |
| | GGGTCAGGAGCCCCCCCCTGAACCCAGGATAACCCTCAAAGTCGGGGGGC | |
| PL13618 | GTTTTAGAGCTAGAAATAGCAAGTTAAAATAAGGCTAGTCCGTTATCAACTTGAAAAAGTGGCACCGAGTCGGTGCGAAGTTCATCTGTACCACC | 16,639 |
| | GGCAAACTGCCCGTGCCTTGGCCCACCCTCGTCACCACCCTGACGTACGGCGTGCAGACATACAAgggagcACATGAGGATCACCCATGTgcgactc | |
| | CCACAGTCACTGGGgagtcttccc | |
| PL13619 | GTTTTAGAGCTAGAAATAGCAAGTTAAAATAAGGCTAGTCCGTTATCAACTTGAAAAAGTGGCACCGAGTCGGTGCGAAGTTCATCTGTACCACC | 16,640 |
| | GGCAAACTGCCCGTGCCTTGGCCCACCCTCGTCACCACCCTGACGTACGGCGTGCAGACATACAAgggagcACATGAGGATCACCCATGTgcgactc | |
| | CCACAGTCACTGGGgagtcttcccTCTCTCTCGGGTCAGGAGCCCCCCCCTGAACCCAGGATAACCCTCAAAGTCGGGGGGC | |
| PL13620 | GTTTTAGAGCTAGAAATAGCAAGTTAAAATAAGGCTAGTCCGTTATCAACTTGAAAAAGTGGCACCGAGTCGGTGCGAAGTTCATCTGTACCACC | 16,641 |
| | GGCAAACTGCCCGTGCCTTGGCCCACCCTCGTCACCACCCTGACGTACGGCGTGCAGACATACAAgggagcACATGAGGATCACCCATGTgcgactc | |
| | CCACAGTCACTGGGgagtcttccctctctctctctctctctctcgggagcACATGAGGATCACCCATGTgcgactcCCACAGTCACTGGGgagtcttccc | |
| PL13621 | GTTTTAGAGCTAGAAATAGCAAGTTAAAATAAGGCTAGTCCGTTATCAACTTGAAAAAGTGGCACCGAGTCGGTGCGAAGTTCATCTGTACCACC | 16,642 |
| | GGCAAACTGCCCGTGCCTTGGCCCACCCTCGTCACCACCCTGACGTACGGCGTGCAGACATACAAgggagcACATGAGGATCACCCATGTgcgactc | |
| | CCACAGTCACTGGGgagtcttccctctctctctctctctctctcgggagcACATGAGGATCACCCATGTgcgactcCCACAGTCACTGGGgagtcttcccTCTCTCTCG | |
| | GGTCAGGAGCCCCCCCCTGAACCCAGGATAACCCTCAAAGTCGGGGGGC | |
| PL13622 | GTTTTAGAGCTAGAAATAGCAAGTTAAAATAAGGCTAGTCCGTTATCAACTTGAAAAAGTGGCACCGAGTCGGTGCGAAGTTCATCTGTACCACC | 16,643 |
| | GGCAAACTGCCCGTGCCTTGGCCCACCCTCGTCACCACCCTGACGTACGGCGTGCAGACATACAACTAACATAgcACATGAGGATCACCCATGTgc | |
| PL13623 | GTTTTAGAGCTAGAAATAGCAAGTTAAAATAAGGCTAGTCCGTTATCAACTTGAAAAAGTGGCACCGAGTCGGTGCGAAGTTCATCTGTACCACC | 16,644 |
| | GGCAAACTGCCCGTGCCTTGGCCCACCCTCGTCACCACCCTGACGTACGGCGTGCAGACATACAACTAACATAgcACATGAGGATCACCCATGTgc | |
| | TCTCTCTCGGGTCAGGAGCCCCCCCCTGAACCCAGGATAACCCTCAAAGTCGGGGGGC | |
| PL13624 | GTTTTAGAGCTAGAAATAGCAAGTTAAAATAAGGCTAGTCCGTTATCAACTTGAAAAAGTGGCACCGAGTCGGTGCGAAGTTCATCTGTACCACC | 16,645 |
| | GGCAAACTGCCCGTGCCTTGGCCCACCCTCGTCACCACCCTGACGTACGGCGTGCAGACATACAACTAACATAgggagcACATGAGGATCACCCAT | |
| | GTgcgactcCCACAGTCACTGGGgagtcttccc | |
| PL13625 | GTTTTAGAGCTAGAAATAGCAAGTTAAAATAAGGCTAGTCCGTTATCAACTTGAAAAAGTGGCACCGAGTCGGTGCGAAGTTCATCTGTACCACC | 16,646 |
| | GGCAAACTGCCCGTGCCTTGGCCCACCCTCGTCACCACCCTGACGTACGGCGTGCAGACATACAACTAACATAgggagcACATGAGGATCACCCAT | |
| | GTgcgactcCCACAGTCACTGGGgagtcttcccTCTCTCTCGGGTCAGGAGCCCCCCCCTGAACCCAGGATAACCCTCAAAGTCGGGGGGC | |
| PL13626 | GTTTTAGAGCTAGAAATAGCAAGTTAAAATAAGGCTAGTCCGTTATCAACTTGAAAAAGTGGCACCGAGTCGGTGCGAAGTTCATCTGTACCACC | 16,647 |
| | GGCAAACTGCCCGTGCCTTGGCCCACCCTCGTCACCACCCTGACGTACGGCGTGCAGACATACAACTAACATAgggagcACATGAGGATCACCCAT | |
| | GTgcgactcCCACAGTCACTGGGgagtcttccctctctctctctctctctctcgggagcACATGAGGATCACCCATGTgcgactcCCACAGTCACTGGGgagtcttccc | |
| PL13627 | GTTTTAGAGCTAGAAATAGCAAGTTAAAATAAGGCTAGTCCGTTATCAACTTGAAAAAGTGGCACCGAGTCGGTGCGAAGTTCATCTGTACCACC | 16,648 |
| | GGCAAACTGCCCGTGCCTTGGCCCACCCTCGTCACCACCCTGACGTACGGCGTGCAGACATACAACTAACATAgggagcACATGAGGATCACCCAT | |
| | GTgcgactcCCACAGTCACTGGGgagtcttccctctctctctctctctctctcgggagcACATGAGGATCACCCATGTgcgactcCCACAGTCACTGGGgagtcttcccT | |
| | CTCTCTCGGGTCAGGAGCCCCCCCCTGAACCCAGGATAACCCTCAAAGTCGGGGGGC | |
| PL13628 | GTTTTAGAGCTAGAAATAGCAAGTTAAAATAAGGCTAGTCCGTTATCAACTTGAAAAAGTGGCACCGAGTCGGTGCGAAGTTCATCTGTACCACC | 16,649 |
| | GGCAAACTGCCCGTGCCTTGGCCCACCCTCGTCACCACCCTGACGTACGGCGTGCAGTGCTTACATACAAgcACATGAGGATCACCCATGTgc | |
| PL13629 | GTTTTAGAGCTAGAAATAGCAAGTTAAAATAAGGCTAGTCCGTTATCAACTTGAAAAAGTGGCACCGAGTCGGTGCGAAGTTCATCTGTACCACC | 16,650 |
| | GGCAAACTGCCCGTGCCTTGGCCCACCCTCGTCACCACCCTGACGTACGGCGTGCAGTGCTTACATACAAgcACATGAGGATCACCCATGTgcTCT | |
| | CTCTCGGGTCAGGAGCCCCCCCCTGAACCCAGGATAACCCTCAAAGTCGGGGGGC | |
| PL13630 | GTTTTAGAGCTAGAAATAGCAAGTTAAAATAAGGCTAGTCCGTTATCAACTTGAAAAAGTGGCACCGAGTCGGTGCGAAGTTCATCTGTACCACC | 16,651 |
| | GGCAAACTGCCCGTGCCTTGGCCCACCCTCGTCACCACCCTGACGTACGGCGTGCAGTGCTTACATACAAgggagcACATGAGGATCACCCATGTg | |
| | cgactcCCACAGTCACTGGGgagtcttccc | |
| PL13631 | GTTTTAGAGCTAGAAATAGCAAGTTAAAATAAGGCTAGTCCGTTATCAACTTGAAAAAGTGGCACCGAGTCGGTGCGAAGTTCATCTGTACCACC | 16,652 |
| | GGCAAACTGCCCGTGCCTTGGCCCACCCTCGTCACCACCCTGACGTACGGCGTGCAGTGCTTACATACAAgggagcACATGAGGATCACCCATGTg | |
| | cgactcCCACAGTCACTGGGgagtcttcccTCTCTCTCGGGTCAGGAGCCCCCCCCTGAACCCAGGATAACCCTCAAAGTCGGGGGGC | |
| PL13632 | GTTTTAGAGCTAGAAATAGCAAGTTAAAATAAGGCTAGTCCGTTATCAACTTGAAAAAGTGGCACCGAGTCGGTGCGAAGTTCATCTGTACCACC | 16,653 |
| | GGCAAACTGCCCGTGCCTTGGCCCACCCTCGTCACCACCCTGACGTACGGCGTGCAGTGCTTACATACAAgggagcACATGAGGATCACCCATGTg | |
| | cgactcCCACAGTCACTGGGgagtcttccctctctctctctctctctctcgggagcACATGAGGATCACCCATGTgcgactcCCACAGTCACTGGGgagtcttccc | |
| PL13633 | GTTTTAGAGCTAGAAATAGCAAGTTAAAATAAGGCTAGTCCGTTATCAACTTGAAAAAGTGGCACCGAGTCGGTGCGAAGTTCATCTGTACCACC | 16,654 |
| | GGCAAACTGCCCGTGCCTTGGCCCACCCTCGTCACCACCCTGACGTACGGCGTGCAGTGCTTACATACAAgggagcACATGAGGATCACCCATGTg | |
| | cgactcCCACAGTCACTGGGgagtcttccctctctctctctctctctctcgggagcACATGAGGATCACCCATGTgcgactcCCACAGTCACTGGGgagtcttcccTCTCT | |
| | CTCGGGTCAGGAGCCCCCCCCTGAACCCAGGATAACCCTCAAAGTCGGGGGGC | |
| PL13634 | GTTTTAGAGCTAGAAATAGCAAGTTAAAATAAGGCTAGTCCGTTATCAACTTGAAAAAGTGGCACCGAGTCGGTGCGAAGTTCATCTGTACCACC | 16,655 |
| | GGCAAACTGCCCGTGCCTTGGCCCACCCTCGTCACCACCCTGACGTACGGCGTGCAGTGCTTACATACAACTAACATAgcACATGAGGATCACCCA | |
| | TGTgc | |
| PL13635 | GTTTTAGAGCTAGAAATAGCAAGTTAAAATAAGGCTAGTCCGTTATCAACTTGAAAAAGTGGCACCGAGTCGGTGCGAAGTTCATCTGTACCACC | 16,656 |
| | GGCAAACTGCCCGTGCCTTGGCCCACCCTCGTCACCACCCTGACGTACGGCGTGCAGTGCTTACATACAACTAACATAgcACATGAGGATCACCCA | |
| | TGTgcTCTCTCTCGGGTCAGGAGCCCCCCCCTGAACCCAGGATAACCCTCAAAGTCGGGGGGC | |
| PL13636 | GTTTTAGAGCTAGAAATAGCAAGTTAAAATAAGGCTAGTCCGTTATCAACTTGAAAAAGTGGCACCGAGTCGGTGCGAAGTTCATCTGTACCACC | 16,657 |
| | GGCAAACTGCCCGTGCCTTGGCCCACCCTCGTCACCACCCTGACGTACGGCGTGCAGTGCTTACATACAACTAACATAgggagcACATGAGGATCA | |
| | CCCATGTgcgactcCCACAGTCACTGGGgagtcttccc | |
| PL13637 | GTTTTAGAGCTAGAAATAGCAAGTTAAAATAAGGCTAGTCCGTTATCAACTTGAAAAAGTGGCACCGAGTCGGTGCGAAGTTCATCTGTACCACC | 16,658 |
| | GGCAAACTGCCCGTGCCTTGGCCCACCCTCGTCACCACCCTGACGTACGGCGTGCAGTGCTTACATACAACTAACATAgggagcACATGAGGATCA | |
| | CCCATGTgcgactcCCACAGTCACTGGGgagtcttcccTCTCTCTCGGGTCAGGAGCCCCCCCCTGAACCCAGGATAACCCTCAAAGTCGGGGGGC | |
| PL13638 | GTTTTAGAGCTAGAAATAGCAAGTTAAAATAAGGCTAGTCCGTTATCAACTTGAAAAAGTGGCACCGAGTCGGTGCGAAGTTCATCTGTACCACC | 16,659 |
| | GGCAAACTGCCCGTGCCTTGGCCCACCCTCGTCACCACCCTGACGTACGGCGTGCAGTGCTTACATACAACTAACATAgggagcACATGAGGATCA | |
| | CCCATGTgcgactcCCACAGTCACTGGGgagtcttccctctctctctctctctctctcgggagcACATGAGGATCACCCATGTgcgactcCCACAGTCACTGGGgagtc | |
| | ttccc | |
| PL13639 | GTTTTAGAGCTAGAAATAGCAAGTTAAAATAAGGCTAGTCCGTTATCAACTTGAAAAAGTGGCACCGAGTCGGTGCGAAGTTCATCTGTACCACC | 16,660 |
| | GGCAAACTGCCCGTGCCTTGGCCCACCCTCGTCACCACCCTGACGTACGGCGTGCAGTGCTTACATACAACTAACATAgggagcACATGAGGATCA | |
| | CCCATGTgcgactcCCACAGTCACTGGGgagtcttccctctctctctctctctctctcgggagcACATGAGGATCACCCATGTgcgactcCCACAGTCACTGGGgagtc | |
| | ttcccTCTCTCTCGGGTCAGGAGCCCCCCCCTGAACCCAGGATAACCCTCAAAGTCGGGGGGC | |
| PL13640 | GTTTTAGAGCTAGAAATAGCAAGTTAAAATAAGGCTAGTCCGTTATCAACTTGAAAAAGTGGCACCGAGTCGGTGCGAAGTTCATCTGTACCACC | 16,661 |
| | GGCAAACTGCCCGTGCCTTGGCCCACCCTCGTCACCACCCTGACGTACGGCGTGCAGTGCTTCGGCACATACAAgcACATGAGGATCACCCATGT | |
| | gc | |
| PL13641 | GTTTTAGAGCTAGAAATAGCAAGTTAAAATAAGGCTAGTCCGTTATCAACTTGAAAAAGTGGCACCGAGTCGGTGCGAAGTTCATCTGTACCACC | 16,662 |
| | GGCAAACTGCCCGTGCCTTGGCCCACCCTCGTCACCACCCTGACGTACGGCGTGCAGTGCTTCGGCACATACAAgcACATGAGGATCACCCATGT | |
| | gcTCTCTCTCGGGTCAGGAGCCCCCCCCTGAACCCAGGATAACCCTCAAAGTCGGGGGGC | |
| PL13642 | GTTTTAGAGCTAGAAATAGCAAGTTAAAATAAGGCTAGTCCGTTATCAACTTGAAAAAGTGGCACCGAGTCGGTGCGAAGTTCATCTGTACCACC | 16,663 |
| | GGCAAACTGCCCGTGCCTTGGCCCACCCTCGTCACCACCCTGACGTACGGCGTGCAGTGCTTCGGCACATACAAgggagcACATGAGGATCACCCA | |
| | TGTgcgactcCCACAGTCACTGGGgagtcttccc | |
| PL13643 | GTTTTAGAGCTAGAAATAGCAAGTTAAAATAAGGCTAGTCCGTTATCAACTTGAAAAAGTGGCACCGAGTCGGTGCGAAGTTCATCTGTACCACC | 16,664 |
| | GGCAAACTGCCCGTGCCTTGGCCCACCCTCGTCACCACCCTGACGTACGGCGTGCAGTGCTTCGGCACATACAAgggagcACATGAGGATCACCCA | |
| | TGTgcgactcCCACAGTCACTGGGgagtcttcccTCTCTCTCGGGTCAGGAGCCCCCCCCTGAACCCAGGATAACCCTCAAAGTCGGGGGGC | |
| PL13644 | GTTTTAGAGCTAGAAATAGCAAGTTAAAATAAGGCTAGTCCGTTATCAACTTGAAAAAGTGGCACCGAGTCGGTGCGAAGTTCATCTGTACCACC | 16,665 |
| | GGCAAACTGCCCGTGCCTTGGCCCACCCTCGTCACCACCCTGACGTACGGCGTGCAGTGCTTCGGCACATACAAgggagcACATGAGGATCACCCA | |
| | TGTgcgactcCCACAGTCACTGGGgagtcttccctctctctctctctctctctcgggagcACATGAGGATCACCCATGTgcgactcCCACAGTCACTGGGgagtcttccc | |
| PL13645 | GTTTTAGAGCTAGAAATAGCAAGTTAAAATAAGGCTAGTCCGTTATCAACTTGAAAAAGTGGCACCGAGTCGGTGCGAAGTTCATCTGTACCACC | 16,666 |
| | GGCAAACTGCCCGTGCCTTGGCCCACCCTCGTCACCACCCTGACGTACGGCGTGCAGTGCTTCGGCACATACAAgggagcACATGAGGATCACCCA | |
| | TGTgcgactcCCACAGTCACTGGGgagtcttccctctctctctctctctctctcgggagcACATGAGGATCACCCATGTgcgactcCCACAGTCACTGGGgagtcttcccT | |
| | CTCTCTCGGGTCAGGAGCCCCCCCCTGAACCCAGGATAACCCTCAAAGTCGGGGGGC | |
| PL13646 | GTTTTAGAGCTAGAAATAGCAAGTTAAAATAAGGCTAGTCCGTTATCAACTTGAAAAAGTGGCACCGAGTCGGTGCGAAGTTCATCTGTACCACC | 16,667 |
| | GGCAAACTGCCCGTGCCTTGGCCCACCCTCGTCACCACCCTGACGTACGGCGTGCAGTGCTTCGGCACATACAACTAACATAgcACATGAGGATC | |
| | ACCCATGTgc | |
| PL13647 | GTTTTAGAGCTAGAAATAGCAAGTTAAAATAAGGCTAGTCCGTTATCAACTTGAAAAAGTGGCACCGAGTCGGTGCGAAGTTCATCTGTACCACC | 16,668 |
| | GGCAAACTGCCCGTGCCTTGGCCCACCCTCGTCACCACCCTGACGTACGGCGTGCAGTGCTTCGGCACATACAACTAACATAgcACATGAGGATC | |
| | ACCCATGTgcTCTCTCTCGGGTCAGGAGCCCCCCCCTGAACCCAGGATAACCCTCAAAGTCGGGGGGC | |
| PL13648 | GTTTTAGAGCTAGAAATAGCAAGTTAAAATAAGGCTAGTCCGTTATCAACTTGAAAAAGTGGCACCGAGTCGGTGCGAAGTTCATCTGTACCACC | 16,669 |
| | GGCAAACTGCCCGTGCCTTGGCCCACCCTCGTCACCACCCTGACGTACGGCGTGCAGTGCTTCGGCACATACAACTAACATAgggagcACATGAGG | |
| | ATCACCCATGTgcgactcCCACAGTCACTGGGgagtcttccc | |
| PL13649 | GTTTTAGAGCTAGAAATAGCAAGTTAAAATAAGGCTAGTCCGTTATCAACTTGAAAAAGTGGCACCGAGTCGGTGCGAAGTTCATCTGTACCACC | 16,670 |
| | GGCAAACTGCCCGTGCCTTGGCCCACCCTCGTCACCACCCTGACGTACGGCGTGCAGTGCTTCGGCACATACAACTAACATAgggagcACATGAGG | |
| | ATCACCCATGTgcgactcCCACAGTCACTGGGgagtcttcccTCTCTCTCGGGTCAGGAGCCCCCCCCTGAACCCAGGATAACCCTCAAAGTCGGGGGG | |
| | C | |
| PL13650 | GTTTTAGAGCTAGAAATAGCAAGTTAAAATAAGGCTAGTCCGTTATCAACTTGAAAAAGTGGCACCGAGTCGGTGCGAAGTTCATCTGTACCACC | 16,671 |
| | GGCAAACTGCCCGTGCCTTGGCCCACCCTCGTCACCACCCTGACGTACGGCGTGCAGTGCTTCGGCACATACAACTAACATAgggagcACATGAGG | |
| | ATCACCCATGTgcgactcCCACAGTCACTGGGgagtcttccctctctctctctctctctctcgggagcACATGAGGATCACCCATGTgcgactcCCACAGTCACTGGG | |
| | gagtcttccc | |
| PL13651 | GTTTTAGAGCTAGAAATAGCAAGTTAAAATAAGGCTAGTCCGTTATCAACTTGAAAAAGTGGCACCGAGTCGGTGCGAAGTTCATCTGTACCACC | 16,672 |
| | GGCAAACTGCCCGTGCCTTGGCCCACCCTCGTCACCACCCTGACGTACGGCGTGCAGTGCTTCGGCACATACAACTAACATAgggagcACATGAGG | |
| | ATCACCCATGTgcgactcCCACAGTCACTGGGgagtcttccctctctctctctctctctctcgggagcACATGAGGATCACCCATGTgcgactcCCACAGTCACTGGG | |
| | gagtcttcccTCTCTCTCGGGTCAGGAGCCCCCCCCTGAACCCAGGATAACCCTCAAAGTCGGGGGGC | |
| PL13652 | GTTTTAGAGCTAGAAATAGCAAGTTAAAATAAGGCTAGTCCGTTATCAACTTGAAAAAGTGGCACCGAGTCGGTGCGAAGTTCATCTGTACCACC | 16,673 |
| | GGCAAACTGCCCGTGCCTTGGCCCACCCTCGTCACCACCCTGACGTACGGTCCTGTGAGCTTACATACAAgcACATGAGGATCACCCATGTgc | |
| PL13653 | GTTTTAGAGCTAGAAATAGCAAGTTAAAATAAGGCTAGTCCGTTATCAACTTGAAAAAGTGGCACCGAGTCGGTGCGAAGTTCATCTGTACCACC | 16,674 |
| | GGCAAACTGCCCGTGCCTTGGCCCACCCTCGTCACCACCCTGACGTACGGTCCTGTGAGCTTACATACAAgcACATGAGGATCACCCATGTgcTCT | |
| | CTCTCGGGTCAGGAGCCCCCCCCTGAACCCAGGATAACCCTCAAAGTCGGGGGGC | |
| PL13654 | GTTTTAGAGCTAGAAATAGCAAGTTAAAATAAGGCTAGTCCGTTATCAACTTGAAAAAGTGGCACCGAGTCGGTGCGAAGTTCATCTGTACCACC | 16,675 |
| | GGCAAACTGCCCGTGCCTTGGCCCACCCTCGTCACCACCCTGACGTACGGTCCTGTGAGCTTACATACAAgggagcACATGAGGATCACCCATGTgc | |
| | gactcCCACAGTCACTGGGgagtcttccc | |
| PL13655 | GTTTTAGAGCTAGAAATAGCAAGTTAAAATAAGGCTAGTCCGTTATCAACTTGAAAAAGTGGCACCGAGTCGGTGCGAAGTTCATCTGTACCACC | 16,676 |
| | GGCAAACTGCCCGTGCCTTGGCCCACCCTCGTCACCACCCTGACGTACGGTCCTGTGAGCTTACATACAAgggagcACATGAGGATCACCCATGTgc | |
| | gactcCCACAGTCACTGGGgagtcttcccTCTCTCTCGGGTCAGGAGCCCCCCCCTGAACCCAGGATAACCCTCAAAGTCGGGGGGC | |
| PL13656 | GTTTTAGAGCTAGAAATAGCAAGTTAAAATAAGGCTAGTCCGTTATCAACTTGAAAAAGTGGCACCGAGTCGGTGCGAAGTTCATCTGTACCACC | 16,677 |
| | GGCAAACTGCCCGTGCCTTGGCCCACCCTCGTCACCACCCTGACGTACGGTCCTGTGAGCTTACATACAAgggagcACATGAGGATCACCCATGTgc | |
| | gactcCCACAGTCACTGGGgagtcttccctctctctctctctctctctcgggagcACATGAGGATCACCCATGTgcgactcCCACAGTCACTGGGgagtcttccc | |
| PL13657 | GTTTTAGAGCTAGAAATAGCAAGTTAAAATAAGGCTAGTCCGTTATCAACTTGAAAAAGTGGCACCGAGTCGGTGCGAAGTTCATCTGTACCACC | 16,678 |
| | GGCAAACTGCCCGTGCCTTGGCCCACCCTCGTCACCACCCTGACGTACGGTCCTGTGAGCTTACATACAAgggagcACATGAGGATCACCCATGTgc | |
| | gactcCCACAGTCACTGGGgagtcttccctctctctctctctctctctcgggagcACATGAGGATCACCCATGTgcgactcCCACAGTCACTGGGgagtcttcccTCTCT | |
| | CTCGGGTCAGGAGCCCCCCCCTGAACCCAGGATAACCCTCAAAGTCGGGGGGC | |
| PL13658 | GTTTTAGAGCTAGAAATAGCAAGTTAAAATAAGGCTAGTCCGTTATCAACTTGAAAAAGTGGCACCGAGTCGGTGCGAAGTTCATCTGTACCACC | 16,679 |
| | GGCAAACTGCCCGTGCCTTGGCCCACCCTCGTCACCACCCTGACGTACGGTCCTGTGAGCTTACATACAACTAACATAgcACATGAGGATCACCCA | |
| | TGTgc | |
| PL13659 | GTTTTAGAGCTAGAAATAGCAAGTTAAAATAAGGCTAGTCCGTTATCAACTTGAAAAAGTGGCACCGAGTCGGTGCGAAGTTCATCTGTACCACC | 16,680 |
| | GGCAAACTGCCCGTGCCTTGGCCCACCCTCGTCACCACCCTGACGTACGGTCCTGTGAGCTTACATACAACTAACATAgcACATGAGGATCACCCA | |
| | TGTgcTCTCTCTCGGGTCAGGAGCCCCCCCCTGAACCCAGGATAACCCTCAAAGTCGGGGGGC | |
| PL13660 | GTTTTAGAGCTAGAAATAGCAAGTTAAAATAAGGCTAGTCCGTTATCAACTTGAAAAAGTGGCACCGAGTCGGTGCGAAGTTCATCTGTACCACC | 16,681 |
| | GGCAAACTGCCCGTGCCTTGGCCCACCCTCGTCACCACCCTGACGTACGGTCCTGTGAGCTTACATACAACTAACATAgggagcACATGAGGATCA | |
| | CCCATGTgcgactcCCACAGTCACTGGGgagtcttccc | |
| PL13661 | GTTTTAGAGCTAGAAATAGCAAGTTAAAATAAGGCTAGTCCGTTATCAACTTGAAAAAGTGGCACCGAGTCGGTGCGAAGTTCATCTGTACCACC | 16,682 |
| | GGCAAACTGCCCGTGCCTTGGCCCACCCTCGTCACCACCCTGACGTACGGTCCTGTGAGCTTACATACAACTAACATAgggagcACATGAGGATCA | |
| | CCCATGTgcgactcCCACAGTCACTGGGgagtcttcccTCTCTCTCGGGTCAGGAGCCCCCCCCTGAACCCAGGATAACCCTCAAAGTCGGGGGGC | |
| PL13662 | GTTTTAGAGCTAGAAATAGCAAGTTAAAATAAGGCTAGTCCGTTATCAACTTGAAAAAGTGGCACCGAGTCGGTGCGAAGTTCATCTGTACCACC | 16,683 |
| | GGCAAACTGCCCGTGCCTTGGCCCACCCTCGTCACCACCCTGACGTACGGTCCTGTGAGCTTACATACAACTAACATAgggagcACATGAGGATCA | |
| | CCCATGTgcgactcCCACAGTCACTGGGgagtcttccctctctctctctctctctctcgggagcACATGAGGATCACCCATGTgcgactcCCACAGTCACTGGGgagtc | |
| | ttccc | |
| PL13663 | GTTTTAGAGCTAGAAATAGCAAGTTAAAATAAGGCTAGTCCGTTATCAACTTGAAAAAGTGGCACCGAGTCGGTGCGAAGTTCATCTGTACCACC | 16,684 |
| | GGCAAACTGCCCGTGCCTTGGCCCACCCTCGTCACCACCCTGACGTACGGTCCTGTGAGCTTACATACAACTAACATAgggagcACATGAGGATCA | |
| | CCCATGTgcgactcCCACAGTCACTGGGgagtcttccctctctctctctctctctctcgggagcACATGAGGATCACCCATGTgcgactcCCACAGTCACTGGGgagtc | |
| | ttcccTCTCTCTCGGGTCAGGAGCCCCCCCCTGAACCCAGGATAACCCTCAAAGTCGGGGGGC | |

### Example 7: Evaluation of Rewriting Activity of Exemplary Gene Modifying Polypeptides Using Cis Template RNAs

[0890] This example demonstrates the rewrite activity of exemplary gene modifying systems generated in Example 6 using the benchmark cis template RNA and normalized to exemplary gene modifying polypeptide PLV4921.

[0891] Before evaluating the rewriting activities of the gene modifying polypeptides of Example 6 using trans templates, 214 of the polypeptides were evaluated using a ‘cis’ template RNA containing both guide RNA and a 3′-extension comprising the PBS and template sequences, where the template is comprised of homology 1, edit and homology 2. Each exemplary gene modifying system (the combination of exemplary gene modifying polypeptide and the ‘cis’ template RNA) was tested to determine its genome-editing capacity using mammalian U2OS cells carrying a genomic landing pad that expresses a BFP-GFP SNP reporter. The U2OS cells are BFP-expressing and can be converted to a GFP-expressing cell line via a single base pair substitution programmed by the cis template RNA. The U2OS cells were electroporated with each exemplary gene modifying system, in the form of plasmid encoding an individual exemplary gene modifying polypeptide and a second plasmid encoding the cis template RNA.

[0892] Cells were analyzed by flow cytometry 4 days post-electroporation of the gene modifying system. The percentage of GFP cells was used as a measure for rewriting activity and compared to the rewriting activity of a benchmark gene modifying system containing an exemplary gene modifying polypeptide and the cis template RNA (see e.g., workflow shown in FIG. 7A).

[0893] The sequence of the benchmark gene modifying polypeptide and cis template RNA are provided here:

PLV4921:
(SEQ ID NO: 16,709)
MPAAKRVKLDGGDKKYSIGLDIGTNSVGWAVITDEYKVPSKKFKVLGNTDRHSIKKNLIGALLF
DSGETAEATRLKRTARRRYTRRKNRICYLQEIFSNEMAKVDDSFFHRLEESFLVEEDKKHERHP
IFGNIVDEVAYHEKYPTIYHLRKKLVDSTDKADLRLIYLALAHMIKFRGHFLIEGDLNPDNSDV
DKLFIQLVQTYNQLFEENPINASGVDAKAILSARLSKSRRLENLIAQLPGEKKNGLFGNLIALS
LGLTPNFKSNFDLAEDAKLQLSKDTYDDDLDNLLAQIGDQYADLFLAAKNLSDAILLSDILRVN
TEITKAPLSASMIKRYDEHHQDLILLKALVRQQLPEKYKEIFFDQSKNGYAGYIDGGASQEEFY
KFIKPILEKMDGTEELLVKLNREDLLRKQRTFDNGSIPHQIHLGELHAILRRQEDFYPFLKDNR
EKIEKILTFRIPYYVGPLARGNSRFAWMTRKSEETITPWNFEEVVDKGASAQSFIERMTNFDKN
LPNEKVLPKHSLLYEYFTVYNELTKVKYVTEGMRKPAFLSGEQKKAIVDLLFKTNRKVTVKQLK
EDYFKKIECFDSVEISGVEDRFNASLGTYHDLLKIIKDKDFLDNEENEDILEDIVLTLTLFEDR
EMIEERLKTYAHLFDDKVMKQLKRRRYTGWGRLSRKLINGIRDKQSGKTILDFLKSDGFANRNF
MQLIHDDSLTFKEDIQKAQVSGQGDSLHEHIANLAGSPAIKKGILQTVKVVDELVKVMGRHKPE
NIVIEMARENQTTQKGQKNSRERMKRIEEGIKELGSQILKEHPVENTQLQNEKLYLYYLQNGRD
MYVDQELDINRLSDYDVDHIVPQSFLKDDSIDNKVLTRSDKARGKSDNVPSEEVVKKMKNYWRQ
LLNAKLITQRKFDNLTKAERGGLSELDKAGFIKRQLVETRQITKHVAQILDSRMNTKYDENDKL
IREVKVITLKSKLVSDFRKDFQFYKVREINNYHHAHDAYLNAVVGTALIKKYPKLESEFVYGDY
KVYDVRKMIAKSEQEIGKATAKYFFYSNIMNFFKTEITLANGEIRKRPLIETNGETGEIVWDKG
RDFATVRKVLSMPQVNIVKKTEVQTGGFSKESILPKRNSDKLIARKKDWDPKKYGGFDSPTVAY
SVLVVAKVEKGKSKKLKSVKELLGITIMERSSFEKNPIDFLEAKGYKEVKKDLIIKLPKYSLFE
LENGRKRMLASAGELQKGNELALPSKYVNFLYLASHYEKLKGSPEDNEQKQLFVEQHKHYLDEI
IEQISEFSKRVILADANLDKVLSAYNKHRDKPIREQAENIIHLFTLTNLGAPAAFKYFDTTIDR
KRYTSTKEVLDATLIHQSITGLYETRIDLSQLGGDSGGSSGGSSGSETPGTSESATPESSGGSS
GGSSTLNIEDEYRLHETSKEPDVSLGSTWLSDFPQAWAETGGMGLAVRQAPLIIPLKATSTPVS
IKQYPMSQEARLGIKPHIQRLLDQGILVPCQSPWNTPLLPVKKPGTNDYRPVQDLREVNKRVED
IHPTVPNPYNLLSGLPPSHQWYTVLDLKDAFFCLRLHPTSQPLFAFEWRDPEMGISGQLTWTRL
PQGFKNSPTLFNEALHRDLADFRIQHPDLILLQYVDDLLLAATSELDCQQGTRALLQTLGNLGY
RASAKKAQICQKQVKYLGYLLKEGQRWLTEARKETVMGQPTPKTPRQLREFLGKAGFCRLFIPG
FAEMAAPLYPLTKPGTLFNWGPDQQKAYQEIKQALLTAPALGLPDLTKPFELFVDEKQGYAKGV
LTQKLGPWRRPVAYLSKKLDPVAAGWPPCLRMVAAIAVLTKDAGKLTMGQPLVILAPHAVEALV
KQPPDRWLSNARMTHYQALLLDTDRVQFGPVVALNPATLLPLPEEGLQHNCLDILAEAHGTRPD
LTDQPLPDADHTWYTDGSSLLQEGQRKAGAAVTTETEVIWAKALPAGTSAQRAELIALTQALKM
AEGKKLNVYTDSRYAFATAHIHGEIYRRRGWLTSEGKEIKNKDEILALLKALFLPKRLSIIHCP
GHQKGHSAEARGNRMADQAARKAAITETPDTSTLLIENSSPSGGSKRTADGSEFEKRTADGSEF
ESPKKKAKVE
PLV4114
(SEQ ID NO: 16,710)
5′-
AGAAGTCGTGCTGCTTCATGGTTTTAGAGCTAGAAATAGCAAGTTAAAATAAGGCTAGTCCG
TTATCAACTTGAAAAAGTGGCACCGAGTCGGTGCACCCTGACCTACGGCGTGCAGTGCTTCG
GCCGCTACCCCGATCACATGAAGCAGCACGAC-3′

[0894] FIG. 7B shows a graph of the rewrite activity (normalized to PLV4921) for select exemplary gene modifying polypeptides having the selected polypeptide configurations (see FIG. 6A) and comprising exemplary RBP domains comprising 1, 2, or 4 MCP repeats. Exemplary gene modifying polypeptides comprised either a first exemplary RT domain (left shaded bars) or a second exemplary RT domain (right lighter shaded bars).

Exemplary gene modifying polypeptides shown in FIG. 7B:

| Driver containing a | Driver containing a |
|---|---|
| first exemplary RT | second exemplary RT |
| (ID of plasmid | (ID of plasmid |
| encoding) | encoding) |
| PL11941 | PL11989 |
| PL11944 | PL11992 |
| PL11981 | PL12018 |
| PL11945 | PL11993 |
| PL11949 | PL12034 |
| PL11973 | PL11998 |
| PL12109 | PL12037 |
| PL12113 | PL12053 |
| PL12115 | |
| PL12117 | PL12045 |
| PL12120 | PL12047 |
| PL12085 | PL12097 |
| PL12088 | |
| PL12086 | PL12101 |
| PL12095 | PL12104 |
| PL12087 | PL12108 |
| PL12096 | PL12099 |

[0895] The results show that many exemplary gene modifying polypeptides, comprising all configurations tested, number of MCP repeats, and both RT domains, exhibit BFP to GFP rewriting activity in U2OS cells and that their rewrite activities are comparable to that of benchmark gene modifying polypeptide PLV4921 when combined with a cis template RNA. Additionally, the experiment identified 36 exemplary gene modifying polypeptides that were more than 75% as active as the benchmark gene modifying polypeptide when combined with a cis template RNA, and of these 12 exemplary gene modifying polypeptides that were more than 90% as active as the benchmark; sequence exemplary gene modifying polypeptides are provided in Table X0 below. Activity with the cis template RNA demonstrates that an exemplary gene modifying polypeptide is active and potentially capable of rewriting using a trans template RNA.

The exemplary gene modifying polypeptides that had >75% Rewrite activity relative to PLV4921 are listed in Table X0.

TABLE X0
Exemplary gene modifying polypeptides having >75%
rewriting activity relative to PLV4921

| Driver (ID of plasmid | |
|---|---|
| encoding) | Rewrite Activity (normalized to PLV4921) |
| PL12086 | 1.057 |
| PL11941 | 1.039 |
| PL11957 | 1.035 |
| PL11981 | 1.026 |
| PL12089 | 0.956 |
| PL11949 | 0.941 |
| PL12095 | 0.921 |
| PL12092 | 0.917 |
| PL12018 | 0.889 |
| PL11945 | 0.885 |
| PL11993 | 0.885 |
| PL11973 | 0.865 |
| PL11994 | 0.849 |
| PL12088 | 0.847 |
| PL11996 | 0.842 |
| PL12053 | 0.838 |
| PL11995 | 0.827 |
| PL11982 | 0.820 |
| PL12034 | 0.820 |
| PL11958 | 0.813 |
| PL11947 | 0.811 |
| PL12085 | 0.801 |
| PL12101 | 0.801 |
| PL12029 | 0.800 |
| PL11984 | 0.789 |
| PL11983 | 0.773 |
| PL11950 | 0.771 |
| PL12006 | 0.771 |
| PL11960 | 0.762 |
| PL12020 | 0.758 |
| PL11944 | 0.758 |
| PL12104 | 0.757 |
| PL12113 | 0.755 |
| PL11969 | 0.753 |
| PL12017 | 0.753 |
| PL11985 | 0.746 |

### Example 9: Characterizing Combinations of Pools of Exemplary Trans Template with Exemplary Gene Modifying Polypeptides

[0896] This example characterizes the rewriting activity and trans template preferences of approximately 18 of the exemplary gene modifying polypeptides generated in Example 6 and determined to be capable of rewriting when combined with a cis template RNA in Example 7. The 18 exemplary gene modifying polypeptides (amino acid sequences provided in Example 6) listed below each comprise an RT domain comprising the amino acid sequence of SEQ ID NO: 16,711 and a Cas9 endonuclease domain comprising the amino acid sequence of SEQ ID NO: 16,712.

(SEQ ID NO: 16,711)
TAPLEEEYRLFLEAPIQNVTLLEQWKREIPKVWAEINPPGLASTQAPIHVQLLSTALPVRVRQYPITLEA
KRSLRETIRKFRAAGILRPVHSPWNTPLLPVRKSGTSEYRMVQDLREVNKRVETIHPTVPNPYTLLSLLP
PDRIWYSVLDLKDAFFCIPLAPESQLIFAFEWADAEEGESGQLTWTRLPQGFKNSPTLFNEALNRDLQGF
RLDHPSVSLLQYVDDLLIAADTQAACLSATRDLLMTLAELGYRVSGKKAQLCQEEVTYLGFKIHKGSRSL
SNSRTQAILQIPVPKTKRQVREFLGKIGYCRLFIPGFAELAQPLYAATRPGNDPLVWGEKEEEAFQSLKL
ALTQPPALALPSLDKPFQLFVEETSGAAKGVLTQALGPWKRPVAYLSKRLDPVAAGWPRCLRAIAAAALL
TREASKLTFGQDIEITSSHNLESLLRSPPDKWLTNARITQYQVLLLDPPRVRFKQTAALNPATLLPETDD
TLPIHHCLDTLDSLTSTRPDLTDQPLAQAEATLFTDGSSYIRDGKRYAGAAVVTLDSVIWAEPLPIGTSA
QKAELIALTKALEWSKDKSVNIYTDSRYAFATLHVHGMIYRERGWLTAGGKAIKNAPEILALLTAVWLPK
RVAVMHCKGHQKDDAPTSTGNRRADEVAREVAIRPLSTQATIS
(SEQ ID NO: 16,712)
DKKYSIGLDIGTNSVGWAVITDEYKVPSKKFKVLGNTDRHSIKKNLIGALLFDSGETAEATRLKRTARRR
YTRRKNRICYLQEIFSNEMAKVDDSFFHRLEESFLVEEDKKHERHPIFGNIVDEVAYHEKYPTIYHLRKK
LVDSTDKADLRLIYLALAHMIKFRGHFLIEGDLNPDNSDVDKLFIQLVQTYNQLFEENPINASGVDAKAI
LSARLSKSRRLENLIAQLPGEKKNGLFGNLIALSLGLTPNFKSNFDLAEDAKLQLSKDTYDDDLDNLLAQ
IGDQYADLFLAAKNLSDAILLSDILRVNTEITKAPLSASMIKRYDEHHQDLTLLKALVRQQLPEKYKEIF
FDQSKNGYAGYIDGGASQEEFYKFIKPILEKMDGTEELLVKLNREDLLRKQRTFDNGSIPHQIHLGELHA
ILRRQEDFYPFLKDNREKIEKILTFRIPYYVGPLARGNSRFAWMTRKSEETITPWNFEEVVDKGASAQSF
IERMTNFDKNLPNEKVLPKHSLLYEYFTVYNELTKVKYVTEGMRKPAFLSGEQKKAIVDLLFKTNRKVTV
KQLKEDYFKKIECFDSVEISGVEDRFNASLGTYHDLLKIIKDKDFLDNEENEDILEDIVLTLTLFEDREM
IEERLKTYAHLFDDKVMKQLKRRRYTGWGRLSRKLINGIRDKQSGKTILDFLKSDGFANRNFMQLIHDDS
LTFKEDIQKAQVSGQGDSLHEHIANLAGSPAIKKGILQTVKVVDELVKVMGRHKPENIVIEMARENQTTQ
KGQKNSRERMKRIEEGIKELGSQILKEHPVENTQLQNEKLYLYYLQNGRDMYVDQELDINRLSDYDVDHI
VPQSFLKDDSIDNKVLTRSDKARGKSDNVPSEEVVKKMKNYWRQLLNAKLITQRKFDNLTKAERGGLSEL
DKAGFIKRQLVETRQITKHVAQILDSRMNTKYDENDKLIREVKVITLKSKLVSDFRKDFQFYKVREINNY
HHAHDAYLNAVVGTALIKKYPKLESEFVYGDYKVYDVRKMIAKSEQEIGKATAKYFFYSNIMNFFKTEIT
LANGEIRKRPLIETNGETGEIVWDKGRDFATVRKVLSMPQVNIVKKTEVQTGGFSKESILPKRNSDKLIA
RKKDWDPKKYGGFDSPTVAYSVLVVAKVEKGKSKKLKSVKELLGITIMERSSFEKNPIDFLEAKGYKEVK
KDLIIKLPKYSLFELENGRKRMLASAGELQKGNELALPSKYVNFLYLASHYEKLKGSPEDNEQKQLFVEQ
HKHYLDEIIEQISEFSKRVILADANLDKVLSAYNKHRDKPIREQAENIIHLFTLTNLGAPAAFKYFDTTI
DRKRYTSTKEVLDATLIHQSITGLYETRIDLSQLGGD

The exemplary gene modifying polypeptides are:

| Configuration | Driver (ID of plasmid |
|---|---|
| details | encoding) |
| Config1_1MCP A | PL11941 |
| Config1_1MCP B | PL11944 |
| Config1_2MCP A | PL11981 |
| Config1_2MCP B | PL11945 |
| Config1_4MCP A | PL11949 |
| Config1_4MCP B | PL11973 |
| Config2_1MCP A | PL12109 |
| Config2_2MCP A | PL12113 |
| Config2_2MCP B | PL12115 |
| Config2_4MCP A | PL12117 |
| Config2_4MCP B | PL12120 |
| Config3_1MCP A | PL12085 |
| Config3_1MCP B | PL12088 |
| Config3_2MCP A | PL12086 |
| Config3_2MCP B | PL12095 |
| Config3_4MCP A | PL12087 |
| Config3_4MCP B | PL12096 |
| Config2_1MCP A | PL12037 |

[0897] The exemplary gene modifying polypeptides included 6 from each of the configurations selected in Example 7 and encompassed exemplars having 1, 2, or 4 RBP repeats and two different linker combinations connecting each of the three protein domains.

[0898] The exemplary trans template RNAs of the pools encompassed exemplars having: linkers of either 8 or 16 nucleotides; 1, 2, or 4 RRS repeats (MS2 sequences); PBSs of 8 or 13 nucleotides (or a scrambled random PBS for negative controls); and 5′ end-protecting Cas9 scaffolds with 16 nucleotide spacers or no 5′ end protecting feature.

| | Plasmid (registry |
|---|---|
| Pool number | ID) |
| 1xMS2_PBS8 | PL13280 |
| 1xMS2_PBS8 | PL13472 |
| 1xMS2_PBS8 | PL13286 |
| 1xMS2_PBS8 | PL13478 |
| 2xMS2_PBS8 | PL13282 |
| 2xMS2_PBS8 | PL13474 |
| 2xMS2_PBS8 | PL13288 |
| 2xMS2_PBS8 | PL13480 |
| 4xMS2_PBS8 | PL13284 |
| 4xMS2_PBS8 | PL13476 |
| 4xMS2_PBS8 | PL13290 |
| 4xMS2_PBS8 | PL13578 |
| 1xMS2_PBS13 | PL13292 |
| 1xMS2_PBS13 | PL13484 |
| 1xMS2_PBS13 | PL13298 |
| 1xMS2_PBS13 | PL13490 |
| 2xMS2_PBS13 | PL13294 |
| 2xMS2_PBS13 | PL13582 |
| 2xMS2_PBS13 | PL13300 |
| 2xMS2_PBS13 | PL13492 |
| 4xMS2_PBS13 | PL13296 |
| 4xMS2_PBS13 | PL13488 |
| 4xMS2_PBS13 | PL13302 |
| 4xMS2_PBS13 | PL13494 |
| 1xMS2_scrPBS | PL13316 |
| 1xMS2_scrPBS | PL13604 |
| 1xMS2_scrPBS | PL13322 |
| 1xMS2_scrPBS | PL13610 |
| 2xMS2_scrPBS | PL13318 |
| 2xMS2_scrPBS | PL13606 |
| 2xMS2_scrPBS | PL13324 |
| 2xMS2_scrPBS | PL13612 |
| 4xMS2_scrPBS | PL13320 |
| 4xMS2_scrPBS | PL13512 |
| 4xMS2_scrPBS | PL13326 |

[0899] The rewriting activity of exemplary gene modifying systems described in this example were normalized to a benchmark gene modifying system containing an exemplary gene modifying polypeptide (PLV4921) and a cis template RNA encoding the same edit (PLV4106). The sequence of PLV4921 was provided in Example 7, and the sequence of the cis-template used for normalization in this example is provided below:

PLV4106
(SEQ ID NO: 16,713)
GCCGAAGCACTGCACGCCGTGTTTTAGAGCTAGAAATAGCAAGTTAAAA
TAAGGCTAGTCCGTTATCAACTTGAAAAAGTGGCACCGAGTCGGTGCAC
CCTGACGTACGGCGTGCAGTGCTT

The sequence of the gRNA that comprises the 3^{rd} component of the gene modifying system is as below:

PLV4165
(SEQ ID NO: 16,714)
GCCGAAGCACTGCACGCCGTGTTTTAGAGCTAGAAATAGCAAGTTAAAA
TAAGGCTAGTCCGTTATCAACTTGAAAAAGTGGCACCGAGTCGGTGC

[0900] Each exemplary trans-gene modifying system (the combination of exemplary gene modifying polypeptide, exemplary trans template RNA, and exemplary gRNA) was tested to determine its genome-editing capacity using mammalian U2OS cells carrying a genomic landing pad that expresses a BFP-GFP SNP reporter. The U2OS cells are BFP-expressing and can be converted to a GFP-expressing cell line via a single base pair substitution programmed by the trans template RNAs. The U2OS cells were electroporated with each exemplary trans-gene modifying system, in the form of a plasmid encoding an individual exemplary gene modifying polypeptide, a second plasmid encoding the exemplary gRNA, and a pool of plasmids encoding a subset of exemplary trans template RNAs. The trans template RNAs of a given pool were characterized by having similar primer binding site (PBS) length (8 or 13 nucleotides) and an RBP recruitment site (RRS) containing the same number of MS2 sequences (1, 2, or 4). Negative control pools contained trans template RNAs containing scrambled sequence PBSs.

[0901] Cells were analyzed by flow cytometry 4 days post-electroporation of the gene modifying system. The percentage of GFP cells was used as a measure for rewriting activity and compared to the rewriting activity of a benchmark gene modifying system containing an exemplary gene modifying polypeptide (PLV4921) and a cis template RNA encoding the same edit.

[0902] FIG. 8 shows a heat map of the rewriting activity of the exemplary trans-gene modifying systems (normalized to PLV4921 with cis template RNA) in the BFP/GFP SNP reporter assay. The results show that several pools of trans template RNAs provide comparable or better rewriting activity than a cis template RNA. These results further confirm the rewriting activity of the 18 exemplary gene modifying polypeptides examined across trans templates of differing characteristics, and also demonstrate that rewriting activity can be improved by pairing exemplary gene modifying polypeptides with a trans template. The results also suggested that a trans template RNA containing a PBS length of 13 nucleotides on average provides better rewriting activity across the evaluated gene modifying polypeptides than a trans template RNA containing an 8 nucleotide PBS. The results also suggested that gene modifying polypeptides containing 2 or 4 RBP repeats (in this Example, 2 or 4 MCP domains) generally had higher rewriting activity than gene modifying polypeptides containing 1 RBP (1 MCP domain). The results also suggested that trans template RNAs containing 1 or 4 RRS repeats (in this example, 1 or 4 MS2 sequences) generally provided better rewriting activity across the evaluated gene modifying polypeptides than trans template RNAs containing 2 RRS repeats (2 MS2 sequences). The data reiterates that each tested configuration of the gene modifying polypeptide has rewriting activity.

### Example 10: Characterizing Combinations of Individual Exemplary Trans Templates with Exemplary Gene Modifying Polypeptides

[0903] This example characterizes the rewriting activity and trans template preferences of 6 of the exemplary gene modifying polypeptides generated in Example 6 and determined to be capable of rewriting and trans recruitment in Examples 7 and 9. The 6 exemplary gene modifying polypeptides (amino acid sequences provided in Example 6) listed below each comprise an RT domain comprising the amino acid sequence of SEQ ID NO: 16,711 and a Cas9 endonuclease domain comprising the amino acid sequence of SEQ ID NO: 16,712. 29 exemplary trans template RNAs of the 384 generated in Example 6 were tested using flow cytometry (assessing BFP to GFP conversion as described herein).

The exemplary gene modifying polypeptides are: PL11945, PL12095, PL12096, PL12109, PL12113, and PL12115.

[0904] The exemplary gene modifying polypeptides included at least one exemplar from each of the configurations selected in Examples 7 and 9 and encompassed exemplars having 1, 2, or 4 RBPs and two different linker combinations connecting each of the three protein domains.

[0905] The exemplary trans template RNAs of the pools encompassed exemplars having: linkers of either 8 or 16 nucleotides; 1 or 4 RRS repeats (MS2 sequences); PBSs of 13 nucleotides (or a scrambled random PBS for negative controls); and 5′ end-protecting Cas9 scaffolds with 16 nucleotide spacers, 5′ end-protecting Cas9 scaffolds without spacers, a control 5′ end-protecting ePEG, or no 5′ end protecting feature.

Exemplary Trans Templates Used in this Example

PL13292
PL13293
PL13296
PL13297
PL13298
PL13299
PL13302
PL13303
PL13388
PL13389
PL13392
PL13393
PL13394
PL13395
PL13398
PL13399
PL13484
PL13488
PL13489
PL13490
PL13491
PL13494
PL13580
PL13581
PL13584
PL13585
PL13586
PL13590
PL13591

[0906] The sequences of PLV4921 and the cis template RNA were provided in Example 7, and the sequences of exemplary gene modifying polypeptides and trans template RNAs were provided in Example 6.

[0907] Each exemplary trans-gene modifying system (the combination of exemplary gene modifying polypeptide, exemplary trans template RNA and exemplary gRNA) was tested to determine its genome-editing capacity using mammalian U2OS cells carrying a genomic landing pad that expresses a BFP-GFP SNP reporter. The U2OS cells are BFP-expressing and can be converted to a GFP-expressing cell line via a single base pair substitution programmed by the trans template RNAs. The U2OS cells were electroporated with each exemplary trans-gene modifying system, in the form of a plasmid encoding an individual exemplary gene modifying polypeptide, a second plasmid encoding the exemplary gRNA, and a third plasmid encoding an individual exemplary trans template RNA.

[0908] Cells were analyzed by flow cytometry 4 days post-electroporation of the gene modifying system. The percentage of GFP cells was used as a measure for rewriting activity and normalized to the rewriting activity of a gene modifying system containing the same gene modifying polypeptide and a cis template RNA.

[0909] FIG. 9 shows a heat map of the rewriting activity of the exemplary trans-gene modifying systems in the BFP/GFP SNP reporter assay. The results show a number of trans template RNAs provide comparable or better rewriting activity than a gene modifying system containing the same gene modifying polypeptide with a cis template RNA. These results also show that a trans template RNA containing a 5′ end-block comprising a Cas9 scaffold and a 16 nucleotide spacer provides better rewriting activity across most evaluated gene modifying polypeptides than a trans template RNA containing 5′ end-block Cas9 scaffold without a spacer. The results further indicate that the 5′end protecting Cas9 scaffold with 16 nt spacer provides better rewriting activity than a control 5′ end-protecting ePEG, or no 5′ end protecting feature.

### Example 11: Evaluating the Contributions of Trans Template RNA Components to Rewriting Activity

[0910] This Example demonstrates the importance of the RRS-RBP interaction to rewriting activity of gene modifying systems comprising a trans template RNA and exemplary RBP-containing gene modifying polypeptide.

[0911] Exemplary gene modifying systems comprised an RBP-containing gene modifying polypeptide E1 or an exemplary gene modifying polypeptide lacking an RBP G1 (each having previously demonstrated rewriting activity using cis templates, data not shown) and various trans template RNAs comprising a 5′ end block comprising a Cas9 scaffold and no spacer and either 4 RRSs (in this Example 4 MS2 sequences) or 1 RRS (1 MS2 sequence). Sequences for the exemplary gene modifying polypeptides tested in this Example are provided in Table X1 below.

TABLE X1
Exemplary gene modifying polypeptides

| Gene | Plasmid | | |
|---|---|---|---|
| modifying | (registry | | SEQ ID |
| polypeptide | ID) | Amino acid sequence | NO: |
| E1* | PL12113 | MPAAKRVKLDGGTAPLEEEYRLFLEAPIQNVTLLEQWKREIPK | 16,801 |
| | | VWAEINPPGLASTQAPIHVQLLSTALPVRVRQYPITLEAKRSLR | |
| | | ETIRKFRAAGILRPVHSPWNTPLLPVRKSGTSEYRMVQDLREV | |
| | | NKRVETIHPTVPNPYTLLSLLPPDRIWYSVLDLKDAFFCIPLAPE | |
| | | SQLIFAFEWADAEEGESGQLTWTRLPQGFKNSPTLFNEALNRD | |
| | | LQGFRLDHPSVSLLQYVDDLLIAADTQAACLSATRDLLMTLAE | |
| | | LGYRVSGKKAQLCQEEVTYLGFKIHKGSRSLSNSRTQAILQIPV | |
| | | PKTKRQVREFLGKIGYCRLFIPGFAELAQPLYAATRPGNDPLV | |
| | | WGEKEEEAFQSLKLALTQPPALALPSLDKPFQLFVEETSGAAK | |
| | | GVLTQALGPWKRPVAYLSKRLDPVAAGWPRCLRAIAAAALLT | |
| | | REASKLTFGQDIEITSSHNLESLLRSPPDKWLTNARITQYQVLLL | |
| | | DPPRVRFKQTAALNPATLLPETDDTLPIHHCLDTLDSLTSTRPD | |
| | | LTDQPLAQAEATLFTDGSSYIRDGKRYAGAAVVTLDSVIWAEP | |
| | | LPIGTSAQKAELIALTKALEWSKDKSVNIYTDSRYAFATLHVH | |
| | | GMIYRERGWLTAGGKAIKNAPEILALLTAVWLPKRVAVMHCK | |
| | | GHQKDDAPTSTGNRRADEVAREVAIRPLSTQATISAEAAAKEA | |
| | | AAKEAAAKEAAAKALEAEAAAKEAAAKEAAAKEAAAKAMA | |
| | | SNFTQFVLVDNGGTGDVTVAPSNFANGIAEWISSNSRSQAYKV | |
| | | TCSVRQSSAQNRKYTIKVEVPKGAWRSYLNMELTIPIFATNSD | |
| | | CELIVKAMQGLLKDGNPIPSAIAANSGIYGGSGGSMASNFTQFV | |
| | | LVDNGGTGDVTVAPSNFANGIAEWISSNSRSQAYKVTCSVRQS | |
| | | SAQNRKYTIKVEVPKGAWRSYLNMELTIPIFATNSDCELIVKA | |
| | | MQGLLKDGNPIPSAIAANSGIYAEAAAKEAAAKEAAAKEAAA | |
| | | KALEAEAAAKEAAAKEAAAKEAAAKADKKYSIGLDIGTNSVG | |
| | | WAVITDEYKVPSKKFKVLGNTDRHSIKKNLIGALLFDSGETAE | |
| | | ATRLKRTARRRYTRRKNRICYLQEIFSNEMAKVDDSFFHRLEE | |
| | | SFLVEEDKKHERHPIFGNIVDEVAYHEKYPTIYHLRKKLVDSTD | |
| | | KADLRLIYLALAHMIKFRGHFLIEGDLNPDNSDVDKLFIQLVQT | |
| | | YNQLFEENPINASGVDAKAILSARLSKSRRLENLIAQLPGEKKN | |
| | | GLFGNLIALSLGLTPNFKSNFDLAEDAKLQLSKDTYDDDLDNL | |
| | | LAQIGDQYADLFLAAKNLSDAILLSDILRVNTEITKAPLSASMIK | |
| | | RYDEHHQDLTLLKALVRQQLPEKYKEIFFDQSKNGYAGYIDG | |
| | | GASQEEFYKFIKPILEKMDGTEELLVKLNREDLLRKQRTFDNGS | |
| | | IPHQIHLGELHAILRRQEDFYPFLKDNREKIEKILTFRIPYYVGPL | |
| | | ARGNSRFAWMTRKSEETITPWNFEEVVDKGASAQSFIERMTNF | |
| | | DKNLPNEKVLPKHSLLYEYFTVYNELTKVKYVTEGMRKPAFL | |
| | | SGEQKKAIVDLLFKTNRKVTVKQLKEDYFKKIECFDSVEISGVE | |
| | | DRFNASLGTYHDLLKIIKDKDFLDNEENEDILEDIVLTLTLFEDR | |
| | | EMIEERLKTYAHLFDDKVMKQLKRRRYTGWGRLSRKLINGIR | |
| | | DKQSGKTILDFLKSDGFANRNFMQLIHDDSLTFKEDIQKAQVS | |
| | | GQGDSLHEHIANLAGSPAIKKGILQTVKVVDELVKVMGRHKPE | |
| | | NIVIEMARENQTTQKGQKNSRERMKRIEEGIKELGSQILKEHPV | |
| | | ENTQLQNEKLYLYYLQNGRDMYVDQELDINRLSDYDVDHIVP | |
| | | QSFLKDDSIDNKVLTRSDKARGKSDNVPSEEVVKKMKNYWRQ | |
| | | LLNAKLITQRKFDNLTKAERGGLSELDKAGFIKRQLVETRQITK | |
| | | HVAQILDSRMNTKYDENDKLIREVKVITLKSKLVSDFRKDFQF | |
| | | YKVREINNYHHAHDAYLNAVVGTALIKKYPKLESEFVYGDYK | |
| | | VYDVRKMIAKSEQEIGKATAKYFFYSNIMNFFKTEITLANGEIR | |
| | | KRPLIETNGETGEIVWDKGRDFATVRKVLSMPQVNIVKKTEVQ | |
| | | TGGFSKESILPKRNSDKLIARKKDWDPKKYGGFDSPTVAYSVL | |
| | | VVAKVEKGKSKKLKSVKELLGITIMERSSFEKNPIDFLEAKGYK | |
| | | EVKKDLIIKLPKYSLFELENGRKRMLASAGELQKGNELALPSK | |
| | | YVNFLYLASHYEKLKGSPEDNEQKQLFVEQHKHYLDEIIEQISE | |
| | | FSKRVILADANLDKVLSAYNKHRDKPIREQAENIIHLFTLTNLG | |
| | | APAAFKYFDTTIDRKRYTSTKEVLDATLIHQSITGLYETRIDLSQ | |
| | | LGGDKRTADGSEFESPKKKAKVE | |
| G2 | PLV10990 | MPAAKRVKLDGGDKKYSIGLDIGTNSVGWAVITDEYKVPSKK | 16,802 |
| | | FKVLGNTDRHSIKKNLIGALLFDSGETAEATRLKRTARRRYTR | |
| | | RKNRICYLQEIFSNEMAKVDDSFFHRLEESFLVEEDKKHERHPI | |
| | | FGNIVDEVAYHEKYPTIYHLRKKLVDSTDKADLRLIYLALAHM | |
| | | IKFRGHFLIEGDLNPDNSDVDKLFIQLVQTYNQLFEENPINASG | |
| | | VDAKAILSARLSKSRRLENLIAQLPGEKKNGLFGNLIALSLGLT | |
| | | PNFKSNFDLAEDAKLQLSKDTYDDDLDNLLAQIGDQYADLFL | |
| | | AAKNLSDAILLSDILRVNTEITKAPLSASMIKRYDEHHQDLTLL | |
| | | KALVRQQLPEKYKEIFFDQSKNGYAGYIDGGASQEEFYKFIKPI | |
| | | LEKMDGTEELLVKLNREDLLRKQRTFDNGSIPHQIHLGELHAIL | |
| | | RRQEDFYPFLKDNREKIEKILTFRIPYYVGPLARGNSRFAWMTR | |
| | | KSEETITPWNFEEVVDKGASAQSFIERMTNFDKNLPNEKVLPK | |
| | | HSLLYEYFTVYNELTKVKYVTEGMRKPAFLSGEQKKAIVDLLF | |
| | | KTNRKVTVKQLKEDYFKKIECFDSVEISGVEDRFNASLGTYHD | |
| | | LLKIIKDKDFLDNEENEDILEDIVLTLTLFEDREMIEERLKTYAH | |
| | | LFDDKVMKQLKRRRYTGWGRLSRKLINGIRDKQSGKTILDFLK | |
| | | SDGFANRNFMQLIHDDSLTFKEDIQKAQVSGQGDSLHEHIANL | |
| | | AGSPAIKKGILQTVKVVDELVKVMGRHKPENIVIEMARENQTT | |
| | | QKGQKNSRERMKRIEEGIKELGSQILKEHPVENTQLQNEKLYL | |
| | | YYLQNGRDMYVDQELDINRLSDYDVDHIVPQSFLKDDSIDNK | |
| | | VLTRSDKARGKSDNVPSEEVVKKMKNYWRQLLNAKLITQRKF | |
| | | DNLTKAERGGLSELDKAGFIKRQLVETRQITKHVAQILDSRMN | |
| | | TKYDENDKLIREVKVITLKSKLVSDFRKDFQFYKVREINNYHH | |
| | | AHDAYLNAVVGTALIKKYPKLESEFVYGDYKVYDVRKMIAKS | |
| | | EQEIGKATAKYFFYSNIMNFFKTEITLANGEIRKRPLIETNGETG | |
| | | EIVWDKGRDFATVRKVLSMPQVNIVKKTEVQTGGFSKESILPK | |
| | | RNSDKLIARKKDWDPKKYGGFDSPTVAYSVLVVAKVEKGKSK | |
| | | KLKSVKELLGITIMERSSFEKNPIDFLEAKGYKEVKKDLIIKLPK | |
| | | YSLFELENGRKRMLASAGELQKGNELALPSKYVNFLYLASHY | |
| | | EKLKGSPEDNEQKQLFVEQHKHYLDEIIEQISEFSKRVILADAN | |
| | | LDKVLSAYNKHRDKPIREQAENIIHLFTLTNLGAPAAFKYFDTT | |
| | | IDRKRYTSTKEVLDATLIHQSITGLYETRIDLSQLGGDGGAEAA | |
| | | AKEAAAKEAAAKEAAAKALEAEAAAKEAAAKEAAAKEAAA | |
| | | KAGGTAPLEEEYRLFLEAPIQNVTLLEQWKREIPKVWAEINPPG | |
| | | LASTQAPIHVQLLSTALPVRVRQYPITLEAKRSLRETIRKFRAA | |
| | | GILRPVHSPWNTPLLPVRKSGTSEYRMVQDLREVNKRVETIHP | |
| | | TVPNPYTLLSLLPPDRIWYSVLDLKDAFFCIPLAPESQLIFAFEW | |
| | | ADAEEGESGQLTWTRLPQGFKNSPTLFNEALNRDLQGFRLDHP | |
| | | SVSLLQYVDDLLIAADTQAACLSATRDLLMTLAELGYRVSGK | |
| | | KAQLCQEEVTYLGFKIHKGSRSLSNSRTQAILQIPVPKTKRQVR | |
| | | EFLGKIGYCRLFIPGFAELAQPLYAATRPGNDPL VWGEKEEEAF | |
| | | QSLKLALTQPPALALPSLDKPFQLFVEETSGAAKGVLTQALGP | |
| | | WKRPVAYLSKRLDPVAAGWPRCLRAIAAAALLTREASKLTFG | |
| | | QDIEITSSHNLESLLRSPPDKWLTNARITQYQVLLLDPPRVRFK | |
| | | QTAALNPATLLPETDDTLPIHHCLDTLDSLTSTRPDLTDQPLAQ | |
| | | AEATLFTDGSSYIRDGKRYAGAAVVTLDSVIWAEPLPIGTSAQ | |
| | | KAELIALTKALEWSKDKSVNIYTDSRYAFATLHVHGMIYRERG | |
| | | WLTAGGKAIKNAPEILALLTAVWLPKRVAVMHCKGHQKDDA | |
| | | PTSTGNRRADEVAREVAIRPLSTQATISAGKRTADGSEFEKRTA | |
| | | DGSEFESPKKKAKVE | |
| N863A | PLV1425 | MGKPIPNPLLGLDSTAPKKKRKVGIHGVPAADKKYSIGLDIGT | 16,803 |
| Cas9 | | NSVGWAVITDEYKVPSKKFKVLGNTDRHSIKKNLIGALLFDSG | |
| | | ETAEATRLKRTARRRYTRRKNRICYLQEIFSNEMAKVDDSFFH | |
| | | RLEESFLVEEDKKHERHPIFGNIVDEVAYHEKYPTIYHLRKKLV | |
| | | DSTDKADLRLIYLALAHMIKFRGHFLIEGDLNPDNSDVDKLFIQ | |
| | | LVQTYNQLFEENPINASGVDAKAILSARLSKSRRLENLIAQLPG | |
| | | EKKNGLFGNLIALSLGLTPNFKSNFDLAEDAKLQLSKDTYDDD | |
| | | LDNLLAQIGDQYADLFLAAKNLSDAILLSDILRVNTEITKAPLS | |
| | | ASMIKRYDEHHQDLTLLKALVRQQLPEKYKEIFFDQSKNGYA | |
| | | GYIDGGASQEEFYKFIKPILEKMDGTEELLVKLNREDLLRKQRT | |
| | | FDNGSIPHQIHLGELHAILRRQEDFYPFLKDNREKIEKILTFRIPY | |
| | | YVGPLARGNSRFAWMTRKSEETITPWNFEEVVDKGASAQSFIE | |
| | | RMTNFDKNLPNEKVLPKHSLLYEYFTVYNELTKVKYVTEGMR | |
| | | KPAFLSGEQKKAIVDLLFKTNRKVTVKQLKEDYFKKIECFDSV | |
| | | EISGVEDRFNASLGTYHDLLKIIKDKDFLDNEENEDILEDIVLTL | |
| | | TLFEDREMIEERLKTYAHLFDDKVMKQLKRRRYTGWGRLSRK | |
| | | LINGIRDKQSGKTILDFLKSDGFANRNFMQLIHDDSLTFKEDIQ | |
| | | KAQVSGQGDSLHEHIANLAGSPAIKKGILQTVKVVDELVKVM | |
| | | GRHKPENIVIEMARENQTTQKGQKNSRERMKRIEEGIKELGSQI | |
| | | LKEHPVENTQLQNEKLYLYYLQNGRDMYVDQELDINRLSDYD | |
| | | VDHIVPQSFLKDDSIDNKVLTRSDKARGKSDNVPSEEVVKKMK | |
| | | NYWRQLLNAKLITQRKFDNLTKAERGGLSELDKAGFIKRQLVE | |
| | | TRQITKHVAQILDSRMNTKYDENDKLIREVKVITLKSKLVSDFR | |
| | | KDFQFYKVREINNYHHAHDAYLNAVVGTALIKKYPKLESEFV | |
| | | YGDYKVYDVRKMIAKSEQEIGKATAKYFFYSNIMNFFKTEITL | |
| | | ANGEIRKRPLIETNGETGEIVWDKGRDFATVRKVLSMPQVNIV | |
| | | KKTEVQTGGFSKESILPKRNSDKLIARKKDWDPKKYGGFDSPT | |
| | | VAYSVLVVAKVEKGKSKKLKSVKELLGITIMERSSFEKNPIDFL | |
| | | EAKGYKEVKKDLIIKLPKYSLFELENGRKRMLASAGELQKGNE | |
| | | LALPSKYVNFLYLASHYEKLKGSPEDNEQKQLFVEQHKHYLD | |
| | | EIIEQISEFSKRVILADANLDKVLSAYNKHRDKPIREQAENIIHLF | |
| | | TLTNLGAPAAFKYFDTTIDRKRYTSTKEVLDATLIHQSITGLYE | |
| | | TRIDLSQLGGDSRADPKKKRKVEFSR | |

*Sequence is included in the driver tables.

The exemplary cis template RNA is PLV4106 (sequence described earlier in Example 9). The exemplary trans template RNAs are as listed in Table X2 below.

TABLE X2
Exemplary trans template RNAs

| Trans | | |
|---|---|---|
| template | Plasmid | |
| RNA | (registry ID) | Plasmid name (see Table S4) |
| 4x MS2 no | PL13584 | 305 scaffold_RT12_P13_L8_4xMS2_{—} |
| spacer | | |
| 1x MS2 no | PL13580 | 301 scaffold_RT12_P13_L8_1xMS2_{—} |
| spacer | | |

[0912] Negative control polypeptides included N863A Cas9 (lacking any RT or RBP). Exemplary gene modifying systems were tested to determine their genome-editing capacity using mammalian U2OS cells carrying a genomic landing pad that expresses a BFP-GFP SNP reporter. The U2OS cells are BFP-expressing and can be converted to a GFP-expressing cell line via a single base pair substitution programmed by the trans template RNAs. The U2OS cells were electroporated with varying doses (37.5 ng, 75 ng, or 150 ng) of a plasmid encoding exemplary trans template RNA, 300 ng plasmid encoding exemplary gene modifying polypeptide, and 200 ng of a second plasmid encoding the exemplary gRNA (i.e., gRNA PLV4165, as described in Example 9).

[0913] Cells were analyzed by flow cytometry 4 days post-electroporation of the gene modifying system. The percentage of GFP-expressing cells was used as a measure for rewriting activity.

[0914] FIG. 10 shows graphs of rewriting activity for the exemplary gene modifying systems. The results show that negative control N863A Cas9 showed minimal rewriting activity. The RBP-less gene modifying polypeptide G2 showed no rewriting activity when combined with a trans template RNA comprising a 4× or 1×RRS and a 5′ end block comprising a Cas9 scaffold and lacking a spacer. The results show that the exemplary RBP-containing gene modifying polypeptide E1 shows rewriting activity when combined with a trans template RNA comprising a 4×RRS and a 5′ end block Cas9 scaffold lacking a spacer, and that rewriting activity increases with increasing dose of trans template RNA. E1 shows low levels of rewriting activity when combined with a trans template RNA comprising a 1×RRS and a 5′ end block Cas9 scaffold lacking a spacer, but that rewriting activity increases with increasing dose of trans template RNA. The results show that the RRS-RBP interaction can be important for assembly of the trans template RNA:gene modifying polypeptide:target DNA complex when using trans template RNAs comprising a 5′ end block Cas9 scaffold and lacking a spacer. Without wishing to be bound by theory, even a weaker RBP:RRS interaction as may be provided by the RBP of E1 interacting with a 1×RRS appears to provide sufficient interaction as the dose of trans template RNA increases to provide observable rewriting activity.

[0915] Taken together, these results show that the RRS:RBP interaction between a trans template RNA and an exemplary gene modifying polypeptide is critical to recruitment and rewriting activity of gene modifying systems comprising said components when the trans template RNA contains a 5′ end block comprising a Cas9 scaffold and lacking a spacer.

### Example 12: Evaluating the Contribution of the 5′ End Block Spacer to Rewriting Activity

[0916] This Example demonstrates the importance and role of the 5′ end block to rewriting activity of gene modifying systems comprising a trans template RNA and exemplary RBP-containing gene modifying polypeptide. The presence of a 5′ end block with Cas9 scaffold and spacer increased rewriting activity of gene modifying systems in Example 10 relative to similar systems where the 5′ end block contained a Cas9 scaffold and no spacer. To further investigate the role of the spacer in the 5′ end block, exemplary gene modifying systems were assembled comprising an exemplary RBP-containing gene modifying polypeptide E1 and various trans template RNAs comprising a 5′ end block comprising a Cas9 scaffold and no spacer (no spacer) or a 16 nucleotide spacer (spacer), and either 4 RRSs (in this Example 4 MS2 sequences) or 1 RRS (1 MS2 sequence). Without wishing to be bound by theory, a 16 nucleotide spacer is thought to enable only limited nicking activity by the S. pyogenes Cas9 domain of E1, but sufficient to enable binding of the E1:spacer to the spacer's complementary sequence in the target DNA. A control trans template RNA comprising a 5′ end block not comprising a Cas9 scaffold (pseudoknot) was also included. A gRNA targeting the site where the 16 nucleotide spacer would have (with a full spacer length of 20 nt) targeted a nick was included in some samples (+2^{nd} nick). N863A Cas9 (lacking any RT or RBP) was used as a control polypeptide. The exemplary sgRNA used in this Example was PLV4165 (sequence described in Example 9). Exemplary gene modifying polypeptides used in this Example were those described in Example 11. The exemplary cis template RNA used in this Example was PLV4106 (sequence described in Example 9). The exemplary trans template RNAs used in this Example were as listed in Table X3 below.

TABLE X3
Exemplary trans template RNAs

| Trans template | Plasmid | |
|---|---|---|
| RNA | (registry ID) | Plasmid name (see Table S4) |
| 4xMS2 | PLV13392 | 113 |
| pseudoknot | | pseudoknot_RT12_P13_L8_4xMS2_{—} |
| 4xMS2 no spacer | PLV13584 | 305 |
| | | scaffold_RT12_P13_L8_4xMS2_{—} |
| 4xMS2 + spacer | PLV13488 | 209 |
| | | g16A_RT12_P13_L8_4xMS2_{—} |
| 1xMS2 | PLV13388 | 109 |
| pseudoknot | | pseudoknot_RT12_P13_L8_1xMS2_{—} |
| 1xMS2 no spacer | PLV13580 | 301 |
| | | scaffold_RT12_P13_L8_1xMS2_{—} |
| 1xMS2 + spacer | PLV13484 | 205 |
| | | g16A_RT12_P13_L8_1xMS2_{—} |

The exemplary 2^{nd} nick gRNA that binds/nicks the same target as the 5′ spacer in PL13488 and PL13484 was PLV4163, having the nucleic acid sequence:

(SEQ ID NO: 16,715)
CCGGCAAGCTGCCCGTGCCCGTTTTAGAGCTAGAAATAGCAAGTTAAAA
TAAGGCTAGTCCGTTATCAACTTGAAAAAGTGGCACCGAGTCGGTGC.

[0917] Exemplary gene modifying systems were tested to determine their genome-editing capacity using mammalian U2OS cells carrying a genomic landing pad that expresses a BFP-GFP SNP reporter. The U2OS cells are BFP-expressing and can be converted to a GFP-expressing cell line via a single base pair substitution programmed by the trans template RNAs. The U2OS cells were electroporated with each exemplary trans-gene modifying system, in the form of a plasmid encoding an individual exemplary gene modifying polypeptide, a second plasmid encoding the exemplary gRNA, a third plasmid encoding an individual exemplary trans template RNA, and a fourth plasmid (if needed for that sample) encoding the 2^{nd} nick gRNA.

[0918] Cells were analyzed by flow cytometry 4 days post-electroporation of the gene modifying system. The percentage of GFP-expressing cells was used as a measure for rewriting activity.

[0919] FIGS. 11A-11B show graphs of rewriting activity for the exemplary gene modifying systems. The results show that negative control N863A Cas9 showed minimal rewriting activity with trans template RNA containing a 4×RRS and a 5′ end block with Cas9 scaffold and spacer. A positive control cis template RNA showed significant rewriting activity when combined with the gene modifying polypeptide (FIGS. 11A-11B).

[0920] The results show that the addition of a gRNA directing a nick to the same target site DNA as the spacer of the trans template 5′ end block (striped bars) did not increase rewriting activity (open bars; compare pseudoknot, no spacer, and +spacer with and without 2^{nd} nick). The lack of any increase in rewriting with the gRNA suggests that for these exemplary gene modifying systems nicking at the site targeted by the 5′ end block spacer is not important for rewriting activity.

[0921] In contrast, the results show that the presence of the spacer in the 5′ end block of the trans template RNA significantly increased rewriting activity (FIGS. 11A-11B). The presence of the spacer increased rewriting activity in both a 4×RRS trans template RNA system as well as a 1×RRS trans template RNA system, suggesting that the contributions of the RRS:RBP interaction and the 5′ end block spacer:additional gene modifying polypeptide interaction to rewriting activity are additive. This result further suggests that the 5′ end block spacer may rescue an otherwise weak RRS:RBP interaction (compare FIG. 11A no spacer to +spacer versus FIG. 11B no spacer to +spacer). Rewriting activity using systems comprising a trans template RNA comprising a 4×RRS and a 5′ end block with Cas9 scaffold and spacer was unaffected by addition of the gRNA providing nicking (compare +spacer with and without 2^{nd} nick). This result suggests that the primary role of the 5′ end block spacer is providing Cas9-mediated binding of the trans template RNAs to the target locus in these exemplary gene modifying systems, and that nicking at the site targeted by the spacer is unimportant to rewriting activity for these exemplary systems.

[0922] Taken together, these results suggest that the role of the 5′ end block spacer in these exemplary systems in this BFP to GFP rewriting assay is for a second mode of recruitment of the trans template to the target site.

[0923] Without wishing to be bound by theory, the Examples and disclosure are directed, in part, to the discovery that anchoring a trans template RNA to a gene modifying polypeptide:sgRNA:target genomic DNA complex by two or more interactions is important for achieving high rewriting activity, e.g., for achieving single or several nucleotide long edits. This Example suggests that, e.g., 1) an RRS:RBP interaction and 2) a 5′ end block Cas9 scaffold and spacer to target DNA interaction (mediated via an additional gene modifying polypeptide) represent exemplary interactions that together anchor a trans template RNA to a gene modifying polypeptide:sgRNA:target genomic DNA complex to enable rewriting. While the RRS:RBP interaction is critical in the absence of the 5′ end block spacer, the presence of both provides high rewriting activity and the presence of the 5′ end block spacer in combination with a weaker RRS:RBP interaction rescues rewriting activity.

[0924] It should be understood that for all numerical bounds describing some parameter in this application, such as “about,” “at least,” “less than,” and “more than,” the description also necessarily encompasses any range bounded by the recited values. Accordingly, for example, the description “at least 1, 2, 3, 4, or 5” also describes, inter alia, the ranges 1-2, 1-3, 1-4, 1-5, 2-3, 2-4, 2-5, 3-4, 3-5, and 4-5, et cetera.

[0925] For all patents, applications, or other reference cited herein, such as non-patent literature and reference sequence information, it should be understood that they are incorporated by reference in their entirety for all purposes as well as for the proposition that is recited. Where any conflict exists between a document incorporated by reference and the present application, this application will control. All information associated with reference gene sequences disclosed in this application, such as GeneIDs or accession numbers (typically referencing NCBI accession numbers), including, for example, genomic loci, genomic sequences, functional annotations, allelic variants, and reference mRNA (including, e.g., exon boundaries or response elements) and protein sequences (such as conserved domain structures), as well as chemical references (e.g., PubChem compound, PubChem substance, or PubChem Bioassay entries, including the annotations therein, such as structures and assays, et cetera), are hereby incorporated by reference in their entirety.

[0926] Headings used in this application are for convenience only and do not affect the interpretation of this application.

1. A template RNA comprising:
a) a heterologous object sequence comprising a mutation region to introduce a mutation into a target nucleic acid sequence, and
b) a primer binding site sequence (PBS sequence) that binds a first portion of the target nucleic acid sequence, wherein first portion is in the first strand of the target nucleic acid sequence, and wherein the PBS sequence is 3′ of the heterologous object sequence, and
c) an RNA-binding domain (RBD) recruitment site (RRS), wherein the RRS is 3′ of the PBS sequence or 5′ of the heterologous object sequence.

2. The template RNA of claim 1, wherein:
(i) the template RNA further comprises (a) an end block sequence or (b) an end block sequence of Table 41 or a sequence having at least 70%, 75%, 80%, 85%, 90%, 95%, 98%, or 99% identity thereto;
(ii) the RRS has a sequence according to Table 40 or a sequence having at least 70%, 75%, 80%, 85%, 90%, 95%, 98%, or 99% identity thereto;
(iii) the template RNA comprises a plurality of RRSs;
(iv) the PBS sequence comprises (a) 8-17 nucleotides; or (b) 8-17 nucleotides of 100% identity to the target nucleic acid sequence;
(iv) the mutation region is configured to produce an insertion, a deletion, or a substitution in the target nucleic acid; and/or
(v) the template RNA further comprises: (a) a gRNA spacer that is complementary to a different portion of the target nucleic acid sequence; and (b) a gRNA scaffold.

3. The template RNA of claim 2, wherein;
(i) the end block sequence is 5′ of the heterologous object sequence and the RRS is 3′ of the PBS sequence;
(ii) the end block sequence is 3′ of the PBS sequence and the RRS is 5′ of the heterologous object sequence;
(iii) the gRNA spacer is 5′ of the heterologous object sequence;
(iv) the gRNA scaffold is situated between the gRNA spacer and the heterologous object sequence;
(v) the gRNA spacer and the PBS sequence bind the same strand of the target nucleic acid sequence; and/or
(vi) the gRNA spacer, the heterologous object sequence, and the PBS sequence bind the same strand of the target nucleic acid sequence.

4. The template RNA of claim 1, wherein the heterologous object sequence comprises, from 5′ to 3′, a post-edit homology region, the mutation region, and a pre-edit homology region.

5-7. (canceled)

8. The template RNA of claim 4, wherein:
(i) the pre-edit homology region comprises (a) up to 20 nucleotides or (b) up to 20 nucleotides of 100% identity to the target nucleic acid sequence; and/or
(ii) the post-edit homology region comprises (a) 5-500 nucleotides or (b) 5-500 nucleotides of 100% identity to the target nucleic acid sequence.

9-15. (canceled)

16. The template RNA of claim 1, which does not comprise a gRNA spacer or a gRNA scaffold.

17-18. (canceled)

19. A gene modifying polypeptide comprising:
a reverse transcriptase (RT) domain; and
a DNA binding domain (DBD) that binds to a target nucleic acid sequence and is heterologous to the RT domain; and
a plurality RNA-binding domains (RBD) that are heterologous to the DBD and the RT domain.

20. The gene modifying polypeptide of claim 19, wherein:
(i) the plurality of RBDs have an amino acid sequence of MGSMKSIRCKNCNKLLFKADSFDHIEIRCPRCKRHIIMLNACEHPTEKHCGKREKITHSDETVRYGSG RA, or an amino acid sequence according to Table 31, or at least 75%, 80%, 85%, 90%, 95%, 96%, 97%, 98%, or 99% identity thereto;
(ii) the plurality of RBDs have the same amino acid sequence as each other;
(iii) the plurality of RBDs have different amino acid sequences from each other;
(iv) the DBD has an amino acid sequence according to Table 7 or 8, or at least 75%, 80%, 85%, 90%, 95%, 96%, 97%, 98%, or 99% identity thereto
(v) the RT domain is from a retrovirus, or a polypeptide domain having at least 75%, 80%, 85%, 90%, 95%, 96%, 97%, 98%, or 99% amino acids sequence identity thereto;
(vi) the RT domain has an amino acid sequence according to Table 6, or at least 75%, 80%, 85%, 90%, 95%, 96%, 97%, 98%, or 99% identity thereto;
(vii) the gene modifying polypeptide comprises a linker;
(viii) the gene modifying polypeptide comprises, in an N-terminal to C-terminal direction:
(a) the DBD, a first linker, the RT domain, a second linker, the RBD;
(b) the RT domain, a first linker, the DBD, a second linker, the RBD;
(c) the RBD, a first linker, the DBD, a second linker, the RT domain;
(d) RBD, a first linker, RT domain, a second linker, DBD;
(e) the DBD, a first linker, the RBD, a second linker, the RT domain; or
(f) the RT domain, a first linker, the RBD, a second linker, the DBD; and/or
(ix) the gene modifying polypeptide is produced by intein-mediated fusion of an N-terminal portion comprising an intein-N domain and a C-terminal portion comprising an intein-C domain.

21-26. (canceled)

27. The gene modifying polypeptide of claim 20, wherein:
(i) the linker comprises a sequence according to Table 10, or a sequence having at least 75%, 80%, 85%, 90%, 95%, 96%, 97%, 98%, or 99% identity thereto; and/or
(ii) the linker is disposed between the DBD and the RT domain, the RT domain and the RBD, or between the RBD and the DBD.

28-30. (canceled)

31. A polypeptide system comprising:
a) a reverse transcriptase (RT) domain; and
b) a DNA binding domain (DBD) that binds to a target nucleic acid sequence and is heterologous to the RT domain; and
c) a RNA-binding domain (RBD) that is heterologous to the DBD and the RT domain,
wherein at least 2 of (a), (b), and (c) are in separate polypeptides.

32. The polypeptide system of claim 31, wherein:
(i) the RBD has an amino acid sequence of MGSMKSIRCKNCNKLLFKADSFDHIEIRCPRCKRHIIMLNACEHPTEKHCGKREKITHSDETVRYGSG RA, or an amino acid sequence according to Table 31, or at least 75%, 80%, 85%, 90%, 95%, 96%, 97%, 98%, or 99% identity thereto;
(ii) complex formation is mediated by a third dimerization domain that binds a fourth, compatible dimerization domain;
(iii) the RBD is operably linked to a first dimerization domain; the DBD is operably linked to a second dimerization domain that binds the first dimerization domain; the DBD is operably linked to a third dimerization domain; and the RT domain is operably linked to a fourth dimerization domain that binds the third dimerization domain;
(iv) the DBD is operably linked to one or more additional DBDs, wherein optionally the additional DBDs have the same sequence as the DBD;
(v) the RBD has an amino acid sequence according to Table 31, or at least 75%, 80%, 85%, 90%, 95%, 96%, 97%, 98%, or 99% identity thereto;
(vi) the plurality of RBDs have the same amino acid sequence as each other;
(vii) the plurality of RBDs have different amino acid sequences from each other;
(viii) the DBD has an amino acid sequence according to Table 31, or at least 75%, 80%, 85%, 90%, 95%, 96%, 97%, 98%, or 99% identity thereto;
(ix) the RT domain is from a retrovirus, or a polypeptide domain having at least 75%, 80%, 85%, 90%, 95%, 96%, 97%, 98%, or 99% amino acids sequence identity thereto
(x) the RT domain has an amino acid sequence according to Table 6, or at least 75%, 80%, 85%, 90%, 95%, 96%, 97%, 98%, or 99% identity thereto; or
(xi) wherein each linker independently comprises a sequence according to Table 10, or a sequence having at least 75%, 80%, 85%, 90%, 95%, 96%, 97%, 98%, or 99% identity thereto.

33-34. (canceled)

35. The polypeptide system of claim 32, wherein:
(i) the first and second dimerization domains are: chemical-induced dimerization domains, light-induced dimerization domains, antibody-peptide dimerization domains, or coiled coil dimerization domains;
(ii) the first and second dimerization domains are: chemical-induced dimerization domains, light-induced dimerization domains, antibody-peptide dimerization domains, or coiled coil dimerization domains;
(iii) the third and fourth dimerization domains are: chemical-induced dimerization domains, light-induced dimerization domains, antibody-peptide dimerization domains, or coiled coil dimerization domains;
(iv) the first dimerization domain and the second dimerization domain are each present in a plurality of copies, e.g., 2, 3, 4, 5, 10, 15, 20, or 30 copies;
(v) the third dimerization domain and the fourth dimerization domain are each present in a plurality of copies, e.g., 2, 3, 4, 5, 10, 15, 20, or 30 copies;
(vi) the first dimerization domain and the second dimerization domain have the same sequence;
(vii) the third dimerization domain and the fourth dimerization domain have the same sequence;
(viii) the first dimerization domain and the second dimerization domain have different sequences; or
(ix) the third dimerization domain and the fourth dimerization domain have different sequences.

36-50. (canceled)

51. A nucleic acid or a plurality of nucleic acids encoding the polypeptides of the system of claim 31.

52. A system comprising:
a template RNA of claim 1;
and
a first gRNA comprising:
a gRNA spacer that binds a second portion of the target nucleic acid sequence, wherein the second portion is one the second strand of the target nucleic acid sequence; and
a gRNA scaffold that binds the DBD of the gene modifying polypeptide or the polypeptide system.

53. The system of claim 52, wherein:
(i) the template RNA does not comprise a gRNA spacer or a gRNA scaffold;
(ii) the gRNA spacer binds to a region of the target nucleic acid sequence that is within about 5, 10, 15, 20, 25, 30, or 40 nucleotides of the region of the target nucleic acid sequence bound by the PBS sequence;
(iii) the system further comprises: (a) a second Cas protein and (b) a second gRNA comprising: a gRNA spacer that binds the first strand of the target nucleic acid at a location 3′ of the location bound by the PBS sequence, and a gRNA scaffold that binds the second Cas protein;
(iv) the template RNA further comprises: a gRNA spacer that is complementary to a third portion of the target nucleic acid sequence wherein the third portion is on the first strand of the target nucleic acid sequence; and a gRNA scaffold;
(v) the gRNA spacer of the template RNA induces nicking of the template nucleic acid; and/or
(vi) the gRNA spacer of the template RNA does not induce nicking of the template nucleic acid.

54-55. (canceled)

56. The system of claim 53, wherein:
(i) the second Cas protein is a dead Cas protein or a Cas nickase protein;
(ii) the gRNA spacer of the second gRNA has a length of at least 18 nucleotides and the second Cas protein is a dead Cas protein;
(iii) the gRNA spacer of the second gRNA has a length of 17 nucleotides or less;
(iv) the gRNA scaffold binds the DBD of the gene modifying polypeptide or the polypeptide system; and/or
(v) the gRNA spacer has a length of 17 nucleotides or less.

57-63. (canceled)

64. A system comprising:
i) a template RNA claim 1;
ii) a first polypeptide comprising:
a DNA binding domain (DBD); and
a RNA-binding domain (RBD) that is heterologous to the DBD, wherein the RBD binds the RRS of the template RNA;
iii) a first gRNA comprising:
a gRNA spacer that directs the DBD of the first polypeptide to a second portion of the target nucleic acid sequence, wherein the second portion of the target nucleic acid sequence is on the second strand of the nucleic acid sequence; and
a gRNA scaffold that binds the DBD of the first polypeptide;
iv) a second polypeptide comprising:
an RT domain, and
a DNA binding domain (DBD), that is heterologous to the RT domain, and wherein the DBD of the second polypeptide has a different sequence from the DBD of the first polypeptide; and
v) a second gRNA comprising:
a gRNA spacer that directs the DBD of the second polypeptide to a third portion of the target nucleic acid sequence, wherein the third portion is on the first strand of the target nucleic acid, and
a gRNA scaffold that binds the DBD of the second polypeptide.

65. The system of claim 64, wherein:
(i) the DBD of the second polypeptide comprises a Cas nickase domain or a dead Cas domain;
(ii) the gRNA spacer of the second RNA induces nicking of the template nucleic acid;
(iii) the gRNA spacer of the second RNA does not induce nicking of the template nucleic acid;
(iv) the first gRNA does not detectably bind to the DBD of the second polypeptide; and/or
(v) the second gRNA does not detectably bind to the DBD of the first polypeptide.

66-69. (canceled)

70. A system comprising:
i) a template RNA of claim 1, wherein the template RNA comprises:
a gRNA spacer that is complementary to a third portion of the target nucleic acid sequence wherein the third portion is on the first strand of the target nucleic acid sequence; and
a gRNA scaffold;
ii) a first polypeptide comprising:
a DNA binding domain (DBD); and
a RNA-binding domain (RBD) that is heterologous to the DBD, wherein the RBD binds the RRS of the template RNA;
iii) a first gRNA comprising:
a gRNA spacer that directs the DBD of the first polypeptide to a second portion of the target nucleic acid sequence, wherein the second portion of the target nucleic acid sequence is on the second strand of the nucleic acid sequence; and
a gRNA scaffold that binds the DBD of the first polypeptide; and
iv) a second polypeptide comprising:
an RT domain, and
a DNA binding domain (DBD), that is heterologous to the RT domain, and wherein the DBD of the second polypeptide has a different sequence from the DBD of the first polypeptide, and wherein the gRNA scaffold of the template RNA binds the DBD of the second polypeptide.

71-79. (canceled)

80. A method for modifying a target nucleic acid in a cell, the method comprising contacting the cell with the system of claim 31, or nucleic acid encoding the same, thereby modifying the target nucleic acid.

81-91. (canceled)

The application's sequence listing, which the Patent Office published only in electronic form, follows.

SEQUENCE LISTING (21648 sequences)

SEQ ID NO: 1 - protein, 2133 aa, synthetic construct
MPAAKRVKLDGGDKKYSIGLDIGTNSVGWAVITDEYKVPSKKFKVLGNTDRHSIKKNLIGALLFDSGETAEATRLKRTARRRYTRRKNRICYLQEIFSNEMAKVDDSFFHRLEESFLVEEDKKHERHPIFGNIVDEVAYHEKYPTIYHLRKKLVDSTDKADLRLIYLALAHMIKFRGHFLIEGDLNPDNSDVDKLFIQLVQTYNQLFEENPINASGVDAKAILSARLSKSRRLENLIAQLPGEKKNGLFGNLIALSLGLTPNFKSNFDLAEDAKLQLSKDTYDDDLDNLLAQIGDQYADLFLAAKNLSDAILLSDILRVNTEITKAPLSASMIKRYDEHHQDLTLLKALVRQQLPEKYKEIFFDQSKNGYAGYIDGGASQEEFYKFIKPILEKMDGTEELLVKLNREDLLRKQRTFDNGSIPHQIHLGELHAILRRQEDFYPFLKDNREKIEKILTFRIPYYVGPLARGNSRFAWMTRKSEETITPWNFEEVVDKGASAQSFIERMTNFDKNLPNEKVLPKHSLLYEYFTVYNELTKVKYVTEGMRKPAFLSGEQKKAIVDLLFKTNRKVTVKQLKEDYFKKIECFDSVEISGVEDRFNASLGTYHDLLKIIKDKDFLDNEENEDILEDIVLTLTLFEDREMIEERLKTYAHLFDDKVMKQLKRRRYTGWGRLSRKLINGIRDKQSGKTILDFLKSDGFANRNFMQLIHDDSLTFKEDIQKAQVSGQGDSLHEHIANLAGSPAIKKGILQTVKVVDELVKVMGRHKPENIVIEMARENQTTQKGQKNSRERMKRIEEGIKELGSQILKEHPVENTQLQNEKLYLYYLQNGRDMYVDQELDINRLSDYDVDHIVPQSFLKDDSIDNKVLTRSDKARGKSDNVPSEEVVKKMKNYWRQLLNAKLITQRKFDNLTKAERGGLSELDKAGFIKRQLVETRQITKHVAQILDSRMNTKYDENDKLIREVKVITLKSKLVSDFRKDFQFYKVREINNYHHAHDAYLNAVVGTALIKKYPKLESEFVYGDYKVYDVRKMIAKSEQEIGKATAKYFFYSNIMNFFKTEITLANGEIRKRPLIETNGETGEIVWDKGRDFATVRKVLSMPQVNIVKKTEVQTGGFSKESILPKRNSDKLIARKKDWDPKKYGGFDSPTVAYSVLVVAKVEKGKSKKLKSVKELLGITIMERSSFEKNPIDFLEAKGYKEVKKDLIIKLPKYSLFELENGRKRMLASAGELQKGNELALPSKYVNFLYLASHYEKLKGSPEDNEQKQLFVEQHKHYLDEIIEQISEFSKRVILADANLDKVLSAYNKHRDKPIREQAENIIHLFTLTNLGAPAAFKYFDTTIDRKRYTSTKEVLDATLIHQSITGLYETRIDLSQLGGDGGAEAAAKEAAAKEAAAKEAAAKALEAEAAAKEAAAKEAAAKEAAAKAGGTAPLEEEYRLFLEAPIQNVTLLEQWKREIPKVWAEINPPGLASTQAPIHVQLLSTALPVRVRQYPITLEAKRSLRETIRKFRAAGILRPVHSPWNTPLLPVRKSGTSEYRMVQDLREVNKRVETIHPTVPNPYTLLSLLPPDRIWYSVLDLKDAFFCIPLAPESQLIFAFEWADAEEGESGQLTWTRLPQGFKNSPTLFDEALNRDLQGFRLDHPSVSLLQYVDDLLIAADTQAACLSATRDLLMTLAELGYRVSGKKAQLCQEEVTYLGFKIHKGSRSLSNSRTQAILQIPVPKTKRQVREFLGTIGYCRLWIPGFAELAQPLYAATRGGNDPLVWGEKEEEAFQSLKLALTQPPALALPSLDKPFQLFVEETSGAAKGVLTQALGPWKRPVAYLSKRLDPVAAGWPRCLRAIAAAALLTREASKLTFGQDIEITSSHNLESLLRSPPDKWLTNARITQYQVLLLDPPRVRFKQTAALNPATLLPETDDTLPIHHCLDTLDSLTSTRPDLTDQPLAQAEATLFTDGSSYIRDGKRYAGAAVVTLDSVIWAEPLPIGTSAQKAELIALTKALEWSKDKSVNIYTDSRYAFATLHVHGMIYRERGLLTAGGKAIKNAPEILALLTAVWLPKRVAVMHCKGHQKDDAPTSTGNRRADEVAREVAIRPLSTQATISAGKRTADGSEFEKRTADGSEFESPKKKAKVE

SEQ ID NO: 2 - protein, 672 aa, Murine leukemia virus
TLNIEDEYRLHETSKEPDVSLGSTWLSDFPQAWAETGGMGLAVRQAPLIIPLKATSTPVSIKQYPMSQEARLGIKPHIQRLLDQGILVPCQSPWNTPLLPVKKPGTNDYRPVQDLREVNKRVEDIHPTVPNPYNLLSGLPPSHQWYTVLDLKDAFFCLRLHPTSQPLFAFEWRDPEMGISGQLTWTRLPQGFKNSPTLFDEALHRDLADFRIQHPDLILLQYVDDLLLAATSELDCQQGTRALLQTLGNLGYRASAKKAQICQKQVKYLGYLLKEGQRWLTEARKETVMGQPTPKTPRQLREFLGTAGFCRLWIPGFAEMAAPLYPLTKTGTLFNWGPDQQKAYQEIKQALLTAPALGLPDLTKPFELFVDEKQGYAKGVLTQKLGPWRRPVAYLSKKLDPVAAGWPPCLRMVAAIAVLTKDAGKLTMGQPLVILAPHAVEALVKQPPDRWLSNARMTHYQALLLDTDRVQFGPVVALNPATLLPLPEEGLQHNCLDILAEAHGTRPDLTDQPLPDADHTWYTDGSSLLQEGQRKAGAAVTTETEVIWAKALPAGTSAQRAELIALTQALKMAEGKKLNVYTDSRYAFATAHIHGEIYRRRGLLTSEGKEIKNKDEILALLKALFLPKRLSIIHCPGHQKGHSAEARGNRMADQAARKAAITETPDTSTLLI

SEQ ID NO: 3 - protein, 671 aa, Murine leukemia virus
TLNIEDEHRLHETSKEPDVSLGSTWLSDFPQAWAETGGMGLAVRQAPLIIPLKATSTPVSIKQYPMSQEARLGIKPHIQRLLDQGILVPCQSPWNTPLLPVKKPGTNDYRPVQDLREVNKRVEDIHPTVPNPYNLLSGLPPSHQWYTVLDLKDAFFCLRLHPTSQPLFAFEWRDPEMGISGQLTWTRLPQGFKNSPTLFDEALHRDLADFRIQHPDLILLQYVDDLLLAATSELDCQQGTRALLQTLGNLGYRASAKKAQICQKQVKYLGYLLKEGQRWLTEARKETVMGQPTPKTPRQLREFLGTAGFCRLWIPGFAEMAAPLYPLTKTGTLFNWGPDQQKAYQEIKQALLTAPALGLPDLTKPFELFVDEKQGYAKGVLTQKLGPWRRPVAYLSKKLDPVAAGWPPCLRMVAAIAVLTKDAGKLTMGQPLVILAPHAVEALVKQPPDRWLSNARMTHYQALLLDTDRVQFGPVVALNPATLLPLPEEGLQHNCLDILAEAHGTRPDLTDQPLPDADHTWYTDGSSLLQEGQRKAGAAVTTETEVIWAKALPAGTSAQRAELIALTQALKMAEGKKLNVYTDSRYAFATAHIHGEIYRRRGLLTSEGKEIKNKDEILALLKALFLPKRLSIIHCPGHQKGHSAEARGNRMADQAARKAAITETPDTSTLL

SEQ ID NO: 4 - protein, 660 aa, Murine leukemia virus
TLNIEDEHRLHETSKEPDVSLGSTWLSDFPQAWAETGGMGLAVRQAPLIIPLKATSTPVSIKQYPMSQEARLGIKPHIQRLLDQGILVPCQSPWNTPLLPVKKPGTNDYRPVQDLREVNKRVEDIHPTVPNPYNLLSGLPPSHQWYTVLDLKDAFFCLRLHPTSQPLFAFEWRDPEMGISGQLTWTRLPQGFKNSPTLFDEALHRDLADFRIQHPDLILLQYVDDLLLAATSELDCQQGTRALLQTLGNLGYRASAKKAQICQKQVKYLGYLLKEGQRWLTEARKETVMGQPTPKTPRQLREFLGTAGFCRLWIPGFAEMAAPLYPLTKTGTLFNWGPDQQKAYQEIKQALLTAPALGLPDLTKPFELFVDEKQGYAKGVLTQKLGPWRRPVAYLSKKLDPVAAGWPPCLRMVAAIAVLTKDAGKLTMGQPLVILAPHAVEALVKQPPDRWLSNARMTHYQALLLDTDRVQFGPVVALNPATLLPLPEEGLQHNCLDILAEAHGTRPDLTDQPLPDADHTWYTDGSSLLQEGQRKAGAAVTTETEVIWAKALPAGTSAQRAELIALTQALKMAEGKKLNVYTDSRYAFATAHIHGEIYRRRGLLTSEGKEIKNKDEILALLKALFLPKRLSIIHCPGHQKGHSAEARGNRMADQAARKAA

SEQ ID NO: 5 - protein, 672 aa, Murine leukemia virus
TLNIEDEYRLHETSKEPDVSLGSTWLSDFPQAWAETGGMGLAVRQAPLIIPLKATSTPVSIKQYPMSQEARLGIKPHIQRLLDQGILVPCQSPWNTPLLPVKKPGTNDYRPVQDLREVNKRVEDIHPTVPNPYNLLSGLPPSHQWYTVLDLKDAFFCLRLHPTSQPLFAFEWRDPEMGISGQLTWTRLPQGFKNSPTLFNEALHRDLADFRIQHPDLILLQYVDDLLLAATSELDCQQGTRALLQTLGNLGYRASAKKAQICQKQVKYLGYLLKEGQRWLTEARKETVMGQPTPKTPRQLREFLGKAGFCRLFIPGFAEMAAPLYPLTKPGTLFNWGPDQQKAYQEIKQALLTAPALGLPDLTKPFELFVDEKQGYAKGVLTQKLGPWRRPVAYLSKKLDPVAAGWPPCLRMVAAIAVLTKDAGKLTMGQPLVILAPHAVEALVKQPPDRWLSNARMTHYQALLLDTDRVQFGPVVALNPATLLPLPEEGLQHNCLDILAEAHGTRPDLTDQPLPDADHTWYTDGSSLLQEGQRKAGAAVTTETEVIWAKALPAGTSAQRAELIALTQALKMAEGKKLNVYTDSRYAFATAHIHGEIYRRRGWLTSEGKEIKNKDEILALLKALFLPKRLSIIHCPGHQKGHSAEARGNRMADQAARKAAITETPDTSTLLI

SEQ ID NO: 6 - protein, 33 aa, synthetic construct
SGGSSGGSSGSETPGTSESATPESSGGSSGGSS

SEQ ID NO: 7 - protein, 1369 aa, unidentified
SMDKKYSIGLAIGTNSVGWAVITDDYKVPSKKFKVLGNTDRHSIKKNLIGALLFDSGETAEATRLKRTARRRYTRRKNRICYLQEIFSNEMAKVDDSFFHRLEESFLVEEDKKHERHPIFGNIVDEVAYHEKYPTIYHLRKKLVDSTDKADLRLIYLALAHMIKFRGHFLIEGDLNPDNSDVDKLFIQLVQTYNQLFEENPINASGVDAKAILSARLSKSRRLENLIAQLPGEKKNGLFGNLIALSLGLTPNFKSNFDLAEDAKLQLSKDTYDDDLDNLLAQIGDQYADLFLAAKNLSDAILLSDILRVNTEITKAPLSASMIKRYDEHHQDLTLLKALVRQQLPEKYKEIFFDQSKNGYAGYIDGGASQEEFYKFIKPILEKMDGTEELLVKLNREDLLRKQRTFDNGSIPHQIHLGELHAILRRQEDFYPFLKDNREKIEKILTFRIPYYVGPLARGNSRFAWMTRKSEETITPWNFEEVVDKGASAQSFIERMTNFDKNLPNEKVLPKHSLLYEYFTVYNELTKVKYVTEGMRKPAFLSGEQKKAIVDLLFKTNRKVTVKQLKEDYFKKIECFDSVEISGVEDRFNASLGTYHDLLKIIKDKDFLDNEENEDILEDIVLTLTLFEDREMIEERLKTYAHLFDDKVMKQLKRRRYTGWGRLSRKLINGIRDKQSGKTILDFLKSDGFANRNFMQLIHDDSLTFKEDIQKAQVSGQGDSLHEHIANLAGSPAIKKGILQTVKVVDELVKVMGRHKPENIVIEMARENQTTQKGQKNSRERMKRIEEGIKELGSQILKEHPVENTQLQNEKLYLYYLQNGRDMYVDQELDINRLSDYDVDAIVPQSFLKDDSIDNKVLTRSDKNRGKSDNVPSEEVVKKMKNYWRQLLNAKLITQRKFDNLTKAERGGLSELDKAGFIKRQLVETRQITKHVAQILDSRMNTKYDENDKLIREVKVITLKSKLVSDFRKDFQFYKVREINNYHHAHDAYLNAVVGTALIKKYPKLESEFVYGDYKVYDVRKMIAKSEQEIGKATAKYFFYSNIMNFFKTEITLANGEIRKRPLIETNGETGEIVWDKGRDFATVRKVLSMPQVNIVKKTEVQTGGFSKESILPKRNSDKLIARKKDWDPKKYGGFDSPTVAYSVLVVAKVEKGKSKKLKSVKELLGITIMERSSFEKNPIDFLEAKGYKEVKKDLIIKLPKYSLFELENGRKRMLASAGELQKGNELALPSKYVNFLYLASHYEKLKGSPEDNEQKQLFVEQHKHYLDEIIEQISEFSKRVILADANLDKVLSAYNKHRDKPIREQAENIIHLFTLTNLGAPAAFKYFDTTIDRKRYTSTKEVLDATLIHQSITGLYETRIDLSQLGGD

SEQ ID NO: 8 - DNA, 76 bp, synthetic construct
  source 1..76: mol_type = other DNA
gttttagagctagaaatagcaagttaaaataaggctagtccgttatcaacttgaaaaagtgggaccgagtcggtcc

SEQ ID NO: 9 - protein, 30 aa, synthetic construct
MDSLLMNRRKFLYQFKNVRWAKGRRETYLC

SEQ ID NO: 10 - protein, 28 aa, synthetic construct
PKKRKVEGADKRTADGSEFESPKKKRKV

SEQ ID NO: 11 - protein, 22 aa, synthetic construct
RKSGKIAAIWKRPRKPKKKRKV

SEQ ID NO: 12 - protein, 18 aa, synthetic construct
KRTADGSEFESPKKKRKV

SEQ ID NO: 13 - protein, 17 aa, synthetic construct
KKTELQTTNAENKTKKL

SEQ ID NO: 14 - protein, 19 aa, synthetic construct
KRGINDRNFWRGENGRKTR

SEQ ID NO: 15 - protein, 16 aa, synthetic construct
KRPAATKKAGQAKKKK

SEQ ID NO: 16 - protein, 29 aa, synthetic construct
PKKKRKVEGADKRTADGSEFESPKKKRKV

SEQ ID NO: 17 - protein, 25 aa, synthetic construct
KRASSQALGTIPKRRSSSRFIKRKK

SEQ ID NO: 18 - protein, 7 aa, synthetic construct
RKKRKKK

SEQ ID NO: 19 - protein, 2114 aa, synthetic construct
MPAAKRVKLDGGDKKYSIGLDIGTNSVGWAVITDEYKVPSKKFKVLGNTDRHSIKKNLIGALLFDSGETAEATRLKRTARRRYTRRKNRICYLQEIFSNEMAKVDDSFFHRLEESFLVEEDKKHERHPIFGNIVDEVAYHEKYPTIYHLRKKLVDSTDKADLRLIYLALAHMIKFRGHFLIEGDLNPDNSDVDKLFIQLVQTYNQLFEENPINASGVDAKAILSARLSKSRRLENLIAQLPGEKKNGLFGNLIALSLGLTPNFKSNFDLAEDAKLQLSKDTYDDDLDNLLAQIGDQYADLFLAAKNLSDAILLSDILRVNTEITKAPLSASMIKRYDEHHQDLTLLKALVRQQLPEKYKEIFFDQSKNGYAGYIDGGASQEEFYKFIKPILEKMDGTEELLVKLNREDLLRKQRTFDNGSIPHQIHLGELHAILRRQEDFYPFLKDNREKIEKILTFRIPYYVGPLARGNSRFAWMTRKSEETITPWNFEEVVDKGASAQSFIERMTNFDKNLPNEKVLPKHSLLYEYFTVYNELTKVKYVTEGMRKPAFLSGEQKKAIVDLLFKTNRKVTVKQLKEDYFKKIECFDSVEISGVEDRFNASLGTYHDLLKIIKDKDFLDNEENEDILEDIVLTLTLFEDREMIEERLKTYAHLFDDKVMKQLKRRRYTGWGRLSRKLINGIRDKQSGKTILDFLKSDGFANRNFMQLIHDDSLTFKEDIQKAQVSGQGDSLHEHIANLAGSPAIKKGILQTVKVVDELVKVMGRHKPENIVIEMARENQTTQKGQKNSRERMKRIEEGIKELGSQILKEHPVENTQLQNEKLYLYYLQNGRDMYVDQELDINRLSDYDVDHIVPQSFLKDDSIDNKVLTRSDKARGKSDNVPSEEVVKKMKNYWRQLLNAKLITQRKFDNLTKAERGGLSELDKAGFIKRQLVETRQITKHVAQILDSRMNTKYDENDKLIREVKVITLKSKLVSDFRKDFQFYKVREINNYHHAHDAYLNAVVGTALIKKYPKLESEFVYGDYKVYDVRKMIAKSEQEIGKATAKYFFYSNIMNFFKTEITLANGEIRKRPLIETNGETGEIVWDKGRDFATVRKVLSMPQVNIVKKTEVQTGGFSKESILPKRNSDKLIARKKDWDPKKYGGFDSPTVAYSVLVVAKVEKGKSKKLKSVKELLGITIMERSSFEKNPIDFLEAKGYKEVKKDLIIKLPKYSLFELENGRKRMLASAGELQKGNELALPSKYVNFLYLASHYEKLKGSPEDNEQKQLFVEQHKHYLDEIIEQISEFSKRVILADANLDKVLSAYNKHRDKPIREQAENIIHLFTLTNLGAPAAFKYFDTTIDRKRYTSTKEVLDATLIHQSITGLYETRIDLSQLGGDGGPAPGGGGGSGGWVQEISDSRPMLHIYLNGRRFLGLLNTGADKTCIAGRDWPANWPIHQTESSLQGLGMACGVARSSQPLRWQHEDKSGIIHPFVIPTLPFTLWGRDIMKDIKVRLMTDSPDDSQDLMIGAIESNLFADQISWKSDQPVWLNQWPLKQEKLQALQQLVTEQLQLGHLEESNSPWNTPVFVIKKKSGKWRLLQDLRAVNATMHDMGALQPGLPSPVAPPKGWEIIIIDLQDCFFNIKLHPEDCKRFAFSVPSPNFKRPYQRFQWKVLPQGMKNSPTLCQKFVDKAILTVRDKYQDSYIVHYMDDILLAHPSRSIVDEILTSMIQALNKHGLVVSTEKIQKYDNLKYLGTHIQGDSVSYQKLQIRTDKLRTLNDFQKLLGNINWIRPFLKLTTGELKPLFEILNPDSNPISTRKLTPEACKALQLMNERLSTARVKRLDLSQPWSLCILKTEYTPTACLWQDGVVEWIHLPHISPKVITPYDIFCTQLIIKGRHRSKELFSKDPDYIVVPYTKVQFDLLLQEKEDWPISLLGFLGEVHFHLPKDPLLTFTLQTAIIFPHMTSTTPLEKGIVIFTDGSANGRSVTYIQGREPIIKENTQNTAQQAEIVAVITAFEEVSQPFNLYTDSKYVTGLFPEIETATLSPRTKIYTELKHLQRLIHKRQEKFYIGHIRGHTGLPGPLAQGNAYADSLTRILTAGKRTADGSEFEKRTADGSEFESPKKKAKVE

SEQ ID NO: 20 - protein, 2114 aa, synthetic construct
MPAAKRVKLDGGDKKYSIGLDIGTNSVGWAVITDEYKVPSKKFKVLGNTDRHSIKKNLIGALLFDSGETAEATRLKRTARRRYTRRKNRICYLQEIFSNEMAKVDDSFFHRLEESFLVEEDKKHERHPIFGNIVDEVAYHEKYPTIYHLRKKLVDSTDKADLRLIYLALAHMIKFRGHFLIEGDLNPDNSDVDKLFIQLVQTYNQLFEENPINASGVDAKAILSARLSKSRRLENLIAQLPGEKKNGLFGNLIALSLGLTPNFKSNFDLAEDAKLQLSKDTYDDDLDNLLAQIGDQYADLFLAAKNLSDAILLSDILRVNTEITKAPLSASMIKRYDEHHQDLTLLKALVRQQLPEKYKEIFFDQSKNGYAGYIDGGASQEEFYKFIKPILEKMDGTEELLVKLNREDLLRKQRTFDNGSIPHQIHLGELHAILRRQEDFYPFLKDNREKIEKILTFRIPYYVGPLARGNSRFAWMTRKSEETITPWNFEEVVDKGASAQSFIERMTNFDKNLPNEKVLPKHSLLYEYFTVYNELTKVKYVTEGMRKPAFLSGEQKKAIVDLLFKTNRKVTVKQLKEDYFKKIECFDSVEISGVEDRFNASLGTYHDLLKIIKDKDFLDNEENEDILEDIVLTLTLFEDREMIEERLKTYAHLFDDKVMKQLKRRRYTGWGRLSRKLINGIRDKQSGKTILDFLKSDGFANRNFMQLIHDDSLTFKEDIQKAQVSGQGDSLHEHIANLAGSPAIKKGILQTVKVVDELVKVMGRHKPENIVIEMARENQTTQKGQKNSRERMKRIEEGIKELGSQILKEHPVENTQLQNEKLYLYYLQNGRDMYVDQELDINRLSDYDVDHIVPQSFLKDDSIDNKVLTRSDKARGKSDNVPSEEVVKKMKNYWRQLLNAKLITQRKFDNLTKAERGGLSELDKAGFIKRQLVETRQITKHVAQILDSRMNTKYDENDKLIREVKVITLKSKLVSDFRKDFQFYKVREINNYHHAHDAYLNAVVGTALIKKYPKLESEFVYGDYKVYDVRKMIAKSEQEIGKATAKYFFYSNIMNFFKTEITLANGEIRKRPLIETNGETGEIVWDKGRDFATVRKVLSMPQVNIVKKTEVQTGGFSKESILPKRNSDKLIARKKDWDPKKYGGFDSPTVAYSVLVVAKVEKGKSKKLKSVKELLGITIMERSSFEKNPIDFLEAKGYKEVKKDLIIKLPKYSLFELENGRKRMLASAGELQKGNELALPSKYVNFLYLASHYEKLKGSPEDNEQKQLFVEQHKHYLDEIIEQISEFSKRVILADANLDKVLSAYNKHRDKPIREQAENIIHLFTLTNLGAPAAFKYFDTTIDRKRYTSTKEVLDATLIHQSITGLYETRIDLSQLGGDGGGGSGSSGGGGGWVQEISDSRPMLHIYLNGRRFLGLLNTGADKTCIAGRDWPANWPIHQTESSLQGLGMACGVARSSQPLRWQHEDKSGIIHPFVIPTLPFTLWGRDIMKDIKVRLMTDSPDDSQDLMIGAIESNLFADQISWKSDQPVWLNQWPLKQEKLQALQQLVTEQLQLGHLEESNSPWNTPVFVIKKKSGKWRLLQDLRAVNATMHDMGALQPGLPSPVAPPKGWEIIIIDLQDCFFNIKLHPEDCKRFAFSVPSPNFKRPYQRFQWKVLPQGMKNSPTLCQKFVDKAILTVRDKYQDSYIVHYMDDILLAHPSRSIVDEILTSMIQALNKHGLVVSTEKIQKYDNLKYLGTHIQGDSVSYQKLQIRTDKLRTLNDFQKLLGNINWIRPFLKLTTGELKPLFEILNPDSNPISTRKLTPEACKALQLMNERLSTARVKRLDLSQPWSLCILKTEYTPTACLWQDGVVEWIHLPHISPKVITPYDIFCTQLIIKGRHRSKELFSKDPDYIVVPYTKVQFDLLLQEKEDWPISLLGFLGEVHFHLPKDPLLTFTLQTAIIFPHMTSTTPLEKGIVIFTDGSANGRSVTYIQGREPIIKENTQNTAQQAEIVAVITAFEEVSQPFNLYTDSKYVTGLFPEIETATLSPRTKIYTELKHLQRLIHKRQEKFYIGHIRGHTGLPGPLAQGNAYADSLTRILTAGKRTADGSEFEKRTADGSEFESPKKKAKVE

SEQ ID NO: 21 - protein, 2116 aa, synthetic construct
MPAAKRVKLDGGDKKYSIGLDIGTNSVGWAVITDEYKVPSKKFKVLGNTDRHSIKKNLIGALLFDSGETAEATRLKRTARRRYTRRKNRICYLQEIFSNEMAKVDDSFFHRLEESFLVEEDKKHERHPIFGNIVDEVAYHEKYPTIYHLRKKLVDSTDKADLRLIYLALAHMIKFRGHFLIEGDLNPDNSDVDKLFIQLVQTYNQLFEENPINASGVDAKAILSARLSKSRRLENLIAQLPGEKKNGLFGNLIALSLGLTPNFKSNFDLAEDAKLQLSKDTYDDDLDNLLAQIGDQYADLFLAAKNLSDAILLSDILRVNTEITKAPLSASMIKRYDEHHQDLTLLKALVRQQLPEKYKEIFFDQSKNGYAGYIDGGASQEEFYKFIKPILEKMDGTEELLVKLNREDLLRKQRTFDNGSIPHQIHLGELHAILRRQEDFYPFLKDNREKIEKILTFRIPYYVGPLARGNSRFAWMTRKSEETITPWNFEEVVDKGASAQSFIERMTNFDKNLPNEKVLPKHSLLYEYFTVYNELTKVKYVTEGMRKPAFLSGEQKKAIVDLLFKTNRKVTVKQLKEDYFKKIECFDSVEISGVEDRFNASLGTYHDLLKIIKDKDFLDNEENEDILEDIVLTLTLFEDREMIEERLKTYAHLFDDKVMKQLKRRRYTGWGRLSRKLINGIRDKQSGKTILDFLKSDGFANRNFMQLIHDDSLTFKEDIQKAQVSGQGDSLHEHIANLAGSPAIKKGILQTVKVVDELVKVMGRHKPENIVIEMARENQTTQKGQKNSRERMKRIEEGIKELGSQILKEHPVENTQLQNEKLYLYYLQNGRDMYVDQELDINRLSDYDVDHIVPQSFLKDDSIDNKVLTRSDKARGKSDNVPSEEVVKKMKNYWRQLLNAKLITQRKFDNLTKAERGGLSELDKAGFIKRQLVETRQITKHVAQILDSRMNTKYDENDKLIREVKVITLKSKLVSDFRKDFQFYKVREINNYHHAHDAYLNAVVGTALIKKYPKLESEFVYGDYKVYDVRKMIAKSEQEIGKATAKYFFYSNIMNFFKTEITLANGEIRKRPLIETNGETGEIVWDKGRDFATVRKVLSMPQVNIVKKTEVQTGGFSKESILPKRNSDKLIARKKDWDPKKYGGFDSPTVAYSVLVVAKVEKGKSKKLKSVKELLGITIMERSSFEKNPIDFLEAKGYKEVKKDLIIKLPKYSLFELENGRKRMLASAGELQKGNELALPSKYVNFLYLASHYEKLKGSPEDNEQKQLFVEQHKHYLDEIIEQISEFSKRVILADANLDKVLSAYNKHRDKPIREQAENIIHLFTLTNLGAPAAFKYFDTTIDRKRYTSTKEVLDATLIHQSITGLYETRIDLSQLGGDGGPAPGGSEAAAKGGVQEISDSRPMLHIYLNGRRFLGLLDTGADKTCIAGRDWPANWPIHQTESSLQGLGMACGVARSSQPLRWQHEDKSGIIHPFVIPTLPFTLWGRDIMKDIKVRLMTDSPDDSQDLMIGAIESNLFADQISWKSDQPVWLNQWPLKQEKLQALQQLVTEQLQLGHLEESNSPWNTPVFVIKKKSGKWRLLQDLRAVNATMHDMGALQPGLPSPPAVPKGWEIIIIDLQDCFFNIKLHPEDCKRFAFSVPSPNFKRPYQRFQWKVLPQGMKNSPTLCQKFVDKAILTVRDKYQDSYIVHYMDDILLAHPSRSIVDEILTSMIQALNKHGLVVSTEKIQKYDNLKYLGTHIQGDSVSYQKLQIRTDKLRTLNDFQKLLGNINWIRPFLKLTTGELKPLFEILNPDSNPISTRKLTPEACKALQLMNERLSTARVKRLDLSQPWSLCILKTEYTPTACLWQDGVVEWIHLPHISPKVITPYDIFCTQLIIKGRHRSKELFSKDPDYIVVPYTKVQFDLLLQEKEDWPISLLGFLGEVHFHLPKDPLLTFTLQTAIIFPHMTSTTPLEKGIVIFTDGSANGRSVTYIQGREPIIKENTQNTAQQAEIVAVITAFEEVSQPFNLYTDSKYVTGLFPEIETATLSPRTKIYTELKHLQRLIHKRQEKFYIGHIRGHTGLPGPLAQGNAYADSLTRILTAAGKRTADGSEFEKRTADGSEFESPKKKAKVE

SEQ ID NO: 22 - protein, 2116 aa, synthetic construct
MPAAKRVKLDGGDKKYSIGLDIGTNSVGWAVITDEYKVPSKKFKVLGNTDRHSIKKNLIGALLFDSGETAEATRLKRTARRRYTRRKNRICYLQEIFSNEMAKVDDSFFHRLEESFLVEEDKKHERHPIFGNIVDEVAYHEKYPTIYHLRKKLVDSTDKADLRLIYLALAHMIKFRGHFLIEGDLNPDNSDVDKLFIQLVQTYNQLFEENPINASGVDAKAILSARLSKSRRLENLIAQLPGEKKNGLFGNLIALSLGLTPNFKSNFDLAEDAKLQLSKDTYDDDLDNLLAQIGDQYADLFLAAKNLSDAILLSDILRVNTEITKAPLSASMIKRYDEHHQDLTLLKALVRQQLPEKYKEIFFDQSKNGYAGYIDGGASQEEFYKFIKPILEKMDGTEELLVKLNREDLLRKQRTFDNGSIPHQIHLGELHAILRRQEDFYPFLKDNREKIEKILTFRIPYYVGPLARGNSRFAWMTRKSEETITPWNFEEVVDKGASAQSFIERMTNFDKNLPNEKVLPKHSLLYEYFTVYNELTKVKYVTEGMRKPAFLSGEQKKAIVDLLFKTNRKVTVKQLKEDYFKKIECFDSVEISGVEDRFNASLGTYHDLLKIIKDKDFLDNEENEDILEDIVLTLTLFEDREMIEERLKTYAHLFDDKVMKQLKRRRYTGWGRLSRKLINGIRDKQSGKTILDFLKSDGFANRNFMQLIHDDSLTFKEDIQKAQVSGQGDSLHEHIANLAGSPAIKKGILQTVKVVDELVKVMGRHKPENIVIEMARENQTTQKGQKNSRERMKRIEEGIKELGSQILKEHPVENTQLQNEKLYLYYLQNGRDMYVDQELDINRLSDYDVDHIVPQSFLKDDSIDNKVLTRSDKARGKSDNVPSEEVVKKMKNYWRQLLNAKLITQRKFDNLTKAERGGLSELDKAGFIKRQLVETRQITKHVAQILDSRMNTKYDENDKLIREVKVITLKSKLVSDFRKDFQFYKVREINNYHHAHDAYLNAVVGTALIKKYPKLESEFVYGDYKVYDVRKMIAKSEQEIGKATAKYFFYSNIMNFFKTEITLANGEIRKRPLIETNGETGEIVWDKGRDFATVRKVLSMPQVNIVKKTEVQTGGFSKESILPKRNSDKLIARKKDWDPKKYGGFDSPTVAYSVLVVAKVEKGKSKKLKSVKELLGITIMERSSFEKNPIDFLEAKGYKEVKKDLIIKLPKYSLFELENGRKRMLASAGELQKGNELALPSKYVNFLYLASHYEKLKGSPEDNEQKQLFVEQHKHYLDEIIEQISEFSKRVILADANLDKVLSAYNKHRDKPIREQAENIIHLFTLTNLGAPAAFKYFDTTIDRKRYTSTKEVLDATLIHQSITGLYETRIDLSQLGGDGGGGSEAAAKGGGGGVQEISDSRPMLHIYLNGRRFLGLLDTGADKTCIAGRDWPANWPIHQTESSLQGLGMACGVARSSQPLRWQHEDKSGIIHPFVIPTLPFTLWGRDIMKDIKVRLMTDSPDDSQDLMIGAIESNLFADQISWKSDQPVWLNQWPLKQEKLQALQQLVTEQLQLGHLEESNSPWNTPVFVIKKKSGKWRLLQDLRAVNATMHDMGALQPGLPSPPAVPKGWEIIIIDLQDCFFNIKLHPEDCKRFAFSVPSPNFKRPYQRFQWKVLPQGMKNSPTLCQKFVDKAILTVRDKYQDSYIVHYMDDILLAHPSRSIVDEILTSMIQALNKHGLVVSTEKIQKYDNLKYLGTHIQGDSVSYQKLQIRTDKLRTLNDFQKLLGNINWIRPFLKLTTGELKPLFEILNPDSNPISTRKLTPEACKALQLMNERLSTARVKRLDLSQPWSLCILKTEYTPTACLWQDGVVEWIHLPHISPKVITPYDIFCTQLIIKGRHRSKELFSKDPDYIVVPYTKVQFDLLLQEKEDWPISLLGFLGEVHFHLPKDPLLTFTLQTAIIFPHMTSTTPLEKGIVIFTDGSANGRSVTYIQGREPIIKENTQNTAQQAEIVAVITAFEEVSQPFNLYTDSKYVTGLFPEIETATLSPRTKIYTELKHLQRLIHKRQEKFYIGHIRGHTGLPGPLAQGNAYADSLTRILTAAGKRTADGSEFEKRTADGSEFESPKKKAKVE

SEQ ID NO: 23 - protein, 2116 aa, synthetic construct
MPAAKRVKLDGGDKKYSIGLDIGTNSVGWAVITDEYKVPSKKFKVLGNTDRHSIKKNLIGALLFDSGETAEATRLKRTARRRYTRRKNRICYLQEIFSNEMAKVDDSFFHRLEESFLVEEDKKHERHPIFGNIVDEVAYHEKYPTIYHLRKKLVDSTDKADLRLIYLALAHMIKFRGHFLIEGDLNPDNSDVDKLFIQLVQTYNQLFEENPINASGVDAKAILSARLSKSRRLENLIAQLPGEKKNGLFGNLIALSLGLTPNFKSNFDLAEDAKLQLSKDTYDDDLDNLLAQIGDQYADLFLAAKNLSDAILLSDILRVNTEITKAPLSASMIKRYDEHHQDLTLLKALVRQQLPEKYKEIFFDQSKNGYAGYIDGGASQEEFYKFIKPILEKMDGTEELLVKLNREDLLRKQRTFDNGSIPHQIHLGELHAILRRQEDFYPFLKDNREKIEKILTFRIPYYVGPLARGNSRFAWMTRKSEETITPWNFEEVVDKGASAQSFIERMTNFDKNLPNEKVLPKHSLLYEYFTVYNELTKVKYVTEGMRKPAFLSGEQKKAIVDLLFKTNRKVTVKQLKEDYFKKIECFDSVEISGVEDRFNASLGTYHDLLKIIKDKDFLDNEENEDILEDIVLTLTLFEDREMIEERLKTYAHLFDDKVMKQLKRRRYTGWGRLSRKLINGIRDKQSGKTILDFLKSDGFANRNFMQLIHDDSLTFKEDIQKAQVSGQGDSLHEHIANLAGSPAIKKGILQTVKVVDELVKVMGRHKPENIVIEMARENQTTQKGQKNSRERMKRIEEGIKELGSQILKEHPVENTQLQNEKLYLYYLQNGRDMYVDQELDINRLSDYDVDHIVPQSFLKDDSIDNKVLTRSDKARGKSDNVPSEEVVKKMKNYWRQLLNAKLITQRKFDNLTKAERGGLSELDKAGFIKRQLVETRQITKHVAQILDSRMNTKYDENDKLIREVKVITLKSKLVSDFRKDFQFYKVREINNYHHAHDAYLNAVVGTALIKKYPKLESEFVYGDYKVYDVRKMIAKSEQEIGKATAKYFFYSNIMNFFKTEITLANGEIRKRPLIETNGETGEIVWDKGRDFATVRKVLSMPQVNIVKKTEVQTGGFSKESILPKRNSDKLIARKKDWDPKKYGGFDSPTVAYSVLVVAKVEKGKSKKLKSVKELLGITIMERSSFEKNPIDFLEAKGYKEVKKDLIIKLPKYSLFELENGRKRMLASAGELQKGNELALPSKYVNFLYLASHYEKLKGSPEDNEQKQLFVEQHKHYLDEIIEQISEFSKRVILADANLDKVLSAYNKHRDKPIREQAENIIHLFTLTNLGAPAAFKYFDTTIDRKRYTSTKEVLDATLIHQSITGLYETRIDLSQLGGDGGGGGGGSEAAAKGGVQEISDSRPMLHIYLNGRRFLGLLDTGADKTCIAGRDWPANWPIHQTESSLQGLGMACGVARSSQPLRWQHEDKSGIIHPFVIPTLPFTLWGRDIMKDIKVRLMTDSPDDSQDLMIGAIESNLFADQISWKSDQPVWLNQWPLKQEKLQALQQLVTEQLQLGHLEESNSPWNTPVFVIKKKSGKWRLLQDLRAVNATMHDMGALQPGLPSPPAVPKGWEIIIIDLQDCFFNIKLHPEDCKRFAFSVPSPNFKRPYQRFQWKVLPQGMKNSPTLCQKFVDKAILTVRDKYQDSYIVHYMDDILLAHPSRSIVDEILTSMIQALNKHGLVVSTEKIQKYDNLKYLGTHIQGDSVSYQKLQIRTDKLRTLNDFQKLLGNINWIRPFLKLTTGELKPLFEILNPDSNPISTRKLTPEACKALQLMNERLSTARVKRLDLSQPWSLCILKTEYTPTACLWQDGVVEWIHLPHISPKVITPYDIFCTQLIIKGRHRSKELFSKDPDYIVVPYTKVQFDLLLQEKEDWPISLLGFLGEVHFHLPKDPLLTFTLQTAIIFPHMTSTTPLEKGIVIFTDGSANGRSVTYIQGREPIIKENTQNTAQQAEIVAVITAFEEVSQPFNLYTDSKYVTGLFPEIETATLSPRTKIYTELKHLQRLIHKRQEKFYIGHIRGHTGLPGPLAQGNAYADSLTRILTAAGKRTADGSEFEKRTADGSEFESPKKKAKVE

SEQ ID NO: 24 - protein, 2116 aa, synthetic construct
MPAAKRVKLDGGDKKYSIGLDIGTNSVGWAVITDEYKVPSKKFKVLGNTDRHSIKKNLIGALLFDSGETAEATRLKRTARRRYTRRKNRICYLQEIFSNEMAKVDDSFFHRLEESFLVEEDKKHERHPIFGNIVDEVAYHEKYPTIYHLRKKLVDSTDKADLRLIYLALAHMIKFRGHFLIEGDLNPDNSDVDKLFIQLVQTYNQLFEENPINASGVDAKAILSARLSKSRRLENLIAQLPGEKKNGLFGNLIALSLGLTPNFKSNFDLAEDAKLQLSKDTYDDDLDNLLAQIGDQYADLFLAAKNLSDAILLSDILRVNTEITKAPLSASMIKRYDEHHQDLTLLKALVRQQLPEKYKEIFFDQSKNGYAGYIDGGASQEEFYKFIKPILEKMDGTEELLVKLNREDLLRKQRTFDNGSIPHQIHLGELHAILRRQEDFYPFLKDNREKIEKILTFRIPYYVGPLARGNSRFAWMTRKSEETITPWNFEEVVDKGASAQSFIERMTNFDKNLPNEKVLPKHSLLYEYFTVYNELTKVKYVTEGMRKPAFLSGEQKKAIVDLLFKTNRKVTVKQLKEDYFKKIECFDSVEISGVEDRFNASLGTYHDLLKIIKDKDFLDNEENEDILEDIVLTLTLFEDREMIEERLKTYAHLFDDKVMKQLKRRRYTGWGRLSRKLINGIRDKQSGKTILDFLKSDGFANRNFMQLIHDDSLTFKEDIQKAQVSGQGDSLHEHIANLAGSPAIKKGILQTVKVVDELVKVMGRHKPENIVIEMARENQTTQKGQKNSRERMKRIEEGIKELGSQILKEHPVENTQLQNEKLYLYYLQNGRDMYVDQELDINRLSDYDVDHIVPQSFLKDDSIDNKVLTRSDKARGKSDNVPSEEVVKKMKNYWRQLLNAKLITQRKFDNLTKAERGGLSELDKAGFIKRQLVETRQITKHVAQILDSRMNTKYDENDKLIREVKVITLKSKLVSDFRKDFQFYKVREINNYHHAHDAYLNAVVGTALIKKYPKLESEFVYGDYKVYDVRKMIAKSEQEIGKATAKYFFYSNIMNFFKTEITLANGEIRKRPLIETNGETGEIVWDKGRDFATVRKVLSMPQVNIVKKTEVQTGGFSKESILPKRNSDKLIARKKDWDPKKYGGFDSPTVAYSVLVVAKVEKGKSKKLKSVKELLGITIMERSSFEKNPIDFLEAKGYKEVKKDLIIKLPKYSLFELENGRKRMLASAGELQKGNELALPSKYVNFLYLASHYEKLKGSPEDNEQKQLFVEQHKHYLDEIIEQISEFSKRVILADANLDKVLSAYNKHRDKPIREQAENIIHLFTLTNLGAPAAFKYFDTTIDRKRYTSTKEVLDATLIHQSITGLYETRIDLSQLGGDGGPAPEAAAKGSSGGVQEISDSRPMLHIYLNGRRFLGLLDTGADKTCIAGRDWPANWPIHQTESSLQGLGMACGVARSSQPLRWQHEDKSGIIHPFVIPTLPFTLWGRDIMKDIKVRLMTDSPDDSQDLMIGAIESNLFADQISWKSDQPVWLNQWPLKQEKLQALQQLVTEQLQLGHLEESNSPWNTPVFVIKKKSGKWRLLQDLRAVNATMHDMGALQPGLPSPPAVPKGWEIIIIDLQDCFFNIKLHPEDCKRFAFSVPSPNFKRPYQRFQWKVLPQGMKNSPTLCQKFVDKAILTVRDKYQDSYIVHYMDDILLAHPSRSIVDEILTSMIQALNKHGLVVSTEKIQKYDNLKYLGTHIQGDSVSYQKLQIRTDKLRTLNDFQKLLGNINWIRPFLKLTTGELKPLFEILNPDSNPISTRKLTPEACKALQLMNERLSTARVKRLDLSQPWSLCILKTEYTPTACLWQDGVVEWIHLPHISPKVITPYDIFCTQLIIKGRHRSKELFSKDPDYIVVPYTKVQFDLLLQEKEDWPISLLGFLGEVHFHLPKDPLLTFTLQTAIIFPHMTSTTPLEKGIVIFTDGSANGRSVTYIQGREPIIKENTQNTAQQAEIVAVITAFEEVSQPFNLYTDSKYVTGLFPEIETATLSPRTKIYTELKHLQRLIHKRQEKFYIGHIRGHTGLPGPLAQGNAYADSLTRILTAAGKRTADGSEFEKRTADGSEFESPKKKAKVE

SEQ ID NO: 25 - protein, 4 aa, synthetic construct
SGGS

SEQ ID NO: 26 - protein, 4 aa, synthetic construct
GGGS

SEQ ID NO: 27 - protein, 5 aa, synthetic construct
GGGGS

SEQ ID NO: 28 - protein, 5 aa, synthetic construct
EAAAK

SEQ ID NO: 29 - DNA, 306 bp, synthetic construct
  source 1..306: mol_type = other DNA
tgcctgtcatacgaaaccgagatactgacagtagaatatggccttctgccaatcgggaagattgtggagaaacggatagaatgcacagtttactctgtcgataacaatggtaacatttatactcagccagttgcccagtggcacgaccggggagagcaggaagtattcgaatactgtctggaggatggaagtctcattagggccactaaggaccacaaatttatgacagtcgatggccagatgctgcctatagacgaaatctttgagcgagagttggacctcatgcgagttgacaaccttcctaat

SEQ ID NO: 30 - protein, 102 aa, synthetic construct
CLSYETEILTVEYGLLPIGKIVEKRIECTVYSVDNNGNIYTQPVAQWHDRGEQEVFEYCLEDGSLIRATKDHKFMTVDGQMLPIDEIFERELDLMRVDNLPN

SEQ ID NO: 31 - DNA, 108 bp, synthetic construct
  source 1..108: mol_type = other DNA
atgatcaagatagctacaaggaagtatcttggcaaacaaaacgtttatgatattggagtcgaaagagatcacaactttgctctgaagaacggattcatagcttctaat

SEQ ID NO: 32 - protein, 36 aa, synthetic construct
MIKIATRKYLGKQNVYDIGVERDHNFALKNGFIASN

SEQ ID NO: 33 - DNA, 303 bp, synthetic construct
  source 1..303: mol_type = other DNA
tgcctgtcttatgataccgagatacttaccgttgaatatggcttcttgcctattggaaagattgtcgaagagagaattgaatgcacagtatatactgtagacaagaatggtttcgtttacacacagcccattgctcaatggcacaatcgcggcgaacaagaagtatttgagtactgtctcgaggatggaagcatcatacgagcaactaaagatcataaattcatgaccactgacgggcagatgttgccaatagatgagatattcgagcggggcttggatctcaaacaagtggatggattgcca

SEQ ID NO: 34 - protein, 101 aa, synthetic construct
CLSYDTEILTVEYGFLPIGKIVEERIECTVYTVDKNGFVYTQPIAQWHNRGEQEVFEYCLEDGSIIRATKDHKFMTTDGQMLPIDEIFERGLDLKQVDGLP

SEQ ID NO: 35 - DNA, 159 bp, synthetic construct
  source 1..159: mol_type = other DNA
atgaagaggactgccgatggatcagagtttgaatctcccaagaagaagaggaaagtaaagataatatctcgaaaaagtcttggtacccaaaatgtctatgatattggagtggagaaagatcacaacttccttctcaagaacggtctcgtagccagcaac

SEQ ID NO: 36 - protein, 53 aa, synthetic construct
MKRTADGSEFESPKKKRKVKIISRKSLGTQNVYDIGVEKDHNFLLKNGLVASN

SEQ ID NO: 37 - protein, 2092 aa, synthetic construct
MPAAKRVKLDGGDKKYSIGLDIGTNSVGWAVITDEYKVPSKKFKVLGNTDRHSIKKNLIGALLFDSGETAEATRLKRTARRRYTRRKNRICYLQEIFSNEMAKVDDSFFHRLEESFLVEEDKKHERHPIFGNIVDEVAYHEKYPTIYHLRKKLVDSTDKADLRLIYLALAHMIKFRGHFLIEGDLNPDNSDVDKLFIQLVQTYNQLFEENPINASGVDAKAILSARLSKSRRLENLIAQLPGEKKNGLFGNLIALSLGLTPNFKSNFDLAEDAKLQLSKDTYDDDLDNLLAQIGDQYADLFLAAKNLSDAILLSDILRVNTEITKAPLSASMIKRYDEHHQDLTLLKALVRQQLPEKYKEIFFDQSKNGYAGYIDGGASQEEFYKFIKPILEKMDGTEELLVKLNREDLLRKQRTFDNGSIPHQIHLGELHAILRRQEDFYPFLKDNREKIEKILTFRIPYYVGPLARGNSRFAWMTRKSEETITPWNFEEVVDKGASAQSFIERMTNFDKNLPNEKVLPKHSLLYEYFTVYNELTKVKYVTEGMRKPAFLSGEQKKAIVDLLFKTNRKVTVKQLKEDYFKKIECFDSVEISGVEDRFNASLGTYHDLLKIIKDKDFLDNEENEDILEDIVLTLTLFEDREMIEERLKTYAHLFDDKVMKQLKRRRYTGWGRLSRKLINGIRDKQSGKTILDFLKSDGFANRNFMQLIHDDSLTFKEDIQKAQVSGQGDSLHEHIANLAGSPAIKKGILQTVKVVDELVKVMGRHKPENIVIEMARENQTTQKGQKNSRERMKRIEEGIKELGSQILKEHPVENTQLQNEKLYLYYLQNGRDMYVDQELDINRLSDYDVDHIVPQSFLKDDSIDNKVLTRSDKARGKSDNVPSEEVVKKMKNYWRQLLNAKLITQRKFDNLTKAERGGLSELDKAGFIKRQLVETRQITKHVAQILDSRMNTKYDENDKLIREVKVITLKSKLVSDFRKDFQFYKVREINNYHHAHDAYLNAVVGTALIKKYPKLESEFVYGDYKVYDVRKMIAKSEQEIGKATAKYFFYSNIMNFFKTEITLANGEIRKRPLIETNGETGEIVWDKGRDFATVRKVLSMPQVNIVKKTEVQTGGFSKESILPKRNSDKLIARKKDWDPKKYGGFDSPTVAYSVLVVAKVEKGKSKKLKSVKELLGITIMERSSFEKNPIDFLEAKGYKEVKKDLIIKLPKYSLFELENGRKRMLASAGELQKGNELALPSKYVNFLYLASHYEKLKGSPEDNEQKQLFVEQHKHYLDEIIEQISEFSKRVILADANLDKVLSAYNKHRDKPIREQAENIIHLFTLTNLGAPAAFKYFDTTIDRKRYTSTKEVLDATLIHQSITGLYETRIDLSQLGGDGGEAAAKEAAAKEAAAKGGLDDEYRLYSPLVKPDQNIQFWLEQFPQAWAETAGMGLAKQVPPQVIQLKASATPVSVRQYPLSKEAQEGIRPHVQRLIQQGILVPVQSPWNTPLLPVRKPGTNDYRPVQDLREVNKRVQDIHPTVPNPYNLLCALPPQRSWYTVLDLKDAFFCLRLHPTSQPLFAFEWRDPGTGRTGQLTWTRLPQGFKNSPTIFNEALHRDLANFRIQHPQVTLLQYVDDLLLAGATKQDCLEGTKALLLELSDLGYRASAKKAQICRREVTYLGYSLRDGQRWLTEARKKTVVQIPAPTTAKQVREFLGKAGFCRLFIPGFATLAAPLYPLTKPKGEFSWAPEHQKAFDAIKKALLSAPALALPDVTKPFTLYVDERKGVARGVLTQTLGPWRRPVAYLSKKLDPVASGWPVCLKAIAAVAILVKDADKLTLGQNITVIAPHALENIVRQPPDRWMTNARMTHYQSLLLTERVTFAPPAALNPATLLPEETDEPVTHDCHQLLIEETGVRKDLTDIPLTGEVLTWFTDGSSYVVEGKRMAGAAVVDGTRTIWASSLPEGTSAQKAELMALTQALRLAEGKSINIYTDSRYAFATAHVHGAIYKQRGWLTSAGREIKNKEEILSLLEALHLPKRLAIIHCPGHQKAKDPISRGNQMADRVAKQAAQGVNLLPAGKRTADGSEFEKRTADGSEFESPKKKAKVE

SEQ ID NO: 38 - protein, 2086 aa, synthetic construct
MPAAKRVKLDGGDKKYSIGLDIGTNSVGWAVITDEYKVPSKKFKVLGNTDRHSIKKNLIGALLFDSGETAEATRLKRTARRRYTRRKNRICYLQEIFSNEMAKVDDSFFHRLEESFLVEEDKKHERHPIFGNIVDEVAYHEKYPTIYHLRKKLVDSTDKADLRLIYLALAHMIKFRGHFLIEGDLNPDNSDVDKLFIQLVQTYNQLFEENPINASGVDAKAILSARLSKSRRLENLIAQLPGEKKNGLFGNLIALSLGLTPNFKSNFDLAEDAKLQLSKDTYDDDLDNLLAQIGDQYADLFLAAKNLSDAILLSDILRVNTEITKAPLSASMIKRYDEHHQDLTLLKALVRQQLPEKYKEIFFDQSKNGYAGYIDGGASQEEFYKFIKPILEKMDGTEELLVKLNREDLLRKQRTFDNGSIPHQIHLGELHAILRRQEDFYPFLKDNREKIEKILTFRIPYYVGPLARGNSRFAWMTRKSEETITPWNFEEVVDKGASAQSFIERMTNFDKNLPNEKVLPKHSLLYEYFTVYNELTKVKYVTEGMRKPAFLSGEQKKAIVDLLFKTNRKVTVKQLKEDYFKKIECFDSVEISGVEDRFNASLGTYHDLLKIIKDKDFLDNEENEDILEDIVLTLTLFEDREMIEERLKTYAHLFDDKVMKQLKRRRYTGWGRLSRKLINGIRDKQSGKTILDFLKSDGFANRNFMQLIHDDSLTFKEDIQKAQVSGQGDSLHEHIANLAGSPAIKKGILQTVKVVDELVKVMGRHKPENIVIEMARENQTTQKGQKNSRERMKRIEEGIKELGSQILKEHPVENTQLQNEKLYLYYLQNGRDMYVDQELDINRLSDYDVDHIVPQSFLKDDSIDNKVLTRSDKARGKSDNVPSEEVVKKMKNYWRQLLNAKLITQRKFDNLTKAERGGLSELDKAGFIKRQLVETRQITKHVAQILDSRMNTKYDENDKLIREVKVITLKSKLVSDFRKDFQFYKVREINNYHHAHDAYLNAVVGTALIKKYPKLESEFVYGDYKVYDVRKMIAKSEQEIGKATAKYFFYSNIMNFFKTEITLANGEIRKRPLIETNGETGEIVWDKGRDFATVRKVLSMPQVNIVKKTEVQTGGFSKESILPKRNSDKLIARKKDWDPKKYGGFDSPTVAYSVLVVAKVEKGKSKKLKSVKELLGITIMERSSFEKNPIDFLEAKGYKEVKKDLIIKLPKYSLFELENGRKRMLASAGELQKGNELALPSKYVNFLYLASHYEKLKGSPEDNEQKQLFVEQHKHYLDEIIEQISEFSKRVILADANLDKVLSAYNKHRDKPIREQAENIIHLFTLTNLGAPAAFKYFDTTIDRKRYTSTKEVLDATLIHQSITGLYETRIDLSQLGGDGGGGSGSSPAPGGLDDEYRLYSPLVKPDQNIQFWLEQFPQAWAETAGMGLAKQVPPQVIQLKASATPVSVRQYPLSKEAQEGIRPHVQRLIQQGILVPVQSPWNTPLLPVRKPGTNDYRPVQDLREVNKRVQDIHPTVPNPYNLLCALPPQRSWYTVLDLKDAFFCLRLHPTSQPLFAFEWRDPGTGRTGQLTWTRLPQGFKNSPTIFNEALHRDLANFRIQHPQVTLLQYVDDLLLAGATKQDCLEGTKALLLELSDLGYRASAKKAQICRREVTYLGYSLRDGQRWLTEARKKTVVQIPAPTTAKQVREFLGKAGFCRLFIPGFATLAAPLYPLTKPKGEFSWAPEHQKAFDAIKKALLSAPALALPDVTKPFTLYVDERKGVARGVLTQTLGPWRRPVAYLSKKLDPVASGWPVCLKAIAAVAILVKDADKLTLGQNITVIAPHALENIVRQPPDRWMTNARMTHYQSLLLTERVTFAPPAALNPATLLPEETDEPVTHDCHQLLIEETGVRKDLTDIPLTGEVLTWFTDGSSYVVEGKRMAGAAVVDGTRTIWASSLPEGTSAQKAELMALTQALRLAEGKSINIYTDSRYAFATAHVHGAIYKQRGWLTSAGREIKNKEEILSLLEALHLPKRLAIIHCPGHQKAKDPISRGNQMADRVAKQAAQGVNLLPAGKRTADGSEFEKRTADGSEFESPKKKAKVE

SEQ ID NO: 39 - protein, 2102 aa, synthetic construct
MPAAKRVKLDGGDKKYSIGLDIGTNSVGWAVITDEYKVPSKKFKVLGNTDRHSIKKNLIGALLFDSGETAEATRLKRTARRRYTRRKNRICYLQEIFSNEMAKVDDSFFHRLEESFLVEEDKKHERHPIFGNIVDEVAYHEKYPTIYHLRKKLVDSTDKADLRLIYLALAHMIKFRGHFLIEGDLNPDNSDVDKLFIQLVQTYNQLFEENPINASGVDAKAILSARLSKSRRLENLIAQLPGEKKNGLFGNLIALSLGLTPNFKSNFDLAEDAKLQLSKDTYDDDLDNLLAQIGDQYADLFLAAKNLSDAILLSDILRVNTEITKAPLSASMIKRYDEHHQDLTLLKALVRQQLPEKYKEIFFDQSKNGYAGYIDGGASQEEFYKFIKPILEKMDGTEELLVKLNREDLLRKQRTFDNGSIPHQIHLGELHAILRRQEDFYPFLKDNREKIEKILTFRIPYYVGPLARGNSRFAWMTRKSEETITPWNFEEVVDKGASAQSFIERMTNFDKNLPNEKVLPKHSLLYEYFTVYNELTKVKYVTEGMRKPAFLSGEQKKAIVDLLFKTNRKVTVKQLKEDYFKKIECFDSVEISGVEDRFNASLGTYHDLLKIIKDKDFLDNEENEDILEDIVLTLTLFEDREMIEERLKTYAHLFDDKVMKQLKRRRYTGWGRLSRKLINGIRDKQSGKTILDFLKSDGFANRNFMQLIHDDSLTFKEDIQKAQVSGQGDSLHEHIANLAGSPAIKKGILQTVKVVDELVKVMGRHKPENIVIEMARENQTTQKGQKNSRERMKRIEEGIKELGSQILKEHPVENTQLQNEKLYLYYLQNGRDMYVDQELDINRLSDYDVDHIVPQSFLKDDSIDNKVLTRSDKARGKSDNVPSEEVVKKMKNYWRQLLNAKLITQRKFDNLTKAERGGLSELDKAGFIKRQLVETRQITKHVAQILDSRMNTKYDENDKLIREVKVITLKSKLVSDFRKDFQFYKVREINNYHHAHDAYLNAVVGTALIKKYPKLESEFVYGDYKVYDVRKMIAKSEQEIGKATAKYFFYSNIMNFFKTEITLANGEIRKRPLIETNGETGEIVWDKGRDFATVRKVLSMPQVNIVKKTEVQTGGFSKESILPKRNSDKLIARKKDWDPKKYGGFDSPTVAYSVLVVAKVEKGKSKKLKSVKELLGITIMERSSFEKNPIDFLEAKGYKEVKKDLIIKLPKYSLFELENGRKRMLASAGELQKGNELALPSKYVNFLYLASHYEKLKGSPEDNEQKQLFVEQHKHYLDEIIEQISEFSKRVILADANLDKVLSAYNKHRDKPIREQAENIIHLFTLTNLGAPAAFKYFDTTIDRKRYTSTKEVLDATLIHQSITGLYETRIDLSQLGGDGGEAAAKEAAAKEAAAKEAAAKEAAAKGGLDDEYRLYSPLVKPDQNIQFWLEQFPQAWAETAGMGLAKQVPPQVIQLKASATPVSVRQYPLSKEAQEGIRPHVQRLIQQGILVPVQSPWNTPLLPVRKPGTNDYRPVQDLREVNKRVQDIHPTVPNPYNLLCALPPQRSWYTVLDLKDAFFCLRLHPTSQPLFAFEWRDPGTGRTGQLTWTRLPQGFKNSPTIFNEALHRDLANFRIQHPQVTLLQYVDDLLLAGATKQDCLEGTKALLLELSDLGYRASAKKAQICRREVTYLGYSLRDGQRWLTEARKKTVVQIPAPTTAKQVREFLGKAGFCRLFIPGFATLAAPLYPLTKPKGEFSWAPEHQKAFDAIKKALLSAPALALPDVTKPFTLYVDERKGVARGVLTQTLGPWRRPVAYLSKKLDPVASGWPVCLKAIAAVAILVKDADKLTLGQNITVIAPHALENIVRQPPDRWMTNARMTHYQSLLLTERVTFAPPAALNPATLLPEETDEPVTHDCHQLLIEETGVRKDLTDIPLTGEVLTWFTDGSSYVVEGKRMAGAAVVDGTRTIWASSLPEGTSAQKAELMALTQALRLAEGKSINIYTDSRYAFATAHVHGAIYKQRGWLTSAGREIKNKEEILSLLEALHLPKRLAIIHCPGHQKAKDPISRGNQMADRVAKQAAQGVNLLPAGKRTADGSEFEKRTADGSEFESPKKKAKVE

SEQ ID NO: 40 - protein, 2088 aa, synthetic construct
MPAAKRVKLDGGDKKYSIGLDIGTNSVGWAVITDEYKVPSKKFKVLGNTDRHSIKKNLIGALLFDSGETAEATRLKRTARRRYTRRKNRICYLQEIFSNEMAKVDDSFFHRLEESFLVEEDKKHERHPIFGNIVDEVAYHEKYPTIYHLRKKLVDSTDKADLRLIYLALAHMIKFRGHFLIEGDLNPDNSDVDKLFIQLVQTYNQLFEENPINASGVDAKAILSARLSKSRRLENLIAQLPGEKKNGLFGNLIALSLGLTPNFKSNFDLAEDAKLQLSKDTYDDDLDNLLAQIGDQYADLFLAAKNLSDAILLSDILRVNTEITKAPLSASMIKRYDEHHQDLTLLKALVRQQLPEKYKEIFFDQSKNGYAGYIDGGASQEEFYKFIKPILEKMDGTEELLVKLNREDLLRKQRTFDNGSIPHQIHLGELHAILRRQEDFYPFLKDNREKIEKILTFRIPYYVGPLARGNSRFAWMTRKSEETITPWNFEEVVDKGASAQSFIERMTNFDKNLPNEKVLPKHSLLYEYFTVYNELTKVKYVTEGMRKPAFLSGEQKKAIVDLLFKTNRKVTVKQLKEDYFKKIECFDSVEISGVEDRFNASLGTYHDLLKIIKDKDFLDNEENEDILEDIVLTLTLFEDREMIEERLKTYAHLFDDKVMKQLKRRRYTGWGRLSRKLINGIRDKQSGKTILDFLKSDGFANRNFMQLIHDDSLTFKEDIQKAQVSGQGDSLHEHIANLAGSPAIKKGILQTVKVVDELVKVMGRHKPENIVIEMARENQTTQKGQKNSRERMKRIEEGIKELGSQILKEHPVENTQLQNEKLYLYYLQNGRDMYVDQELDINRLSDYDVDHIVPQSFLKDDSIDNKVLTRSDKARGKSDNVPSEEVVKKMKNYWRQLLNAKLITQRKFDNLTKAERGGLSELDKAGFIKRQLVETRQITKHVAQILDSRMNTKYDENDKLIREVKVITLKSKLVSDFRKDFQFYKVREINNYHHAHDAYLNAVVGTALIKKYPKLESEFVYGDYKVYDVRKMIAKSEQEIGKATAKYFFYSNIMNFFKTEITLANGEIRKRPLIETNGETGEIVWDKGRDFATVRKVLSMPQVNIVKKTEVQTGGFSKESILPKRNSDKLIARKKDWDPKKYGGFDSPTVAYSVLVVAKVEKGKSKKLKSVKELLGITIMERSSFEKNPIDFLEAKGYKEVKKDLIIKLPKYSLFELENGRKRMLASAGELQKGNELALPSKYVNFLYLASHYEKLKGSPEDNEQKQLFVEQHKHYLDEIIEQISEFSKRVILADANLDKVLSAYNKHRDKPIREQAENIIHLFTLTNLGAPAAFKYFDTTIDRKRYTSTKEVLDATLIHQSITGLYETRIDLSQLGGDGGGSSGGGEAAAKGGLDDEYRLYSPLVKPDQNIQFWLEQFPQAWAETAGMGLAKQVPPQVIQLKASATPVSVRQYPLSKEAQEGIRPHVQRLIQQGILVPVQSPWNTPLLPVRKPGTNDYRPVQDLREVNKRVQDIHPTVPNPYNLLCALPPQRSWYTVLDLKDAFFCLRLHPTSQPLFAFEWRDPGTGRTGQLTWTRLPQGFKNSPTIFNEALHRDLANFRIQHPQVTLLQYVDDLLLAGATKQDCLEGTKALLLELSDLGYRASAKKAQICRREVTYLGYSLRDGQRWLTEARKKTVVQIPAPTTAKQVREFLGKAGFCRLFIPGFATLAAPLYPLTKPKGEFSWAPEHQKAFDAIKKALLSAPALALPDVTKPFTLYVDERKGVARGVLTQTLGPWRRPVAYLSKKLDPVASGWPVCLKAIAAVAILVKDADKLTLGQNITVIAPHALENIVRQPPDRWMTNARMTHYQSLLLTERVTFAPPAALNPATLLPEETDEPVTHDCHQLLIEETGVRKDLTDIPLTGEVLTWFTDGSSYVVEGKRMAGAAVVDGTRTIWASSLPEGTSAQKAELMALTQALRLAEGKSINIYTDSRYAFATAHVHGAIYKQRGWLTSAGREIKNKEEILSLLEALHLPKRLAIIHCPGHQKAKDPISRGNQMADRVAKQAAQGVNLLPAGKRTADGSEFEKRTADGSEFESPKKKAKVE

SEQ ID NO: 41 - protein, 2089 aa, synthetic construct
MPAAKRVKLDGGDKKYSIGLDIGTNSVGWAVITDEYKVPSKKFKVLGNTDRHSIKKNLIGALLFDSGETAEATRLKRTARRRYTRRKNRICYLQEIFSNEMAKVDDSFFHRLEESFLVEEDKKHERHPIFGNIVDEVAYHEKYPTIYHLRKKLVDSTDKADLRLIYLALAHMIKFRGHFLIEGDLNPDNSDVDKLFIQLVQTYNQLFEENPINASGVDAKAILSARLSKSRRLENLIAQLPGEKKNGLFGNLIALSLGLTPNFKSNFDLAEDAKLQLSKDTYDDDLDNLLAQIGDQYADLFLAAKNLSDAILLSDILRVNTEITKAPLSASMIKRYDEHHQDLTLLKALVRQQLPEKYKEIFFDQSKNGYAGYIDGGASQEEFYKFIKPILEKMDGTEELLVKLNREDLLRKQRTFDNGSIPHQIHLGELHAILRRQEDFYPFLKDNREKIEKILTFRIPYYVGPLARGNSRFAWMTRKSEETITPWNFEEVVDKGASAQSFIERMTNFDKNLPNEKVLPKHSLLYEYFTVYNELTKVKYVTEGMRKPAFLSGEQKKAIVDLLFKTNRKVTVKQLKEDYFKKIECFDSVEISGVEDRFNASLGTYHDLLKIIKDKDFLDNEENEDILEDIVLTLTLFEDREMIEERLKTYAHLFDDKVMKQLKRRRYTGWGRLSRKLINGIRDKQSGKTILDFLKSDGFANRNFMQLIHDDSLTFKEDIQKAQVSGQGDSLHEHIANLAGSPAIKKGILQTVKVVDELVKVMGRHKPENIVIEMARENQTTQKGQKNSRERMKRIEEGIKELGSQILKEHPVENTQLQNEKLYLYYLQNGRDMYVDQELDINRLSDYDVDHIVPQSFLKDDSIDNKVLTRSDKARGKSDNVPSEEVVKKMKNYWRQLLNAKLITQRKFDNLTKAERGGLSELDKAGFIKRQLVETRQITKHVAQILDSRMNTKYDENDKLIREVKVITLKSKLVSDFRKDFQFYKVREINNYHHAHDAYLNAVVGTALIKKYPKLESEFVYGDYKVYDVRKMIAKSEQEIGKATAKYFFYSNIMNFFKTEITLANGEIRKRPLIETNGETGEIVWDKGRDFATVRKVLSMPQVNIVKKTEVQTGGFSKESILPKRNSDKLIARKKDWDPKKYGGFDSPTVAYSVLVVAKVEKGKSKKLKSVKELLGITIMERSSFEKNPIDFLEAKGYKEVKKDLIIKLPKYSLFELENGRKRMLASAGELQKGNELALPSKYVNFLYLASHYEKLKGSPEDNEQKQLFVEQHKHYLDEIIEQISEFSKRVILADANLDKVLSAYNKHRDKPIREQAENIIHLFTLTNLGAPAAFKYFDTTIDRKRYTSTKEVLDATLIHQSITGLYETRIDLSQLGGDGGGSSGSSGSSGSSGGLDDEYRLYSPLVKPDQNIQFWLEQFPQAWAETAGMGLAKQVPPQVIQLKASATPVSVRQYPLSKEAQEGIRPHVQRLIQQGILVPVQSPWNTPLLPVRKPGTNDYRPVQDLREVNKRVQDIHPTVPNPYNLLCALPPQRSWYTVLDLKDAFFCLRLHPTSQPLFAFEWRDPGTGRTGQLTWTRLPQGFKNSPTIFNEALHRDLANFRIQHPQVTLLQYVDDLLLAGATKQDCLEGTKALLLELSDLGYRASAKKAQICRREVTYLGYSLRDGQRWLTEARKKTVVQIPAPTTAKQVREFLGKAGFCRLFIPGFATLAAPLYPLTKPKGEFSWAPEHQKAFDAIKKALLSAPALALPDVTKPFTLYVDERKGVARGVLTQTLGPWRRPVAYLSKKLDPVASGWPVCLKAIAAVAILVKDADKLTLGQNITVIAPHALENIVRQPPDRWMTNARMTHYQSLLLTERVTFAPPAALNPATLLPEETDEPVTHDCHQLLIEETGVRKDLTDIPLTGEVLTWFTDGSSYVVEGKRMAGAAVVDGTRTIWASSLPEGTSAQKAELMALTQALRLAEGKSINIYTDSRYAFATAHVHGAIYKQRGWLTSAGREIKNKEEILSLLEALHLPKRLAIIHCPGHQKAKDPISRGNQMADRVAKQAAQGVNLLPAGKRTADGSEFEKRTADGSEFESPKKKAKVE

SEQ ID NO: 42 - protein, 2088 aa, synthetic construct
MPAAKRVKLDGGDKKYSIGLDIGTNSVGWAVITDEYKVPSKKFKVLGNTDRHSIKKNLIGALLFDSGETAEATRLKRTARRRYTRRKNRICYLQEIFSNEMAKVDDSFFHRLEESFLVEEDKKHERHPIFGNIVDEVAYHEKYPTIYHLRKKLVDSTDKADLRLIYLALAHMIKFRGHFLIEGDLNPDNSDVDKLFIQLVQTYNQLFEENPINASGVDAKAILSARLSKSRRLENLIAQLPGEKKNGLFGNLIALSLGLTPNFKSNFDLAEDAKLQLSKDTYDDDLDNLLAQIGDQYADLFLAAKNLSDAILLSDILRVNTEITKAPLSASMIKRYDEHHQDLTLLKALVRQQLPEKYKEIFFDQSKNGYAGYIDGGASQEEFYKFIKPILEKMDGTEELLVKLNREDLLRKQRTFDNGSIPHQIHLGELHAILRRQEDFYPFLKDNREKIEKILTFRIPYYVGPLARGNSRFAWMTRKSEETITPWNFEEVVDKGASAQSFIERMTNFDKNLPNEKVLPKHSLLYEYFTVYNELTKVKYVTEGMRKPAFLSGEQKKAIVDLLFKTNRKVTVKQLKEDYFKKIECFDSVEISGVEDRFNASLGTYHDLLKIIKDKDFLDNEENEDILEDIVLTLTLFEDREMIEERLKTYAHLFDDKVMKQLKRRRYTGWGRLSRKLINGIRDKQSGKTILDFLKSDGFANRNFMQLIHDDSLTFKEDIQKAQVSGQGDSLHEHIANLAGSPAIKKGILQTVKVVDELVKVMGRHKPENIVIEMARENQTTQKGQKNSRERMKRIEEGIKELGSQILKEHPVENTQLQNEKLYLYYLQNGRDMYVDQELDINRLSDYDVDHIVPQSFLKDDSIDNKVLTRSDKARGKSDNVPSEEVVKKMKNYWRQLLNAKLITQRKFDNLTKAERGGLSELDKAGFIKRQLVETRQITKHVAQILDSRMNTKYDENDKLIREVKVITLKSKLVSDFRKDFQFYKVREINNYHHAHDAYLNAVVGTALIKKYPKLESEFVYGDYKVYDVRKMIAKSEQEIGKATAKYFFYSNIMNFFKTEITLANGEIRKRPLIETNGETGEIVWDKGRDFATVRKVLSMPQVNIVKKTEVQTGGFSKESILPKRNSDKLIARKKDWDPKKYGGFDSPTVAYSVLVVAKVEKGKSKKLKSVKELLGITIMERSSFEKNPIDFLEAKGYKEVKKDLIIKLPKYSLFELENGRKRMLASAGELQKGNELALPSKYVNFLYLASHYEKLKGSPEDNEQKQLFVEQHKHYLDEIIEQISEFSKRVILADANLDKVLSAYNKHRDKPIREQAENIIHLFTLTNLGAPAAFKYFDTTIDRKRYTSTKEVLDATLIHQSITGLYETRIDLSQLGGDGGGSSEAAAKGGGGGLDDEYRLYSPLVKPDQNIQFWLEQFPQAWAETAGMGLAKQVPPQVIQLKASATPVSVRQYPLSKEAQEGIRPHVQRLIQQGILVPVQSPWNTPLLPVRKPGTNDYRPVQDLREVNKRVQDIHPTVPNPYNLLCALPPQRSWYTVLDLKDAFFCLRLHPTSQPLFAFEWRDPGTGRTGQLTWTRLPQGFKNSPTIFNEALHRDLANFRIQHPQVTLLQYVDDLLLAGATKQDCLEGTKALLLELSDLGYRASAKKAQICRREVTYLGYSLRDGQRWLTEARKKTVVQIPAPTTAKQVREFLGKAGFCRLFIPGFATLAAPLYPLTKPKGEFSWAPEHQKAFDAIKKALLSAPALALPDVTKPFTLYVDERKGVARGVLTQTLGPWRRPVAYLSKKLDPVASGWPVCLKAIAAVAILVKDADKLTLGQNITVIAPHALENIVRQPPDRWMTNARMTHYQSLLLTERVTFAPPAALNPATLLPEETDEPVTHDCHQLLIEETGVRKDLTDIPLTGEVLTWFTDGSSYVVEGKRMAGAAVVDGTRTIWASSLPEGTSAQKAELMALTQALRLAEGKSINIYTDSRYAFATAHVHGAIYKQRGWLTSAGREIKNKEEILSLLEALHLPKRLAIIHCPGHQKAKDPISRGNQMADRVAKQAAQGVNLLPAGKRTADGSEFEKRTADGSEFESPKKKAKVE

SEQ ID NO: 43 - protein, 2086 aa, synthetic construct
MPAAKRVKLDGGDKKYSIGLDIGTNSVGWAVITDEYKVPSKKFKVLGNTDRHSIKKNLIGALLFDSGETAEATRLKRTARRRYTRRKNRICYLQEIFSNEMAKVDDSFFHRLEESFLVEEDKKHERHPIFGNIVDEVAYHEKYPTIYHLRKKLVDSTDKADLRLIYLALAHMIKFRGHFLIEGDLNPDNSDVDKLFIQLVQTYNQLFEENPINASGVDAKAILSARLSKSRRLENLIAQLPGEKKNGLFGNLIALSLGLTPNFKSNFDLAEDAKLQLSKDTYDDDLDNLLAQIGDQYADLFLAAKNLSDAILLSDILRVNTEITKAPLSASMIKRYDEHHQDLTLLKALVRQQLPEKYKEIFFDQSKNGYAGYIDGGASQEEFYKFIKPILEKMDGTEELLVKLNREDLLRKQRTFDNGSIPHQIHLGELHAILRRQEDFYPFLKDNREKIEKILTFRIPYYVGPLARGNSRFAWMTRKSEETITPWNFEEVVDKGASAQSFIERMTNFDKNLPNEKVLPKHSLLYEYFTVYNELTKVKYVTEGMRKPAFLSGEQKKAIVDLLFKTNRKVTVKQLKEDYFKKIECFDSVEISGVEDRFNASLGTYHDLLKIIKDKDFLDNEENEDILEDIVLTLTLFEDREMIEERLKTYAHLFDDKVMKQLKRRRYTGWGRLSRKLINGIRDKQSGKTILDFLKSDGFANRNFMQLIHDDSLTFKEDIQKAQVSGQGDSLHEHIANLAGSPAIKKGILQTVKVVDELVKVMGRHKPENIVIEMARENQTTQKGQKNSRERMKRIEEGIKELGSQILKEHPVENTQLQNEKLYLYYLQNGRDMYVDQELDINRLSDYDVDHIVPQSFLKDDSIDNKVLTRSDKARGKSDNVPSEEVVKKMKNYWRQLLNAKLITQRKFDNLTKAERGGLSELDKAGFIKRQLVETRQITKHVAQILDSRMNTKYDENDKLIREVKVITLKSKLVSDFRKDFQFYKVREINNYHHAHDAYLNAVVGTALIKKYPKLESEFVYGDYKVYDVRKMIAKSEQEIGKATAKYFFYSNIMNFFKTEITLANGEIRKRPLIETNGETGEIVWDKGRDFATVRKVLSMPQVNIVKKTEVQTGGFSKESILPKRNSDKLIARKKDWDPKKYGGFDSPTVAYSVLVVAKVEKGKSKKLKSVKELLGITIMERSSFEKNPIDFLEAKGYKEVKKDLIIKLPKYSLFELENGRKRMLASAGELQKGNELALPSKYVNFLYLASHYEKLKGSPEDNEQKQLFVEQHKHYLDEIIEQISEFSKRVILADANLDKVLSAYNKHRDKPIREQAENIIHLFTLTNLGAPAAFKYFDTTIDRKRYTSTKEVLDATLIHQSITGLYETRIDLSQLGGDGGGGGGSSPAPGGLDDEYRLYSPLVKPDQNIQFWLEQFPQAWAETAGMGLAKQVPPQVIQLKASATPVSVRQYPLSKEAQEGIRPHVQRLIQQGILVPVQSPWNTPLLPVRKPGTNDYRPVQDLREVNKRVQDIHPTVPNPYNLLCALPPQRSWYTVLDLKDAFFCLRLHPTSQPLFAFEWRDPGTGRTGQLTWTRLPQGFKNSPTIFNEALHRDLANFRIQHPQVTLLQYVDDLLLAGATKQDCLEGTKALLLELSDLGYRASAKKAQICRREVTYLGYSLRDGQRWLTEARKKTVVQIPAPTTAKQVREFLGKAGFCRLFIPGFATLAAPLYPLTKPKGEFSWAPEHQKAFDAIKKALLSAPALALPDVTKPFTLYVDERKGVARGVLTQTLGPWRRPVAYLSKKLDPVASGWPVCLKAIAAVAILVKDADKLTLGQNITVIAPHALENIVRQPPDRWMTNARMTHYQSLLLTERVTFAPPAALNPATLLPEETDEPVTHDCHQLLIEETGVRKDLTDIPLTGEVLTWFTDGSSYVVEGKRMAGAAVVDGTRTIWASSLPEGTSAQKAELMALTQALRLAEGKSINIYTDSRYAFATAHVHGAIYKQRGWLTSAGREIKNKEEILSLLEALHLPKRLAIIHCPGHQKAKDPISRGNQMADRVAKQAAQGVNLLPAGKRTADGSEFEKRTADGSEFESPKKKAKVE

SEQ ID NO: 44 - protein, 2086 aa, synthetic construct
MPAAKRVKLDGGDKKYSIGLDIGTNSVGWAVITDEYKVPSKKFKVLGNTDRHSIKKNLIGALLFDSGETAEATRLKRTARRRYTRRKNRICYLQEIFSNEMAKVDDSFFHRLEESFLVEEDKKHERHPIFGNIVDEVAYHEKYPTIYHLRKKLVDSTDKADLRLIYLALAHMIKFRGHFLIEGDLNPDNSDVDKLFIQLVQTYNQLFEENPINASGVDAKAILSARLSKSRRLENLIAQLPGEKKNGLFGNLIALSLGLTPNFKSNFDLAEDAKLQLSKDTYDDDLDNLLAQIGDQYADLFLAAKNLSDAILLSDILRVNTEITKAPLSASMIKRYDEHHQDLTLLKALVRQQLPEKYKEIFFDQSKNGYAGYIDGGASQEEFYKFIKPILEKMDGTEELLVKLNREDLLRKQRTFDNGSIPHQIHLGELHAILRRQEDFYPFLKDNREKIEKILTFRIPYYVGPLARGNSRFAWMTRKSEETITPWNFEEVVDKGASAQSFIERMTNFDKNLPNEKVLPKHSLLYEYFTVYNELTKVKYVTEGMRKPAFLSGEQKKAIVDLLFKTNRKVTVKQLKEDYFKKIECFDSVEISGVEDRFNASLGTYHDLLKIIKDKDFLDNEENEDILEDIVLTLTLFEDREMIEERLKTYAHLFDDKVMKQLKRRRYTGWGRLSRKLINGIRDKQSGKTILDFLKSDGFANRNFMQLIHDDSLTFKEDIQKAQVSGQGDSLHEHIANLAGSPAIKKGILQTVKVVDELVKVMGRHKPENIVIEMARENQTTQKGQKNSRERMKRIEEGIKELGSQILKEHPVENTQLQNEKLYLYYLQNGRDMYVDQELDINRLSDYDVDHIVPQSFLKDDSIDNKVLTRSDKARGKSDNVPSEEVVKKMKNYWRQLLNAKLITQRKFDNLTKAERGGLSELDKAGFIKRQLVETRQITKHVAQILDSRMNTKYDENDKLIREVKVITLKSKLVSDFRKDFQFYKVREINNYHHAHDAYLNAVVGTALIKKYPKLESEFVYGDYKVYDVRKMIAKSEQEIGKATAKYFFYSNIMNFFKTEITLANGEIRKRPLIETNGETGEIVWDKGRDFATVRKVLSMPQVNIVKKTEVQTGGFSKESILPKRNSDKLIARKKDWDPKKYGGFDSPTVAYSVLVVAKVEKGKSKKLKSVKELLGITIMERSSFEKNPIDFLEAKGYKEVKKDLIIKLPKYSLFELENGRKRMLASAGELQKGNELALPSKYVNFLYLASHYEKLKGSPEDNEQKQLFVEQHKHYLDEIIEQISEFSKRVILADANLDKVLSAYNKHRDKPIREQAENIIHLFTLTNLGAPAAFKYFDTTIDRKRYTSTKEVLDATLIHQSITGLYETRIDLSQLGGDGGPAPGGSGGGGGLDDEYRLYSPLVKPDQNIQFWLEQFPQAWAETAGMGLAKQVPPQVIQLKASATPVSVRQYPLSKEAQEGIRPHVQRLIQQGILVPVQSPWNTPLLPVRKPGTNDYRPVQDLREVNKRVQDIHPTVPNPYNLLCALPPQRSWYTVLDLKDAFFCLRLHPTSQPLFAFEWRDPGTGRTGQLTWTRLPQGFKNSPTIFNEALHRDLANFRIQHPQVTLLQYVDDLLLAGATKQDCLEGTKALLLELSDLGYRASAKKAQICRREVTYLGYSLRDGQRWLTEARKKTVVQIPAPTTAKQVREFLGKAGFCRLFIPGFATLAAPLYPLTKPKGEFSWAPEHQKAFDAIKKALLSAPALALPDVTKPFTLYVDERKGVARGVLTQTLGPWRRPVAYLSKKLDPVASGWPVCLKAIAAVAILVKDADKLTLGQNITVIAPHALENIVRQPPDRWMTNARMTHYQSLLLTERVTFAPPAALNPATLLPEETDEPVTHDCHQLLIEETGVRKDLTDIPLTGEVLTWFTDGSSYVVEGKRMAGAAVVDGTRTIWASSLPEGTSAQKAELMALTQALRLAEGKSINIYTDSRYAFATAHVHGAIYKQRGWLTSAGREIKNKEEILSLLEALHLPKRLAIIHCPGHQKAKDPISRGNQMADRVAKQAAQGVNLLPAGKRTADGSEFEKRTADGSEFESPKKKAKVE

SEQ ID NO: 45 - protein, 2084 aa, synthetic construct
MPAAKRVKLDGGDKKYSIGLDIGTNSVGWAVITDEYKVPSKKFKVLGNTDRHSIKKNLIGALLFDSGETAEATRLKRTARRRYTRRKNRICYLQEIFSNEMAKVDDSFFHRLEESFLVEEDKKHERHPIFGNIVDEVAYHEKYPTIYHLRKKLVDSTDKADLRLIYLALAHMIKFRGHFLIEGDLNPDNSDVDKLFIQLVQTYNQLFEENPINASGVDAKAILSARLSKSRRLENLIAQLPGEKKNGLFGNLIALSLGLTPNFKSNFDLAEDAKLQLSKDTYDDDLDNLLAQIGDQYADLFLAAKNLSDAILLSDILRVNTEITKAPLSASMIKRYDEHHQDLTLLKALVRQQLPEKYKEIFFDQSKNGYAGYIDGGASQEEFYKFIKPILEKMDGTEELLVKLNREDLLRKQRTFDNGSIPHQIHLGELHAILRRQEDFYPFLKDNREKIEKILTFRIPYYVGPLARGNSRFAWMTRKSEETITPWNFEEVVDKGASAQSFIERMTNFDKNLPNEKVLPKHSLLYEYFTVYNELTKVKYVTEGMRKPAFLSGEQKKAIVDLLFKTNRKVTVKQLKEDYFKKIECFDSVEISGVEDRFNASLGTYHDLLKIIKDKDFLDNEENEDILEDIVLTLTLFEDREMIEERLKTYAHLFDDKVMKQLKRRRYTGWGRLSRKLINGIRDKQSGKTILDFLKSDGFANRNFMQLIHDDSLTFKEDIQKAQVSGQGDSLHEHIANLAGSPAIKKGILQTVKVVDELVKVMGRHKPENIVIEMARENQTTQKGQKNSRERMKRIEEGIKELGSQILKEHPVENTQLQNEKLYLYYLQNGRDMYVDQELDINRLSDYDVDHIVPQSFLKDDSIDNKVLTRSDKARGKSDNVPSEEVVKKMKNYWRQLLNAKLITQRKFDNLTKAERGGLSELDKAGFIKRQLVETRQITKHVAQILDSRMNTKYDENDKLIREVKVITLKSKLVSDFRKDFQFYKVREINNYHHAHDAYLNAVVGTALIKKYPKLESEFVYGDYKVYDVRKMIAKSEQEIGKATAKYFFYSNIMNFFKTEITLANGEIRKRPLIETNGETGEIVWDKGRDFATVRKVLSMPQVNIVKKTEVQTGGFSKESILPKRNSDKLIARKKDWDPKKYGGFDSPTVAYSVLVVAKVEKGKSKKLKSVKELLGITIMERSSFEKNPIDFLEAKGYKEVKKDLIIKLPKYSLFELENGRKRMLASAGELQKGNELALPSKYVNFLYLASHYEKLKGSPEDNEQKQLFVEQHKHYLDEIIEQISEFSKRVILADANLDKVLSAYNKHRDKPIREQAENIIHLFTLTNLGAPAAFKYFDTTIDRKRYTSTKEVLDATLIHQSITGLYETRIDLSQLGGDGGPAPAPAPGGLDDEYRLYSPLVKPDQNIQFWLEQFPQAWAETAGMGLAKQVPPQVIQLKASATPVSVRQYPLSKEAQEGIRPHVQRLIQQGILVPVQSPWNTPLLPVRKPGTNDYRPVQDLREVNKRVQDIHPTVPNPYNLLCALPPQRSWYTVLDLKDAFFCLRLHPTSQPLFAFEWRDPGTGRTGQLTWTRLPQGFKNSPTIFNEALHRDLANFRIQHPQVTLLQYVDDLLLAGATKQDCLEGTKALLLELSDLGYRASAKKAQICRREVTYLGYSLRDGQRWLTEARKKTVVQIPAPTTAKQVREFLGKAGFCRLFIPGFATLAAPLYPLTKPKGEFSWAPEHQKAFDAIKKALLSAPALALPDVTKPFTLYVDERKGVARGVLTQTLGPWRRPVAYLSKKLDPVASGWPVCLKAIAAVAILVKDADKLTLGQNITVIAPHALENIVRQPPDRWMTNARMTHYQSLLLTERVTFAPPAALNPATLLPEETDEPVTHDCHQLLIEETGVRKDLTDIPLTGEVLTWFTDGSSYVVEGKRMAGAAVVDGTRTIWASSLPEGTSAQKAELMALTQALRLAEGKSINIYTDSRYAFATAHVHGAIYKQRGWLTSAGREIKNKEEILSLLEALHLPKRLAIIHCPGHQKAKDPISRGNQMADRVAKQAAQGVNLLPAGKRTADGSEFEKRTADGSEFESPKKKAKVE

SEQ ID NO: 46 - protein, 2097 aa, synthetic construct
MPAAKRVKLDGGDKKYSIGLDIGTNSVGWAVITDEYKVPSKKFKVLGNTDRHSIKKNLIGALLFDSGETAEATRLKRTARRRYTRRKNRICYLQEIFSNEMAKVDDSFFHRLEESFLVEEDKKHERHPIFGNIVDEVAYHEKYPTIYHLRKKLVDSTDKADLRLIYLALAHMIKFRGHFLIEGDLNPDNSDVDKLFIQLVQTYNQLFEENPINASGVDAKAILSARLSKSRRLENLIAQLPGEKKNGLFGNLIALSLGLTPNFKSNFDLAEDAKLQLSKDTYDDDLDNLLAQIGDQYADLFLAAKNLSDAILLSDILRVNTEITKAPLSASMIKRYDEHHQDLTLLKALVRQQLPEKYKEIFFDQSKNGYAGYIDGGASQEEFYKFIKPILEKMDGTEELLVKLNREDLLRKQRTFDNGSIPHQIHLGELHAILRRQEDFYPFLKDNREKIEKILTFRIPYYVGPLARGNSRFAWMTRKSEETITPWNFEEVVDKGASAQSFIERMTNFDKNLPNEKVLPKHSLLYEYFTVYNELTKVKYVTEGMRKPAFLSGEQKKAIVDLLFKTNRKVTVKQLKEDYFKKIECFDSVEISGVEDRFNASLGTYHDLLKIIKDKDFLDNEENEDILEDIVLTLTLFEDREMIEERLKTYAHLFDDKVMKQLKRRRYTGWGRLSRKLINGIRDKQSGKTILDFLKSDGFANRNFMQLIHDDSLTFKEDIQKAQVSGQGDSLHEHIANLAGSPAIKKGILQTVKVVDELVKVMGRHKPENIVIEMARENQTTQKGQKNSRERMKRIEEGIKELGSQILKEHPVENTQLQNEKLYLYYLQNGRDMYVDQELDINRLSDYDVDHIVPQSFLKDDSIDNKVLTRSDKARGKSDNVPSEEVVKKMKNYWRQLLNAKLITQRKFDNLTKAERGGLSELDKAGFIKRQLVETRQITKHVAQILDSRMNTKYDENDKLIREVKVITLKSKLVSDFRKDFQFYKVREINNYHHAHDAYLNAVVGTALIKKYPKLESEFVYGDYKVYDVRKMIAKSEQEIGKATAKYFFYSNIMNFFKTEITLANGEIRKRPLIETNGETGEIVWDKGRDFATVRKVLSMPQVNIVKKTEVQTGGFSKESILPKRNSDKLIARKKDWDPKKYGGFDSPTVAYSVLVVAKVEKGKSKKLKSVKELLGITIMERSSFEKNPIDFLEAKGYKEVKKDLIIKLPKYSLFELENGRKRMLASAGELQKGNELALPSKYVNFLYLASHYEKLKGSPEDNEQKQLFVEQHKHYLDEIIEQISEFSKRVILADANLDKVLSAYNKHRDKPIREQAENIIHLFTLTNLGAPAAFKYFDTTIDRKRYTSTKEVLDATLIHQSITGLYETRIDLSQLGGDGGEAAAKEAAAKEAAAKEAAAKGGLDDEYRLYSPLVKPDQNIQFWLEQFPQAWAETAGMGLAKQVPPQVIQLKASATPVSVRQYPLSKEAQEGIRPHVQRLIQQGILVPVQSPWNTPLLPVRKPGTNDYRPVQDLREVNKRVQDIHPTVPNPYNLLCALPPQRSWYTVLDLKDAFFCLRLHPTSQPLFAFEWRDPGTGRTGQLTWTRLPQGFKNSPTIFNEALHRDLANFRIQHPQVTLLQYVDDLLLAGATKQDCLEGTKALLLELSDLGYRASAKKAQICRREVTYLGYSLRDGQRWLTEARKKTVVQIPAPTTAKQVREFLGKAGFCRLFIPGFATLAAPLYPLTKPKGEFSWAPEHQKAFDAIKKALLSAPALALPDVTKPFTLYVDERKGVARGVLTQTLGPWRRPVAYLSKKLDPVASGWPVCLKAIAAVAILVKDADKLTLGQNITVIAPHALENIVRQPPDRWMTNARMTHYQSLLLTERVTFAPPAALNPATLLPEETDEPVTHDCHQLLIEETGVRKDLTDIPLTGEVLTWFTDGSSYVVEGKRMAGAAVVDGTRTIWASSLPEGTSAQKAELMALTQALRLAEGKSINIYTDSRYAFATAHVHGAIYKQRGWLTSAGREIKNKEEILSLLEALHLPKRLAIIHCPGHQKAKDPISRGNQMADRVAKQAAQGVNLLPAGKRTADGSEFEKRTADGSEFESPKKKAKVE

SEQ ID NO: 47 - protein, 2083 aa, synthetic construct
MPAAKRVKLDGGDKKYSIGLDIGTNSVGWAVITDEYKVPSKKFKVLGNTDRHSIKKNLIGALLFDSGETAEATRLKRTARRRYTRRKNRICYLQEIFSNEMAKVDDSFFHRLEESFLVEEDKKHERHPIFGNIVDEVAYHEKYPTIYHLRKKLVDSTDKADLRLIYLALAHMIKFRGHFLIEGDLNPDNSDVDKLFIQLVQTYNQLFEENPINASGVDAKAILSARLSKSRRLENLIAQLPGEKKNGLFGNLIALSLGLTPNFKSNFDLAEDAKLQLSKDTYDDDLDNLLAQIGDQYADLFLAAKNLSDAILLSDILRVNTEITKAPLSASMIKRYDEHHQDLTLLKALVRQQLPEKYKEIFFDQSKNGYAGYIDGGASQEEFYKFIKPILEKMDGTEELLVKLNREDLLRKQRTFDNGSIPHQIHLGELHAILRRQEDFYPFLKDNREKIEKILTFRIPYYVGPLARGNSRFAWMTRKSEETITPWNFEEVVDKGASAQSFIERMTNFDKNLPNEKVLPKHSLLYEYFTVYNELTKVKYVTEGMRKPAFLSGEQKKAIVDLLFKTNRKVTVKQLKEDYFKKIECFDSVEISGVEDRFNASLGTYHDLLKIIKDKDFLDNEENEDILEDIVLTLTLFEDREMIEERLKTYAHLFDDKVMKQLKRRRYTGWGRLSRKLINGIRDKQSGKTILDFLKSDGFANRNFMQLIHDDSLTFKEDIQKAQVSGQGDSLHEHIANLAGSPAIKKGILQTVKVVDELVKVMGRHKPENIVIEMARENQTTQKGQKNSRERMKRIEEGIKELGSQILKEHPVENTQLQNEKLYLYYLQNGRDMYVDQELDINRLSDYDVDHIVPQSFLKDDSIDNKVLTRSDKARGKSDNVPSEEVVKKMKNYWRQLLNAKLITQRKFDNLTKAERGGLSELDKAGFIKRQLVETRQITKHVAQILDSRMNTKYDENDKLIREVKVITLKSKLVSDFRKDFQFYKVREINNYHHAHDAYLNAVVGTALIKKYPKLESEFVYGDYKVYDVRKMIAKSEQEIGKATAKYFFYSNIMNFFKTEITLANGEIRKRPLIETNGETGEIVWDKGRDFATVRKVLSMPQVNIVKKTEVQTGGFSKESILPKRNSDKLIARKKDWDPKKYGGFDSPTVAYSVLVVAKVEKGKSKKLKSVKELLGITIMERSSFEKNPIDFLEAKGYKEVKKDLIIKLPKYSLFELENGRKRMLASAGELQKGNELALPSKYVNFLYLASHYEKLKGSPEDNEQKQLFVEQHKHYLDEIIEQISEFSKRVILADANLDKVLSAYNKHRDKPIREQAENIIHLFTLTNLGAPAAFKYFDTTIDRKRYTSTKEVLDATLIHQSITGLYETRIDLSQLGGDGGGSSPAPGGLDDEYRLYSPLVKPDQNIQFWLEQFPQAWAETAGMGLAKQVPPQVIQLKASATPVSVRQYPLSKEAQEGIRPHVQRLIQQGILVPVQSPWNTPLLPVRKPGTNDYRPVQDLREVNKRVQDIHPTVPNPYNLLCALPPQRSWYTVLDLKDAFFCLRLHPTSQPLFAFEWRDPGTGRTGQLTWTRLPQGFKNSPTIFNEALHRDLANFRIQHPQVTLLQYVDDLLLAGATKQDCLEGTKALLLELSDLGYRASAKKAQICRREVTYLGYSLRDGQRWLTEARKKTVVQIPAPTTAKQVREFLGKAGFCRLFIPGFATLAAPLYPLTKPKGEFSWAPEHQKAFDAIKKALLSAPALALPDVTKPFTLYVDERKGVARGVLTQTLGPWRRPVAYLSKKLDPVASGWPVCLKAIAAVAILVKDADKLTLGQNITVIAPHALENIVRQPPDRWMTNARMTHYQSLLLTERVTFAPPAALNPATLLPEETDEPVTHDCHQLLIEETGVRKDLTDIPLTGEVLTWFTDGSSYVVEGKRMAGAAVVDGTRTIWASSLPEGTSAQKAELMALTQALRLAEGKSINIYTDSRYAFATAHVHGAIYKQRGWLTSAGREIKNKEEILSLLEALHLPKRLAIIHCPGHQKAKDPISRGNQMADRVAKQAAQGVNLLPAGKRTADGSEFEKRTADGSEFESPKKKAKVE

SEQ ID NO: 48 - protein, 2085 aa, synthetic construct
MPAAKRVKLDGGDKKYSIGLDIGTNSVGWAVITDEYKVPSKKFKVLGNTDRHSIKKNLIGALLFDSGETAEATRLKRTARRRYTRRKNRICYLQEIFSNEMAKVDDSFFHRLEESFLVEEDKKHERHPIFGNIVDEVAYHEKYPTIYHLRKKLVDSTDKADLRLIYLALAHMIKFRGHFLIEGDLNPDNSDVDKLFIQLVQTYNQLFEENPINASGVDAKAILSARLSKSRRLENLIAQLPGEKKNGLFGNLIALSLGLTPNFKSNFDLAEDAKLQLSKDTYDDDLDNLLAQIGDQYADLFLAAKNLSDAILLSDILRVNTEITKAPLSASMIKRYDEHHQDLTLLKALVRQQLPEKYKEIFFDQSKNGYAGYIDGGASQEEFYKFIKPILEKMDGTEELLVKLNREDLLRKQRTFDNGSIPHQIHLGELHAILRRQEDFYPFLKDNREKIEKILTFRIPYYVGPLARGNSRFAWMTRKSEETITPWNFEEVVDKGASAQSFIERMTNFDKNLPNEKVLPKHSLLYEYFTVYNELTKVKYVTEGMRKPAFLSGEQKKAIVDLLFKTNRKVTVKQLKEDYFKKIECFDSVEISGVEDRFNASLGTYHDLLKIIKDKDFLDNEENEDILEDIVLTLTLFEDREMIEERLKTYAHLFDDKVMKQLKRRRYTGWGRLSRKLINGIRDKQSGKTILDFLKSDGFANRNFMQLIHDDSLTFKEDIQKAQVSGQGDSLHEHIANLAGSPAIKKGILQTVKVVDELVKVMGRHKPENIVIEMARENQTTQKGQKNSRERMKRIEEGIKELGSQILKEHPVENTQLQNEKLYLYYLQNGRDMYVDQELDINRLSDYDVDHIVPQSFLKDDSIDNKVLTRSDKARGKSDNVPSEEVVKKMKNYWRQLLNAKLITQRKFDNLTKAERGGLSELDKAGFIKRQLVETRQITKHVAQILDSRMNTKYDENDKLIREVKVITLKSKLVSDFRKDFQFYKVREINNYHHAHDAYLNAVVGTALIKKYPKLESEFVYGDYKVYDVRKMIAKSEQEIGKATAKYFFYSNIMNFFKTEITLANGEIRKRPLIETNGETGEIVWDKGRDFATVRKVLSMPQVNIVKKTEVQTGGFSKESILPKRNSDKLIARKKDWDPKKYGGFDSPTVAYSVLVVAKVEKGKSKKLKSVKELLGITIMERSSFEKNPIDFLEAKGYKEVKKDLIIKLPKYSLFELENGRKRMLASAGELQKGNELALPSKYVNFLYLASHYEKLKGSPEDNEQKQLFVEQHKHYLDEIIEQISEFSKRVILADANLDKVLSAYNKHRDKPIREQAENIIHLFTLTNLGAPAAFKYFDTTIDRKRYTSTKEVLDATLIHQSITGLYETRIDLSQLGGDGGEAAAKGGGGGLDDEYRLYSPLVKPDQNIQFWLEQFPQAWAETAGMGLAKQVPPQVIQLKASATPVSVRQYPLSKEAQEGIRPHVQRLIQQGILVPVQSPWNTPLLPVRKPGTNDYRPVQDLREVNKRVQDIHPTVPNPYNLLCALPPQRSWYTVLDLKDAFFCLRLHPTSQPLFAFEWRDPGTGRTGQLTWTRLPQGFKNSPTIFNEALHRDLANFRIQHPQVTLLQYVDDLLLAGATKQDCLEGTKALLLELSDLGYRASAKKAQICRREVTYLGYSLRDGQRWLTEARKKTVVQIPAPTTAKQVREFLGKAGFCRLFIPGFATLAAPLYPLTKPKGEFSWAPEHQKAFDAIKKALLSAPALALPDVTKPFTLYVDERKGVARGVLTQTLGPWRRPVAYLSKKLDPVASGWPVCLKAIAAVAILVKDADKLTLGQNITVIAPHALENIVRQPPDRWMTNARMTHYQSLLLTERVTFAPPAALNPATLLPEETDEPVTHDCHQLLIEETGVRKDLTDIPLTGEVLTWFTDGSSYVVEGKRMAGAAVVDGTRTIWASSLPEGTSAQKAELMALTQALRLAEGKSINIYTDSRYAFATAHVHGAIYKQRGWLTSAGREIKNKEEILSLLEALHLPKRLAIIHCPGHQKAKDPISRGNQMADRVAKQAAQGVNLLPAGKRTADGSEFEKRTADGSEFESPKKKAKVE

SEQ ID NO: 49 - protein, 2088 aa, synthetic construct
MPAAKRVKLDGGDKKYSIGLDIGTNSVGWAVITDEYKVPSKKFKVLGNTDRHSIKKNLIGALLFDSGETAEATRLKRTARRRYTRRKNRICYLQEIFSNEMAKVDDSFFHRLEESFLVEEDKKHERHPIFGNIVDEVAYHEKYPTIYHLRKKLVDSTDKADLRLIYLALAHMIKFRGHFLIEGDLNPDNSDVDKLFIQLVQTYNQLFEENPINASGVDAKAILSARLSKSRRLENLIAQLPGEKKNGLFGNLIALSLGLTPNFKSNFDLAEDAKLQLSKDTYDDDLDNLLAQIGDQYADLFLAAKNLSDAILLSDILRVNTEITKAPLSASMIKRYDEHHQDLTLLKALVRQQLPEKYKEIFFDQSKNGYAGYIDGGASQEEFYKFIKPILEKMDGTEELLVKLNREDLLRKQRTFDNGSIPHQIHLGELHAILRRQEDFYPFLKDNREKIEKILTFRIPYYVGPLARGNSRFAWMTRKSEETITPWNFEEVVDKGASAQSFIERMTNFDKNLPNEKVLPKHSLLYEYFTVYNELTKVKYVTEGMRKPAFLSGEQKKAIVDLLFKTNRKVTVKQLKEDYFKKIECFDSVEISGVEDRFNASLGTYHDLLKIIKDKDFLDNEENEDILEDIVLTLTLFEDREMIEERLKTYAHLFDDKVMKQLKRRRYTGWGRLSRKLINGIRDKQSGKTILDFLKSDGFANRNFMQLIHDDSLTFKEDIQKAQVSGQGDSLHEHIANLAGSPAIKKGILQTVKVVDELVKVMGRHKPENIVIEMARENQTTQKGQKNSRERMKRIEEGIKELGSQILKEHPVENTQLQNEKLYLYYLQNGRDMYVDQELDINRLSDYDVDHIVPQSFLKDDSIDNKVLTRSDKARGKSDNVPSEEVVKKMKNYWRQLLNAKLITQRKFDNLTKAERGGLSELDKAGFIKRQLVETRQITKHVAQILDSRMNTKYDENDKLIREVKVITLKSKLVSDFRKDFQFYKVREINNYHHAHDAYLNAVVGTALIKKYPKLESEFVYGDYKVYDVRKMIAKSEQEIGKATAKYFFYSNIMNFFKTEITLANGEIRKRPLIETNGETGEIVWDKGRDFATVRKVLSMPQVNIVKKTEVQTGGFSKESILPKRNSDKLIARKKDWDPKKYGGFDSPTVAYSVLVVAKVEKGKSKKLKSVKELLGITIMERSSFEKNPIDFLEAKGYKEVKKDLIIKLPKYSLFELENGRKRMLASAGELQKGNELALPSKYVNFLYLASHYEKLKGSPEDNEQKQLFVEQHKHYLDEIIEQISEFSKRVILADANLDKVLSAYNKHRDKPIREQAENIIHLFTLTNLGAPAAFKYFDTTIDRKRYTSTKEVLDATLIHQSITGLYETRIDLSQLGGDGGGGSEAAAKPAPGGLDDEYRLYSPLVKPDQNIQFWLEQFPQAWAETAGMGLAKQVPPQVIQLKASATPVSVRQYPLSKEAQEGIRPHVQRLIQQGILVPVQSPWNTPLLPVRKPGTNDYRPVQDLREVNKRVQDIHPTVPNPYNLLCALPPQRSWYTVLDLKDAFFCLRLHPTSQPLFAFEWRDPGTGRTGQLTWTRLPQGFKNSPTIFNEALHRDLANFRIQHPQVTLLQYVDDLLLAGATKQDCLEGTKALLLELSDLGYRASAKKAQICRREVTYLGYSLRDGQRWLTEARKKTVVQIPAPTTAKQVREFLGKAGFCRLFIPGFATLAAPLYPLTKPKGEFSWAPEHQKAFDAIKKALLSAPALALPDVTKPFTLYVDERKGVARGVLTQTLGPWRRPVAYLSKKLDPVASGWPVCLKAIAAVAILVKDADKLTLGQNITVIAPHALENIVRQPPDRWMTNARMTHYQSLLLTERVTFAPPAALNPATLLPEETDEPVTHDCHQLLIEETGVRKDLTDIPLTGEVLTWFTDGSSYVVEGKRMAGAAVVDGTRTIWASSLPEGTSAQKAELMALTQALRLAEGKSINIYTDSRYAFATAHVHGAIYKQRGWLTSAGREIKNKEEILSLLEALHLPKRLAIIHCPGHQKAKDPISRGNQMADRVAKQAAQGVNLLPAGKRTADGSEFEKRTADGSEFESPKKKAKVE

SEQ ID NO: 50 - protein, 2088 aa, synthetic construct
MPAAKRVKLDGGDKKYSIGLDIGTNSVGWAVITDEYKVPSKKFKVLGNTDRHSIKKNLIGALLFDSGETAEATRLKRTARRRYTRRKNRICYLQEIFSNEMAKVDDSFFHRLEESFLVEEDKKHERHPIFGNIVDEVAYHEKYPTIYHLRKKLVDSTDKADLRLIYLALAHMIKFRGHFLIEGDLNPDNSDVDKLFIQLVQTYNQLFEENPINASGVDAKAILSARLSKSRRLENLIAQLPGEKKNGLFGNLIALSLGLTPNFKSNFDLAEDAKLQLSKDTYDDDLDNLLAQIGDQYADLFLAAKNLSDAILLSDILRVNTEITKAPLSASMIKRYDEHHQDLTLLKALVRQQLPEKYKEIFFDQSKNGYAGYIDGGASQEEFYKFIKPILEKMDGTEELLVKLNREDLLRKQRTFDNGSIPHQIHLGELHAILRRQEDFYPFLKDNREKIEKILTFRIPYYVGPLARGNSRFAWMTRKSEETITPWNFEEVVDKGASAQSFIERMTNFDKNLPNEKVLPKHSLLYEYFTVYNELTKVKYVTEGMRKPAFLSGEQKKAIVDLLFKTNRKVTVKQLKEDYFKKIECFDSVEISGVEDRFNASLGTYHDLLKIIKDKDFLDNEENEDILEDIVLTLTLFEDREMIEERLKTYAHLFDDKVMKQLKRRRYTGWGRLSRKLINGIRDKQSGKTILDFLKSDGFANRNFMQLIHDDSLTFKEDIQKAQVSGQGDSLHEHIANLAGSPAIKKGILQTVKVVDELVKVMGRHKPENIVIEMARENQTTQKGQKNSRERMKRIEEGIKELGSQILKEHPVENTQLQNEKLYLYYLQNGRDMYVDQELDINRLSDYDVDHIVPQSFLKDDSIDNKVLTRSDKARGKSDNVPSEEVVKKMKNYWRQLLNAKLITQRKFDNLTKAERGGLSELDKAGFIKRQLVETRQITKHVAQILDSRMNTKYDENDKLIREVKVITLKSKLVSDFRKDFQFYKVREINNYHHAHDAYLNAVVGTALIKKYPKLESEFVYGDYKVYDVRKMIAKSEQEIGKATAKYFFYSNIMNFFKTEITLANGEIRKRPLIETNGETGEIVWDKGRDFATVRKVLSMPQVNIVKKTEVQTGGFSKESILPKRNSDKLIARKKDWDPKKYGGFDSPTVAYSVLVVAKVEKGKSKKLKSVKELLGITIMERSSFEKNPIDFLEAKGYKEVKKDLIIKLPKYSLFELENGRKRMLASAGELQKGNELALPSKYVNFLYLASHYEKLKGSPEDNEQKQLFVEQHKHYLDEIIEQISEFSKRVILADANLDKVLSAYNKHRDKPIREQAENIIHLFTLTNLGAPAAFKYFDTTIDRKRYTSTKEVLDATLIHQSITGLYETRIDLSQLGGDGGPAPGGGEAAAKGGLDDEYRLYSPLVKPDQNIQFWLEQFPQAWAETAGMGLAKQVPPQVIQLKASATPVSVRQYPLSKEAQEGIRPHVQRLIQQGILVPVQSPWNTPLLPVRKPGTNDYRPVQDLREVNKRVQDIHPTVPNPYNLLCALPPQRSWYTVLDLKDAFFCLRLHPTSQPLFAFEWRDPGTGRTGQLTWTRLPQGFKNSPTIFNEALHRDLANFRIQHPQVTLLQYVDDLLLAGATKQDCLEGTKALLLELSDLGYRASAKKAQICRREVTYLGYSLRDGQRWLTEARKKTVVQIPAPTTAKQVREFLGKAGFCRLFIPGFATLAAPLYPLTKPKGEFSWAPEHQKAFDAIKKALLSAPALALPDVTKPFTLYVDERKGVARGVLTQTLGPWRRPVAYLSKKLDPVASGWPVCLKAIAAVAILVKDADKLTLGQNITVIAPHALENIVRQPPDRWMTNARMTHYQSLLLTERVTFAPPAALNPATLLPEETDEPVTHDCHQLLIEETGVRKDLTDIPLTGEVLTWFTDGSSYVVEGKRMAGAAVVDGTRTIWASSLPEGTSAQKAELMALTQALRLAEGKSINIYTDSRYAFATAHVHGAIYKQRGWLTSAGREIKNKEEILSLLEALHLPKRLAIIHCPGHQKAKDPISRGNQMADRVAKQAAQGVNLLPAGKRTADGSEFEKRTADGSEFESPKKKAKVE

SEQ ID NO: 51 - protein, 2092 aa, synthetic construct
MPAAKRVKLDGGDKKYSIGLDIGTNSVGWAVITDEYKVPSKKFKVLGNTDRHSIKKNLIGALLFDSGETAEATRLKRTARRRYTRRKNRICYLQEIFSNEMAKVDDSFFHRLEESFLVEEDKKHERHPIFGNIVDEVAYHEKYPTIYHLRKKLVDSTDKADLRLIYLALAHMIKFRGHFLIEGDLNPDNSDVDKLFIQLVQTYNQLFEENPINASGVDAKAILSARLSKSRRLENLIAQLPGEKKNGLFGNLIALSLGLTPNFKSNFDLAEDAKLQLSKDTYDDDLDNLLAQIGDQYADLFLAAKNLSDAILLSDILRVNTEITKAPLSASMIKRYDEHHQDLTLLKALVRQQLPEKYKEIFFDQSKNGYAGYIDGGASQEEFYKFIKPILEKMDGTEELLVKLNREDLLRKQRTFDNGSIPHQIHLGELHAILRRQEDFYPFLKDNREKIEKILTFRIPYYVGPLARGNSRFAWMTRKSEETITPWNFEEVVDKGASAQSFIERMTNFDKNLPNEKVLPKHSLLYEYFTVYNELTKVKYVTEGMRKPAFLSGEQKKAIVDLLFKTNRKVTVKQLKEDYFKKIECFDSVEISGVEDRFNASLGTYHDLLKIIKDKDFLDNEENEDILEDIVLTLTLFEDREMIEERLKTYAHLFDDKVMKQLKRRRYTGWGRLSRKLINGIRDKQSGKTILDFLKSDGFANRNFMQLIHDDSLTFKEDIQKAQVSGQGDSLHEHIANLAGSPAIKKGILQTVKVVDELVKVMGRHKPENIVIEMARENQTTQKGQKNSRERMKRIEEGIKELGSQILKEHPVENTQLQNEKLYLYYLQNGRDMYVDQELDINRLSDYDVDHIVPQSFLKDDSIDNKVLTRSDKARGKSDNVPSEEVVKKMKNYWRQLLNAKLITQRKFDNLTKAERGGLSELDKAGFIKRQLVETRQITKHVAQILDSRMNTKYDENDKLIREVKVITLKSKLVSDFRKDFQFYKVREINNYHHAHDAYLNAVVGTALIKKYPKLESEFVYGDYKVYDVRKMIAKSEQEIGKATAKYFFYSNIMNFFKTEITLANGEIRKRPLIETNGETGEIVWDKGRDFATVRKVLSMPQVNIVKKTEVQTGGFSKESILPKRNSDKLIARKKDWDPKKYGGFDSPTVAYSVLVVAKVEKGKSKKLKSVKELLGITIMERSSFEKNPIDFLEAKGYKEVKKDLIIKLPKYSLFELENGRKRMLASAGELQKGNELALPSKYVNFLYLASHYEKLKGSPEDNEQKQLFVEQHKHYLDEIIEQISEFSKRVILADANLDKVLSAYNKHRDKPIREQAENIIHLFTLTNLGAPAAFKYFDTTIDRKRYTSTKEVLDATLIHQSITGLYETRIDLSQLGGDGGGGGGSGGGGSGGGGSGGLDDEYRLYSPLVKPDQNIQFWLEQFPQAWAETAGMGLAKQVPPQVIQLKASATPVSVRQYPLSKEAQEGIRPHVQRLIQQGILVPVQSPWNTPLLPVRKPGTNDYRPVQDLREVNKRVQDIHPTVPNPYNLLCALPPQRSWYTVLDLKDAFFCLRLHPTSQPLFAFEWRDPGTGRTGQLTWTRLPQGFKNSPTIFNEALHRDLANFRIQHPQVTLLQYVDDLLLAGATKQDCLEGTKALLLELSDLGYRASAKKAQICRREVTYLGYSLRDGQRWLTEARKKTVVQIPAPTTAKQVREFLGKAGFCRLFIPGFATLAAPLYPLTKPKGEFSWAPEHQKAFDAIKKALLSAPALALPDVTKPFTLYVDERKGVARGVLTQTLGPWRRPVAYLSKKLDPVASGWPVCLKAIAAVAILVKDADKLTLGQNITVIAPHALENIVRQPPDRWMTNARMTHYQSLLLTERVTFAPPAALNPATLLPEETDEPVTHDCHQLLIEETGVRKDLTDIPLTGEVLTWFTDGSSYVVEGKRMAGAAVVDGTRTIWASSLPEGTSAQKAELMALTQALRLAEGKSINIYTDSRYAFATAHVHGAIYKQRGWLTSAGREIKNKEEILSLLEALHLPKRLAIIHCPGHQKAKDPISRGNQMADRVAKQAAQGVNLLPAGKRTADGSEFEKRTADGSEFESPKKKAKVE

SEQ ID NO: 52 - protein, 2092 aa, synthetic construct
MPAAKRVKLDGGDKKYSIGLDIGTNSVGWAVITDEYKVPSKKFKVLGNTDRHSIKKNLIGALLFDSGETAEATRLKRTARRRYTRRKNRICYLQEIFSNEMAKVDDSFFHRLEESFLVEEDKKHERHPIFGNIVDEVAYHEKYPTIYHLRKKLVDSTDKADLRLIYLALAHMIKFRGHFLIEGDLNPDNSDVDKLFIQLVQTYNQLFEENPINASGVDAKAILSARLSKSRRLENLIAQLPGEKKNGLFGNLIALSLGLTPNFKSNFDLAEDAKLQLSKDTYDDDLDNLLAQIGDQYADLFLAAKNLSDAILLSDILRVNTEITKAPLSASMIKRYDEHHQDLTLLKALVRQQLPEKYKEIFFDQSKNGYAGYIDGGASQEEFYKFIKPILEKMDGTEELLVKLNREDLLRKQRTFDNGSIPHQIHLGELHAILRRQEDFYPFLKDNREKIEKILTFRIPYYVGPLARGNSRFAWMTRKSEETITPWNFEEVVDKGASAQSFIERMTNFDKNLPNEKVLPKHSLLYEYFTVYNELTKVKYVTEGMRKPAFLSGEQKKAIVDLLFKTNRKVTVKQLKEDYFKKIECFDSVEISGVEDRFNASLGTYHDLLKIIKDKDFLDNEENEDILEDIVLTLTLFEDREMIEERLKTYAHLFDDKVMKQLKRRRYTGWGRLSRKLINGIRDKQSGKTILDFLKSDGFANRNFMQLIHDDSLTFKEDIQKAQVSGQGDSLHEHIANLAGSPAIKKGILQTVKVVDELVKVMGRHKPENIVIEMARENQTTQKGQKNSRERMKRIEEGIKELGSQILKEHPVENTQLQNEKLYLYYLQNGRDMYVDQELDINRLSDYDVDHIVPQSFLKDDSIDNKVLTRSDKARGKSDNVPSEEVVKKMKNYWRQLLNAKLITQRKFDNLTKAERGGLSELDKAGFIKRQLVETRQITKHVAQILDSRMNTKYDENDKLIREVKVITLKSKLVSDFRKDFQFYKVREINNYHHAHDAYLNAVVGTALIKKYPKLESEFVYGDYKVYDVRKMIAKSEQEIGKATAKYFFYSNIMNFFKTEITLANGEIRKRPLIETNGETGEIVWDKGRDFATVRKVLSMPQVNIVKKTEVQTGGFSKESILPKRNSDKLIARKKDWDPKKYGGFDSPTVAYSVLVVAKVEKGKSKKLKSVKELLGITIMERSSFEKNPIDFLEAKGYKEVKKDLIIKLPKYSLFELENGRKRMLASAGELQKGNELALPSKYVNFLYLASHYEKLKGSPEDNEQKQLFVEQHKHYLDEIIEQISEFSKRVILADANLDKVLSAYNKHRDKPIREQAENIIHLFTLTNLGAPAAFKYFDTTIDRKRYTSTKEVLDATLIHQSITGLYETRIDLSQLGGDGGGGSGGSGGSGGSGGSGGLDDEYRLYSPLVKPDQNIQFWLEQFPQAWAETAGMGLAKQVPPQVIQLKASATPVSVRQYPLSKEAQEGIRPHVQRLIQQGILVPVQSPWNTPLLPVRKPGTNDYRPVQDLREVNKRVQDIHPTVPNPYNLLCALPPQRSWYTVLDLKDAFFCLRLHPTSQPLFAFEWRDPGTGRTGQLTWTRLPQGFKNSPTIFNEALHRDLANFRIQHPQVTLLQYVDDLLLAGATKQDCLEGTKALLLELSDLGYRASAKKAQICRREVTYLGYSLRDGQRWLTEARKKTVVQIPAPTTAKQVREFLGKAGFCRLFIPGFATLAAPLYPLTKPKGEFSWAPEHQKAFDAIKKALLSAPALALPDVTKPFTLYVDERKGVARGVLTQTLGPWRRPVAYLSKKLDPVASGWPVCLKAIAAVAILVKDADKLTLGQNITVIAPHALENIVRQPPDRWMTNARMTHYQSLLLTERVTFAPPAALNPATLLPEETDEPVTHDCHQLLIEETGVRKDLTDIPLTGEVLTWFTDGSSYVVEGKRMAGAAVVDGTRTIWASSLPEGTSAQKAELMALTQALRLAEGKSINIYTDSRYAFATAHVHGAIYKQRGWLTSAGREIKNKEEILSLLEALHLPKRLAIIHCPGHQKAKDPISRGNQMADRVAKQAAQGVNLLPAGKRTADGSEFEKRTADGSEFESPKKKAKVE

SEQ ID NO: 53 - protein, 2088 aa, synthetic construct
MPAAKRVKLDGGDKKYSIGLDIGTNSVGWAVITDEYKVPSKKFKVLGNTDRHSIKKNLIGALLFDSGETAEATRLKRTARRRYTRRKNRICYLQEIFSNEMAKVDDSFFHRLEESFLVEEDKKHERHPIFGNIVDEVAYHEKYPTIYHLRKKLVDSTDKADLRLIYLALAHMIKFRGHFLIEGDLNPDNSDVDKLFIQLVQTYNQLFEENPINASGVDAKAILSARLSKSRRLENLIAQLPGEKKNGLFGNLIALSLGLTPNFKSNFDLAEDAKLQLSKDTYDDDLDNLLAQIGDQYADLFLAAKNLSDAILLSDILRVNTEITKAPLSASMIKRYDEHHQDLTLLKALVRQQLPEKYKEIFFDQSKNGYAGYIDGGASQEEFYKFIKPILEKMDGTEELLVKLNREDLLRKQRTFDNGSIPHQIHLGELHAILRRQEDFYPFLKDNREKIEKILTFRIPYYVGPLARGNSRFAWMTRKSEETITPWNFEEVVDKGASAQSFIERMTNFDKNLPNEKVLPKHSLLYEYFTVYNELTKVKYVTEGMRKPAFLSGEQKKAIVDLLFKTNRKVTVKQLKEDYFKKIECFDSVEISGVEDRFNASLGTYHDLLKIIKDKDFLDNEENEDILEDIVLTLTLFEDREMIEERLKTYAHLFDDKVMKQLKRRRYTGWGRLSRKLINGIRDKQSGKTILDFLKSDGFANRNFMQLIHDDSLTFKEDIQKAQVSGQGDSLHEHIANLAGSPAIKKGILQTVKVVDELVKVMGRHKPENIVIEMARENQTTQKGQKNSRERMKRIEEGIKELGSQILKEHPVENTQLQNEKLYLYYLQNGRDMYVDQELDINRLSDYDVDHIVPQSFLKDDSIDNKVLTRSDKARGKSDNVPSEEVVKKMKNYWRQLLNAKLITQRKFDNLTKAERGGLSELDKAGFIKRQLVETRQITKHVAQILDSRMNTKYDENDKLIREVKVITLKSKLVSDFRKDFQFYKVREINNYHHAHDAYLNAVVGTALIKKYPKLESEFVYGDYKVYDVRKMIAKSEQEIGKATAKYFFYSNIMNFFKTEITLANGEIRKRPLIETNGETGEIVWDKGRDFATVRKVLSMPQVNIVKKTEVQTGGFSKESILPKRNSDKLIARKKDWDPKKYGGFDSPTVAYSVLVVAKVEKGKSKKLKSVKELLGITIMERSSFEKNPIDFLEAKGYKEVKKDLIIKLPKYSLFELENGRKRMLASAGELQKGNELALPSKYVNFLYLASHYEKLKGSPEDNEQKQLFVEQHKHYLDEIIEQISEFSKRVILADANLDKVLSAYNKHRDKPIREQAENIIHLFTLTNLGAPAAFKYFDTTIDRKRYTSTKEVLDATLIHQSITGLYETRIDLSQLGGDGGEAAAKGGGGSSGGLDDEYRLYSPLVKPDQNIQFWLEQFPQAWAETAGMGLAKQVPPQVIQLKASATPVSVRQYPLSKEAQEGIRPHVQRLIQQGILVPVQSPWNTPLLPVRKPGTNDYRPVQDLREVNKRVQDIHPTVPNPYNLLCALPPQRSWYTVLDLKDAFFCLRLHPTSQPLFAFEWRDPGTGRTGQLTWTRLPQGFKNSPTIFNEALHRDLANFRIQHPQVTLLQYVDDLLLAGATKQDCLEGTKALLLELSDLGYRASAKKAQICRREVTYLGYSLRDGQRWLTEARKKTVVQIPAPTTAKQVREFLGKAGFCRLFIPGFATLAAPLYPLTKPKGEFSWAPEHQKAFDAIKKALLSAPALALPDVTKPFTLYVDERKGVARGVLTQTLGPWRRPVAYLSKKLDPVASGWPVCLKAIAAVAILVKDADKLTLGQNITVIAPHALENIVRQPPDRWMTNARMTHYQSLLLTERVTFAPPAALNPATLLPEETDEPVTHDCHQLLIEETGVRKDLTDIPLTGEVLTWFTDGSSYVVEGKRMAGAAVVDGTRTIWASSLPEGTSAQKAELMALTQALRLAEGKSINIYTDSRYAFATAHVHGAIYKQRGWLTSAGREIKNKEEILSLLEALHLPKRLAIIHCPGHQKAKDPISRGNQMADRVAKQAAQGVNLLPAGKRTADGSEFEKRTADGSEFESPKKKAKVE

SEQ ID NO: 54 - protein, 2090 aa, synthetic construct
MPAAKRVKLDGGDKKYSIGLDIGTNSVGWAVITDEYKVPSKKFKVLGNTDRHSIKKNLIGALLFDSGETAEATRLKRTARRRYTRRKNRICYLQEIFSNEMAKVDDSFFHRLEESFLVEEDKKHERHPIFGNIVDEVAYHEKYPTIYHLRKKLVDSTDKADLRLIYLALAHMIKFRGHFLIEGDLNPDNSDVDKLFIQLVQTYNQLFEENPINASGVDAKAILSARLSKSRRLENLIAQLPGEKKNGLFGNLIALSLGLTPNFKSNFDLAEDAKLQLSKDTYDDDLDNLLAQIGDQYADLFLAAKNLSDAILLSDILRVNTEITKAPLSASMIKRYDEHHQDLTLLKALVRQQLPEKYKEIFFDQSKNGYAGYIDGGASQEEFYKFIKPILEKMDGTEELLVKLNREDLLRKQRTFDNGSIPHQIHLGELHAILRRQEDFYPFLKDNREKIEKILTFRIPYYVGPLARGNSRFAWMTRKSEETITPWNFEEVVDKGASAQSFIERMTNFDKNLPNEKVLPKHSLLYEYFTVYNELTKVKYVTEGMRKPAFLSGEQKKAIVDLLFKTNRKVTVKQLKEDYFKKIECFDSVEISGVEDRFNASLGTYHDLLKIIKDKDFLDNEENEDILEDIVLTLTLFEDREMIEERLKTYAHLFDDKVMKQLKRRRYTGWGRLSRKLINGIRDKQSGKTILDFLKSDGFANRNFMQLIHDDSLTFKEDIQKAQVSGQGDSLHEHIANLAGSPAIKKGILQTVKVVDELVKVMGRHKPENIVIEMARENQTTQKGQKNSRERMKRIEEGIKELGSQILKEHPVENTQLQNEKLYLYYLQNGRDMYVDQELDINRLSDYDVDHIVPQSFLKDDSIDNKVLTRSDKARGKSDNVPSEEVVKKMKNYWRQLLNAKLITQRKFDNLTKAERGGLSELDKAGFIKRQLVETRQITKHVAQILDSRMNTKYDENDKLIREVKVITLKSKLVSDFRKDFQFYKVREINNYHHAHDAYLNAVVGTALIKKYPKLESEFVYGDYKVYDVRKMIAKSEQEIGKATAKYFFYSNIMNFFKTEITLANGEIRKRPLIETNGETGEIVWDKGRDFATVRKVLSMPQVNIVKKTEVQTGGFSKESILPKRNSDKLIARKKDWDPKKYGGFDSPTVAYSVLVVAKVEKGKSKKLKSVKELLGITIMERSSFEKNPIDFLEAKGYKEVKKDLIIKLPKYSLFELENGRKRMLASAGELQKGNELALPSKYVNFLYLASHYEKLKGSPEDNEQKQLFVEQHKHYLDEIIEQISEFSKRVILADANLDKVLSAYNKHRDKPIREQAENIIHLFTLTNLGAPAAFKYFDTTIDRKRYTSTKEVLDATLIHQSITGLYETRIDLSQLGGDGGPAPAPAPAPAPAPGGLDDEYRLYSPLVKPDQNIQFWLEQFPQAWAETAGMGLAKQVPPQVIQLKASATPVSVRQYPLSKEAQEGIRPHVQRLIQQGILVPVQSPWNTPLLPVRKPGTNDYRPVQDLREVNKRVQDIHPTVPNPYNLLCALPPQRSWYTVLDLKDAFFCLRLHPTSQPLFAFEWRDPGTGRTGQLTWTRLPQGFKNSPTIFNEALHRDLANFRIQHPQVTLLQYVDDLLLAGATKQDCLEGTKALLLELSDLGYRASAKKAQICRREVTYLGYSLRDGQRWLTEARKKTVVQIPAPTTAKQVREFLGKAGFCRLFIPGFATLAAPLYPLTKPKGEFSWAPEHQKAFDAIKKALLSAPALALPDVTKPFTLYVDERKGVARGVLTQTLGPWRRPVAYLSKKLDPVASGWPVCLKAIAAVAILVKDADKLTLGQNITVIAPHALENIVRQPPDRWMTNARMTHYQSLLLTERVTFAPPAALNPATLLPEETDEPVTHDCHQLLIEETGVRKDLTDIPLTGEVLTWFTDGSSYVVEGKRMAGAAVVDGTRTIWASSLPEGTSAQKAELMALTQALRLAEGKSINIYTDSRYAFATAHVHGAIYKQRGWLTSAGREIKNKEEILSLLEALHLPKRLAIIHCPGHQKAKDPISRGNQMADRVAKQAAQGVNLLPAGKRTADGSEFEKRTADGSEFESPKKKAKVE

SEQ ID NO: 55 - protein, 2087 aa, synthetic construct
MPAAKRVKLDGGDKKYSIGLDIGTNSVGWAVITDEYKVPSKKFKVLGNTDRHSIKKNLIGALLFDSGETAEATRLKRTARRRYTRRKNRICYLQEIFSNEMAKVDDSFFHRLEESFLVEEDKKHERHPIFGNIVDEVAYHEKYPTIYHLRKKLVDSTDKADLRLIYLALAHMIKFRGHFLIEGDLNPDNSDVDKLFIQLVQTYNQLFEENPINASGVDAKAILSARLSKSRRLENLIAQLPGEKKNGLFGNLIALSLGLTPNFKSNFDLAEDAKLQLSKDTYDDDLDNLLAQIGDQYADLFLAAKNLSDAILLSDILRVNTEITKAPLSASMIKRYDEHHQDLTLLKALVRQQLPEKYKEIFFDQSKNGYAGYIDGGASQEEFYKFIKPILEKMDGTEELLVKLNREDLLRKQRTFDNGSIPHQIHLGELHAILRRQEDFYPFLKDNREKIEKILTFRIPYYVGPLARGNSRFAWMTRKSEETITPWNFEEVVDKGASAQSFIERMTNFDKNLPNEKVLPKHSLLYEYFTVYNELTKVKYVTEGMRKPAFLSGEQKKAIVDLLFKTNRKVTVKQLKEDYFKKIECFDSVEISGVEDRFNASLGTYHDLLKIIKDKDFLDNEENEDILEDIVLTLTLFEDREMIEERLKTYAHLFDDKVMKQLKRRRYTGWGRLSRKLINGIRDKQSGKTILDFLKSDGFANRNFMQLIHDDSLTFKEDIQKAQVSGQGDSLHEHIANLAGSPAIKKGILQTVKVVDELVKVMGRHKPENIVIEMARENQTTQKGQKNSRERMKRIEEGIKELGSQILKEHPVENTQLQNEKLYLYYLQNGRDMYVDQELDINRLSDYDVDHIVPQSFLKDDSIDNKVLTRSDKARGKSDNVPSEEVVKKMKNYWRQLLNAKLITQRKFDNLTKAERGGLSELDKAGFIKRQLVETRQITKHVAQILDSRMNTKYDENDKLIREVKVITLKSKLVSDFRKDFQFYKVREINNYHHAHDAYLNAVVGTALIKKYPKLESEFVYGDYKVYDVRKMIAKSEQEIGKATAKYFFYSNIMNFFKTEITLANGEIRKRPLIETNGETGEIVWDKGRDFATVRKVLSMPQVNIVKKTEVQTGGFSKESILPKRNSDKLIARKKDWDPKKYGGFDSPTVAYSVLVVAKVEKGKSKKLKSVKELLGITIMERSSFEKNPIDFLEAKGYKEVKKDLIIKLPKYSLFELENGRKRMLASAGELQKGNELALPSKYVNFLYLASHYEKLKGSPEDNEQKQLFVEQHKHYLDEIIEQISEFSKRVILADANLDKVLSAYNKHRDKPIREQAENIIHLFTLTNLGAPAAFKYFDTTIDRKRYTSTKEVLDATLIHQSITGLYETRIDLSQLGGDGGGGGGSGGGGSGGLDDEYRLYSPLVKPDQNIQFWLEQFPQAWAETAGMGLAKQVPPQVIQLKASATPVSVRQYPLSKEAQEGIRPHVQRLIQQGILVPVQSPWNTPLLPVRKPGTNDYRPVQDLREVNKRVQDIHPTVPNPYNLLCALPPQRSWYTVLDLKDAFFCLRLHPTSQPLFAFEWRDPGTGRTGQLTWTRLPQGFKNSPTIFNEALHRDLANFRIQHPQVTLLQYVDDLLLAGATKQDCLEGTKALLLELSDLGYRASAKKAQICRREVTYLGYSLRDGQRWLTEARKKTVVQIPAPTTAKQVREFLGKAGFCRLFIPGFATLAAPLYPLTKPKGEFSWAPEHQKAFDAIKKALLSAPALALPDVTKPFTLYVDERKGVARGVLTQTLGPWRRPVAYLSKKLDPVASGWPVCLKAIAAVAILVKDADKLTLGQNITVIAPHALENIVRQPPDRWMTNARMTHYQSLLLTERVTFAPPAALNPATLLPEETDEPVTHDCHQLLIEETGVRKDLTDIPLTGEVLTWFTDGSSYVVEGKRMAGAAVVDGTRTIWASSLPEGTSAQKAELMALTQALRLAEGKSINIYTDSRYAFATAHVHGAIYKQRGWLTSAGREIKNKEEILSLLEALHLPKRLAIIHCPGHQKAKDPISRGNQMADRVAKQAAQGVNLLPAGKRTADGSEFEKRTADGSEFESPKKKAKVE

SEQ ID NO: 56 - protein, 2092 aa, synthetic construct
MPAAKRVKLDGGDKKYSIGLDIGTNSVGWAVITDEYKVPSKKFKVLGNTDRHSIKKNLIGALLFDSGETAEATRLKRTARRRYTRRKNRICYLQEIFSNEMAKVDDSFFHRLEESFLVEEDKKHERHPIFGNIVDEVAYHEKYPTIYHLRKKLVDSTDKADLRLIYLALAHMIKFRGHFLIEGDLNPDNSDVDKLFIQLVQTYNQLFEENPINASGVDAKAILSARLSKSRRLENLIAQLPGEKKNGLFGNLIALSLGLTPNFKSNFDLAEDAKLQLSKDTYDDDLDNLLAQIGDQYADLFLAAKNLSDAILLSDILRVNTEITKAPLSASMIKRYDEHHQDLTLLKALVRQQLPEKYKEIFFDQSKNGYAGYIDGGASQEEFYKFIKPILEKMDGTEELLVKLNREDLLRKQRTFDNGSIPHQIHLGELHAILRRQEDFYPFLKDNREKIEKILTFRIPYYVGPLARGNSRFAWMTRKSEETITPWNFEEVVDKGASAQSFIERMTNFDKNLPNEKVLPKHSLLYEYFTVYNELTKVKYVTEGMRKPAFLSGEQKKAIVDLLFKTNRKVTVKQLKEDYFKKIECFDSVEISGVEDRFNASLGTYHDLLKIIKDKDFLDNEENEDILEDIVLTLTLFEDREMIEERLKTYAHLFDDKVMKQLKRRRYTGWGRLSRKLINGIRDKQSGKTILDFLKSDGFANRNFMQLIHDDSLTFKEDIQKAQVSGQGDSLHEHIANLAGSPAIKKGILQTVKVVDELVKVMGRHKPENIVIEMARENQTTQKGQKNSRERMKRIEEGIKELGSQILKEHPVENTQLQNEKLYLYYLQNGRDMYVDQELDINRLSDYDVDHIVPQSFLKDDSIDNKVLTRSDKARGKSDNVPSEEVVKKMKNYWRQLLNAKLITQRKFDNLTKAERGGLSELDKAGFIKRQLVETRQITKHVAQILDSRMNTKYDENDKLIREVKVITLKSKLVSDFRKDFQFYKVREINNYHHAHDAYLNAVVGTALIKKYPKLESEFVYGDYKVYDVRKMIAKSEQEIGKATAKYFFYSNIMNFFKTEITLANGEIRKRPLIETNGETGEIVWDKGRDFATVRKVLSMPQVNIVKKTEVQTGGFSKESILPKRNSDKLIARKKDWDPKKYGGFDSPTVAYSVLVVAKVEKGKSKKLKSVKELLGITIMERSSFEKNPIDFLEAKGYKEVKKDLIIKLPKYSLFELENGRKRMLASAGELQKGNELALPSKYVNFLYLASHYEKLKGSPEDNEQKQLFVEQHKHYLDEIIEQISEFSKRVILADANLDKVLSAYNKHRDKPIREQAENIIHLFTLTNLGAPAAFKYFDTTIDRKRYTSTKEVLDATLIHQSITGLYETRIDLSQLGGDGGEAAAKGGGGSEAAAKGGLDDEYRLYSPLVKPDQNIQFWLEQFPQAWAETAGMGLAKQVPPQVIQLKASATPVSVRQYPLSKEAQEGIRPHVQRLIQQGILVPVQSPWNTPLLPVRKPGTNDYRPVQDLREVNKRVQDIHPTVPNPYNLLCALPPQRSWYTVLDLKDAFFCLRLHPTSQPLFAFEWRDPGTGRTGQLTWTRLPQGFKNSPTIFNEALHRDLANFRIQHPQVTLLQYVDDLLLAGATKQDCLEGTKALLLELSDLGYRASAKKAQICRREVTYLGYSLRDGQRWLTEARKKTVVQIPAPTTAKQVREFLGKAGFCRLFIPGFATLAAPLYPLTKPKGEFSWAPEHQKAFDAIKKALLSAPALALPDVTKPFTLYVDERKGVARGVLTQTLGPWRRPVAYLSKKLDPVASGWPVCLKAIAAVAILVKDADKLTLGQNITVIAPHALENIVRQPPDRWMTNARMTHYQSLLLTERVTFAPPAALNPATLLPEETDEPVTHDCHQLLIEETGVRKDLTDIPLTGEVLTWFTDGSSYVVEGKRMAGAAVVDGTRTIWASSLPEGTSAQKAELMALTQALRLAEGKSINIYTDSRYAFATAHVHGAIYKQRGWLTSAGREIKNKEEILSLLEALHLPKRLAIIHCPGHQKAKDPISRGNQMADRVAKQAAQGVNLLPAGKRTADGSEFEKRTADGSEFESPKKKAKVE

SEQ ID NO: 57 - protein, 2085 aa, synthetic construct
MPAAKRVKLDGGDKKYSIGLDIGTNSVGWAVITDEYKVPSKKFKVLGNTDRHSIKKNLIGALLFDSGETAEATRLKRTARRRYTRRKNRICYLQEIFSNEMAKVDDSFFHRLEESFLVEEDKKHERHPIFGNIVDEVAYHEKYPTIYHLRKKLVDSTDKADLRLIYLALAHMIKFRGHFLIEGDLNPDNSDVDKLFIQLVQTYNQLFEENPINASGVDAKAILSARLSKSRRLENLIAQLPGEKKNGLFGNLIALSLGLTPNFKSNFDLAEDAKLQLSKDTYDDDLDNLLAQIGDQYADLFLAAKNLSDAILLSDILRVNTEITKAPLSASMIKRYDEHHQDLTLLKALVRQQLPEKYKEIFFDQSKNGYAGYIDGGASQEEFYKFIKPILEKMDGTEELLVKLNREDLLRKQRTFDNGSIPHQIHLGELHAILRRQEDFYPFLKDNREKIEKILTFRIPYYVGPLARGNSRFAWMTRKSEETITPWNFEEVVDKGASAQSFIERMTNFDKNLPNEKVLPKHSLLYEYFTVYNELTKVKYVTEGMRKPAFLSGEQKKAIVDLLFKTNRKVTVKQLKEDYFKKIECFDSVEISGVEDRFNASLGTYHDLLKIIKDKDFLDNEENEDILEDIVLTLTLFEDREMIEERLKTYAHLFDDKVMKQLKRRRYTGWGRLSRKLINGIRDKQSGKTILDFLKSDGFANRNFMQLIHDDSLTFKEDIQKAQVSGQGDSLHEHIANLAGSPAIKKGILQTVKVVDELVKVMGRHKPENIVIEMARENQTTQKGQKNSRERMKRIEEGIKELGSQILKEHPVENTQLQNEKLYLYYLQNGRDMYVDQELDINRLSDYDVDHIVPQSFLKDDSIDNKVLTRSDKARGKSDNVPSEEVVKKMKNYWRQLLNAKLITQRKFDNLTKAERGGLSELDKAGFIKRQLVETRQITKHVAQILDSRMNTKYDENDKLIREVKVITLKSKLVSDFRKDFQFYKVREINNYHHAHDAYLNAVVGTALIKKYPKLESEFVYGDYKVYDVRKMIAKSEQEIGKATAKYFFYSNIMNFFKTEITLANGEIRKRPLIETNGETGEIVWDKGRDFATVRKVLSMPQVNIVKKTEVQTGGFSKESILPKRNSDKLIARKKDWDPKKYGGFDSPTVAYSVLVVAKVEKGKSKKLKSVKELLGITIMERSSFEKNPIDFLEAKGYKEVKKDLIIKLPKYSLFELENGRKRMLASAGELQKGNELALPSKYVNFLYLASHYEKLKGSPEDNEQKQLFVEQHKHYLDEIIEQISEFSKRVILADANLDKVLSAYNKHRDKPIREQAENIIHLFTLTNLGAPAAFKYFDTTIDRKRYTSTKEVLDATLIHQSITGLYETRIDLSQLGGDGGGGGGGGGGGGLDDEYRLYSPLVKPDQNIQFWLEQFPQAWAETAGMGLAKQVPPQVIQLKASATPVSVRQYPLSKEAQEGIRPHVQRLIQQGILVPVQSPWNTPLLPVRKPGTNDYRPVQDLREVNKRVQDIHPTVPNPYNLLCALPPQRSWYTVLDLKDAFFCLRLHPTSQPLFAFEWRDPGTGRTGQLTWTRLPQGFKNSPTIFNEALHRDLANFRIQHPQVTLLQYVDDLLLAGATKQDCLEGTKALLLELSDLGYRASAKKAQICRREVTYLGYSLRDGQRWLTEARKKTVVQIPAPTTAKQVREFLGKAGFCRLFIPGFATLAAPLYPLTKPKGEFSWAPEHQKAFDAIKKALLSAPALALPDVTKPFTLYVDERKGVARGVLTQTLGPWRRPVAYLSKKLDPVASGWPVCLKAIAAVAILVKDADKLTLGQNITVIAPHALENIVRQPPDRWMTNARMTHYQSLLLTERVTFAPPAALNPATLLPEETDEPVTHDCHQLLIEETGVRKDLTDIPLTGEVLTWFTDGSSYVVEGKRMAGAAVVDGTRTIWASSLPEGTSAQKAELMALTQALRLAEGKSINIYTDSRYAFATAHVHGAIYKQRGWLTSAGREIKNKEEILSLLEALHLPKRLAIIHCPGHQKAKDPISRGNQMADRVAKQAAQGVNLLPAGKRTADGSEFEKRTADGSEFESPKKKAKVE

SEQ ID NO: 58 - protein, 2086 aa, synthetic construct
MPAAKRVKLDGGDKKYSIGLDIGTNSVGWAVITDEYKVPSKKFKVLGNTDRHSIKKNLIGALLFDSGETAEATRLKRTARRRYTRRKNRICYLQEIFSNEMAKVDDSFFHRLEESFLVEEDKKHERHPIFGNIVDEVAYHEKYPTIYHLRKKLVDSTDKADLRLIYLALAHMIKFRGHFLIEGDLNPDNSDVDKLFIQLVQTYNQLFEENPINASGVDAKAILSARLSKSRRLENLIAQLPGEKKNGLFGNLIALSLGLTPNFKSNFDLAEDAKLQLSKDTYDDDLDNLLAQIGDQYADLFLAAKNLSDAILLSDILRVNTEITKAPLSASMIKRYDEHHQDLTLLKALVRQQLPEKYKEIFFDQSKNGYAGYIDGGASQEEFYKFIKPILEKMDGTEELLVKLNREDLLRKQRTFDNGSIPHQIHLGELHAILRRQEDFYPFLKDNREKIEKILTFRIPYYVGPLARGNSRFAWMTRKSEETITPWNFEEVVDKGASAQSFIERMTNFDKNLPNEKVLPKHSLLYEYFTVYNELTKVKYVTEGMRKPAFLSGEQKKAIVDLLFKTNRKVTVKQLKEDYFKKIECFDSVEISGVEDRFNASLGTYHDLLKIIKDKDFLDNEENEDILEDIVLTLTLFEDREMIEERLKTYAHLFDDKVMKQLKRRRYTGWGRLSRKLINGIRDKQSGKTILDFLKSDGFANRNFMQLIHDDSLTFKEDIQKAQVSGQGDSLHEHIANLAGSPAIKKGILQTVKVVDELVKVMGRHKPENIVIEMARENQTTQKGQKNSRERMKRIEEGIKELGSQILKEHPVENTQLQNEKLYLYYLQNGRDMYVDQELDINRLSDYDVDHIVPQSFLKDDSIDNKVLTRSDKARGKSDNVPSEEVVKKMKNYWRQLLNAKLITQRKFDNLTKAERGGLSELDKAGFIKRQLVETRQITKHVAQILDSRMNTKYDENDKLIREVKVITLKSKLVSDFRKDFQFYKVREINNYHHAHDAYLNAVVGTALIKKYPKLESEFVYGDYKVYDVRKMIAKSEQEIGKATAKYFFYSNIMNFFKTEITLANGEIRKRPLIETNGETGEIVWDKGRDFATVRKVLSMPQVNIVKKTEVQTGGFSKESILPKRNSDKLIARKKDWDPKKYGGFDSPTVAYSVLVVAKVEKGKSKKLKSVKELLGITIMERSSFEKNPIDFLEAKGYKEVKKDLIIKLPKYSLFELENGRKRMLASAGELQKGNELALPSKYVNFLYLASHYEKLKGSPEDNEQKQLFVEQHKHYLDEIIEQISEFSKRVILADANLDKVLSAYNKHRDKPIREQAENIIHLFTLTNLGAPAAFKYFDTTIDRKRYTSTKEVLDATLIHQSITGLYETRIDLSQLGGDGGGGSPAPGGGGGLDDEYRLYSPLVKPDQNIQFWLEQFPQAWAETAGMGLAKQVPPQVIQLKASATPVSVRQYPLSKEAQEGIRPHVQRLIQQGILVPVQSPWNTPLLPVRKPGTNDYRPVQDLREVNKRVQDIHPTVPNPYNLLCALPPQRSWYTVLDLKDAFFCLRLHPTSQPLFAFEWRDPGTGRTGQLTWTRLPQGFKNSPTIFNEALHRDLANFRIQHPQVTLLQYVDDLLLAGATKQDCLEGTKALLLELSDLGYRASAKKAQICRREVTYLGYSLRDGQRWLTEARKKTVVQIPAPTTAKQVREFLGKAGFCRLFIPGFATLAAPLYPLTKPKGEFSWAPEHQKAFDAIKKALLSAPALALPDVTKPFTLYVDERKGVARGVLTQTLGPWRRPVAYLSKKLDPVASGWPVCLKAIAAVAILVKDADKLTLGQNITVIAPHALENIVRQPPDRWMTNARMTHYQSLLLTERVTFAPPAALNPATLLPEETDEPVTHDCHQLLIEETGVRKDLTDIPLTGEVLTWFTDGSSYVVEGKRMAGAAVVDGTRTIWASSLPEGTSAQKAELMALTQALRLAEGKSINIYTDSRYAFATAHVHGAIYKQRGWLTSAGREIKNKEEILSLLEALHLPKRLAIIHCPGHQKAKDPISRGNQMADRVAKQAAQGVNLLPAGKRTADGSEFEKRTADGSEFESPKKKAKVE

SEQ ID NO: 59 - protein, 2083 aa, synthetic construct
MPAAKRVKLDGGDKKYSIGLDIGTNSVGWAVITDEYKVPSKKFKVLGNTDRHSIKKNLIGALLFDSGETAEATRLKRTARRRYTRRKNRICYLQEIFSNEMAKVDDSFFHRLEESFLVEEDKKHERHPIFGNIVDEVAYHEKYPTIYHLRKKLVDSTDKADLRLIYLALAHMIKFRGHFLIEGDLNPDNSDVDKLFIQLVQTYNQLFEENPINASGVDAKAILSARLSKSRRLENLIAQLPGEKKNGLFGNLIALSLGLTPNFKSNFDLAEDAKLQLSKDTYDDDLDNLLAQIGDQYADLFLAAKNLSDAILLSDILRVNTEITKAPLSASMIKRYDEHHQDLTLLKALVRQQLPEKYKEIFFDQSKNGYAGYIDGGASQEEFYKFIKPILEKMDGTEELLVKLNREDLLRKQRTFDNGSIPHQIHLGELHAILRRQEDFYPFLKDNREKIEKILTFRIPYYVGPLARGNSRFAWMTRKSEETITPWNFEEVVDKGASAQSFIERMTNFDKNLPNEKVLPKHSLLYEYFTVYNELTKVKYVTEGMRKPAFLSGEQKKAIVDLLFKTNRKVTVKQLKEDYFKKIECFDSVEISGVEDRFNASLGTYHDLLKIIKDKDFLDNEENEDILEDIVLTLTLFEDREMIEERLKTYAHLFDDKVMKQLKRRRYTGWGRLSRKLINGIRDKQSGKTILDFLKSDGFANRNFMQLIHDDSLTFKEDIQKAQVSGQGDSLHEHIANLAGSPAIKKGILQTVKVVDELVKVMGRHKPENIVIEMARENQTTQKGQKNSRERMKRIEEGIKELGSQILKEHPVENTQLQNEKLYLYYLQNGRDMYVDQELDINRLSDYDVDHIVPQSFLKDDSIDNKVLTRSDKARGKSDNVPSEEVVKKMKNYWRQLLNAKLITQRKFDNLTKAERGGLSELDKAGFIKRQLVETRQITKHVAQILDSRMNTKYDENDKLIREVKVITLKSKLVSDFRKDFQFYKVREINNYHHAHDAYLNAVVGTALIKKYPKLESEFVYGDYKVYDVRKMIAKSEQEIGKATAKYFFYSNIMNFFKTEITLANGEIRKRPLIETNGETGEIVWDKGRDFATVRKVLSMPQVNIVKKTEVQTGGFSKESILPKRNSDKLIARKKDWDPKKYGGFDSPTVAYSVLVVAKVEKGKSKKLKSVKELLGITIMERSSFEKNPIDFLEAKGYKEVKKDLIIKLPKYSLFELENGRKRMLASAGELQKGNELALPSKYVNFLYLASHYEKLKGSPEDNEQKQLFVEQHKHYLDEIIEQISEFSKRVILADANLDKVLSAYNKHRDKPIREQAENIIHLFTLTNLGAPAAFKYFDTTIDRKRYTSTKEVLDATLIHQSITGLYETRIDLSQLGGDGGGGGGGGGGLDDEYRLYSPLVKPDQNIQFWLEQFPQAWAETAGMGLAKQVPPQVIQLKASATPVSVRQYPLSKEAQEGIRPHVQRLIQQGILVPVQSPWNTPLLPVRKPGTNDYRPVQDLREVNKRVQDIHPTVPNPYNLLCALPPQRSWYTVLDLKDAFFCLRLHPTSQPLFAFEWRDPGTGRTGQLTWTRLPQGFKNSPTIFNEALHRDLANFRIQHPQVTLLQYVDDLLLAGATKQDCLEGTKALLLELSDLGYRASAKKAQICRREVTYLGYSLRDGQRWLTEARKKTVVQIPAPTTAKQVREFLGKAGFCRLFIPGFATLAAPLYPLTKPKGEFSWAPEHQKAFDAIKKALLSAPALALPDVTKPFTLYVDERKGVARGVLTQTLGPWRRPVAYLSKKLDPVASGWPVCLKAIAAVAILVKDADKLTLGQNITVIAPHALENIVRQPPDRWMTNARMTHYQSLLLTERVTFAPPAALNPATLLPEETDEPVTHDCHQLLIEETGVRKDLTDIPLTGEVLTWFTDGSSYVVEGKRMAGAAVVDGTRTIWASSLPEGTSAQKAELMALTQALRLAEGKSINIYTDSRYAFATAHVHGAIYKQRGWLTSAGREIKNKEEILSLLEALHLPKRLAIIHCPGHQKAKDPISRGNQMADRVAKQAAQGVNLLPAGKRTADGSEFEKRTADGSEFESPKKKAKVE

SEQ ID NO: 60 - protein, 2086 aa, synthetic construct
MPAAKRVKLDGGDKKYSIGLDIGTNSVGWAVITDEYKVPSKKFKVLGNTDRHSIKKNLIGALLFDSGETAEATRLKRTARRRYTRRKNRICYLQEIFSNEMAKVDDSFFHRLEESFLVEEDKKHERHPIFGNIVDEVAYHEKYPTIYHLRKKLVDSTDKADLRLIYLALAHMIKFRGHFLIEGDLNPDNSDVDKLFIQLVQTYNQLFEENPINASGVDAKAILSARLSKSRRLENLIAQLPGEKKNGLFGNLIALSLGLTPNFKSNFDLAEDAKLQLSKDTYDDDLDNLLAQIGDQYADLFLAAKNLSDAILLSDILRVNTEITKAPLSASMIKRYDEHHQDLTLLKALVRQQLPEKYKEIFFDQSKNGYAGYIDGGASQEEFYKFIKPILEKMDGTEELLVKLNREDLLRKQRTFDNGSIPHQIHLGELHAILRRQEDFYPFLKDNREKIEKILTFRIPYYVGPLARGNSRFAWMTRKSEETITPWNFEEVVDKGASAQSFIERMTNFDKNLPNEKVLPKHSLLYEYFTVYNELTKVKYVTEGMRKPAFLSGEQKKAIVDLLFKTNRKVTVKQLKEDYFKKIECFDSVEISGVEDRFNASLGTYHDLLKIIKDKDFLDNEENEDILEDIVLTLTLFEDREMIEERLKTYAHLFDDKVMKQLKRRRYTGWGRLSRKLINGIRDKQSGKTILDFLKSDGFANRNFMQLIHDDSLTFKEDIQKAQVSGQGDSLHEHIANLAGSPAIKKGILQTVKVVDELVKVMGRHKPENIVIEMARENQTTQKGQKNSRERMKRIEEGIKELGSQILKEHPVENTQLQNEKLYLYYLQNGRDMYVDQELDINRLSDYDVDHIVPQSFLKDDSIDNKVLTRSDKARGKSDNVPSEEVVKKMKNYWRQLLNAKLITQRKFDNLTKAERGGLSELDKAGFIKRQLVETRQITKHVAQILDSRMNTKYDENDKLIREVKVITLKSKLVSDFRKDFQFYKVREINNYHHAHDAYLNAVVGTALIKKYPKLESEFVYGDYKVYDVRKMIAKSEQEIGKATAKYFFYSNIMNFFKTEITLANGEIRKRPLIETNGETGEIVWDKGRDFATVRKVLSMPQVNIVKKTEVQTGGFSKESILPKRNSDKLIARKKDWDPKKYGGFDSPTVAYSVLVVAKVEKGKSKKLKSVKELLGITIMERSSFEKNPIDFLEAKGYKEVKKDLIIKLPKYSLFELENGRKRMLASAGELQKGNELALPSKYVNFLYLASHYEKLKGSPEDNEQKQLFVEQHKHYLDEIIEQISEFSKRVILADANLDKVLSAYNKHRDKPIREQAENIIHLFTLTNLGAPAAFKYFDTTIDRKRYTSTKEVLDATLIHQSITGLYETRIDLSQLGGDGGPAPGGSGSSGGLDDEYRLYSPLVKPDQNIQFWLEQFPQAWAETAGMGLAKQVPPQVIQLKASATPVSVRQYPLSKEAQEGIRPHVQRLIQQGILVPVQSPWNTPLLPVRKPGTNDYRPVQDLREVNKRVQDIHPTVPNPYNLLCALPPQRSWYTVLDLKDAFFCLRLHPTSQPLFAFEWRDPGTGRTGQLTWTRLPQGFKNSPTIFNEALHRDLANFRIQHPQVTLLQYVDDLLLAGATKQDCLEGTKALLLELSDLGYRASAKKAQICRREVTYLGYSLRDGQRWLTEARKKTVVQIPAPTTAKQVREFLGKAGFCRLFIPGFATLAAPLYPLTKPKGEFSWAPEHQKAFDAIKKALLSAPALALPDVTKPFTLYVDERKGVARGVLTQTLGPWRRPVAYLSKKLDPVASGWPVCLKAIAAVAILVKDADKLTLGQNITVIAPHALENIVRQPPDRWMTNARMTHYQSLLLTERVTFAPPAALNPATLLPEETDEPVTHDCHQLLIEETGVRKDLTDIPLTGEVLTWFTDGSSYVVEGKRMAGAAVVDGTRTIWASSLPEGTSAQKAELMALTQALRLAEGKSINIYTDSRYAFATAHVHGAIYKQRGWLTSAGREIKNKEEILSLLEALHLPKRLAIIHCPGHQKAKDPISRGNQMADRVAKQAAQGVNLLPAGKRTADGSEFEKRTADGSEFESPKKKAKVE

SEQ ID NO: 61 - protein, 2083 aa, synthetic construct
MPAAKRVKLDGGDKKYSIGLDIGTNSVGWAVITDEYKVPSKKFKVLGNTDRHSIKKNLIGALLFDSGETAEATRLKRTARRRYTRRKNRICYLQEIFSNEMAKVDDSFFHRLEESFLVEEDKKHERHPIFGNIVDEVAYHEKYPTIYHLRKKLVDSTDKADLRLIYLALAHMIKFRGHFLIEGDLNPDNSDVDKLFIQLVQTYNQLFEENPINASGVDAKAILSARLSKSRRLENLIAQLPGEKKNGLFGNLIALSLGLTPNFKSNFDLAEDAKLQLSKDTYDDDLDNLLAQIGDQYADLFLAAKNLSDAILLSDILRVNTEITKAPLSASMIKRYDEHHQDLTLLKALVRQQLPEKYKEIFFDQSKNGYAGYIDGGASQEEFYKFIKPILEKMDGTEELLVKLNREDLLRKQRTFDNGSIPHQIHLGELHAILRRQEDFYPFLKDNREKIEKILTFRIPYYVGPLARGNSRFAWMTRKSEETITPWNFEEVVDKGASAQSFIERMTNFDKNLPNEKVLPKHSLLYEYFTVYNELTKVKYVTEGMRKPAFLSGEQKKAIVDLLFKTNRKVTVKQLKEDYFKKIECFDSVEISGVEDRFNASLGTYHDLLKIIKDKDFLDNEENEDILEDIVLTLTLFEDREMIEERLKTYAHLFDDKVMKQLKRRRYTGWGRLSRKLINGIRDKQSGKTILDFLKSDGFANRNFMQLIHDDSLTFKEDIQKAQVSGQGDSLHEHIANLAGSPAIKKGILQTVKVVDELVKVMGRHKPENIVIEMARENQTTQKGQKNSRERMKRIEEGIKELGSQILKEHPVENTQLQNEKLYLYYLQNGRDMYVDQELDINRLSDYDVDHIVPQSFLKDDSIDNKVLTRSDKARGKSDNVPSEEVVKKMKNYWRQLLNAKLITQRKFDNLTKAERGGLSELDKAGFIKRQLVETRQITKHVAQILDSRMNTKYDENDKLIREVKVITLKSKLVSDFRKDFQFYKVREINNYHHAHDAYLNAVVGTALIKKYPKLESEFVYGDYKVYDVRKMIAKSEQEIGKATAKYFFYSNIMNFFKTEITLANGEIRKRPLIETNGETGEIVWDKGRDFATVRKVLSMPQVNIVKKTEVQTGGFSKESILPKRNSDKLIARKKDWDPKKYGGFDSPTVAYSVLVVAKVEKGKSKKLKSVKELLGITIMERSSFEKNPIDFLEAKGYKEVKKDLIIKLPKYSLFELENGRKRMLASAGELQKGNELALPSKYVNFLYLASHYEKLKGSPEDNEQKQLFVEQHKHYLDEIIEQISEFSKRVILADANLDKVLSAYNKHRDKPIREQAENIIHLFTLTNLGAPAAFKYFDTTIDRKRYTSTKEVLDATLIHQSITGLYETRIDLSQLGGDGGPAPGSSGGLDDEYRLYSPLVKPDQNIQFWLEQFPQAWAETAGMGLAKQVPPQVIQLKASATPVSVRQYPLSKEAQEGIRPHVQRLIQQGILVPVQSPWNTPLLPVRKPGTNDYRPVQDLREVNKRVQDIHPTVPNPYNLLCALPPQRSWYTVLDLKDAFFCLRLHPTSQPLFAFEWRDPGTGRTGQLTWTRLPQGFKNSPTIFNEALHRDLANFRIQHPQVTLLQYVDDLLLAGATKQDCLEGTKALLLELSDLGYRASAKKAQICRREVTYLGYSLRDGQRWLTEARKKTVVQIPAPTTAKQVREFLGKAGFCRLFIPGFATLAAPLYPLTKPKGEFSWAPEHQKAFDAIKKALLSAPALALPDVTKPFTLYVDERKGVARGVLTQTLGPWRRPVAYLSKKLDPVASGWPVCLKAIAAVAILVKDADKLTLGQNITVIAPHALENIVRQPPDRWMTNARMTHYQSLLLTERVTFAPPAALNPATLLPEETDEPVTHDCHQLLIEETGVRKDLTDIPLTGEVLTWFTDGSSYVVEGKRMAGAAVVDGTRTIWASSLPEGTSAQKAELMALTQALRLAEGKSINIYTDSRYAFATAHVHGAIYKQRGWLTSAGREIKNKEEILSLLEALHLPKRLAIIHCPGHQKAKDPISRGNQMADRVAKQAAQGVNLLPAGKRTADGSEFEKRTADGSEFESPKKKAKVE

SEQ ID NO: 62 - protein, 2088 aa, synthetic construct
MPAAKRVKLDGGDKKYSIGLDIGTNSVGWAVITDEYKVPSKKFKVLGNTDRHSIKKNLIGALLFDSGETAEATRLKRTARRRYTRRKNRICYLQEIFSNEMAKVDDSFFHRLEESFLVEEDKKHERHPIFGNIVDEVAYHEKYPTIYHLRKKLVDSTDKADLRLIYLALAHMIKFRGHFLIEGDLNPDNSDVDKLFIQLVQTYNQLFEENPINASGVDAKAILSARLSKSRRLENLIAQLPGEKKNGLFGNLIALSLGLTPNFKSNFDLAEDAKLQLSKDTYDDDLDNLLAQIGDQYADLFLAAKNLSDAILLSDILRVNTEITKAPLSASMIKRYDEHHQDLTLLKALVRQQLPEKYKEIFFDQSKNGYAGYIDGGASQEEFYKFIKPILEKMDGTEELLVKLNREDLLRKQRTFDNGSIPHQIHLGELHAILRRQEDFYPFLKDNREKIEKILTFRIPYYVGPLARGNSRFAWMTRKSEETITPWNFEEVVDKGASAQSFIERMTNFDKNLPNEKVLPKHSLLYEYFTVYNELTKVKYVTEGMRKPAFLSGEQKKAIVDLLFKTNRKVTVKQLKEDYFKKIECFDSVEISGVEDRFNASLGTYHDLLKIIKDKDFLDNEENEDILEDIVLTLTLFEDREMIEERLKTYAHLFDDKVMKQLKRRRYTGWGRLSRKLINGIRDKQSGKTILDFLKSDGFANRNFMQLIHDDSLTFKEDIQKAQVSGQGDSLHEHIANLAGSPAIKKGILQTVKVVDELVKVMGRHKPENIVIEMARENQTTQKGQKNSRERMKRIEEGIKELGSQILKEHPVENTQLQNEKLYLYYLQNGRDMYVDQELDINRLSDYDVDHIVPQSFLKDDSIDNKVLTRSDKARGKSDNVPSEEVVKKMKNYWRQLLNAKLITQRKFDNLTKAERGGLSELDKAGFIKRQLVETRQITKHVAQILDSRMNTKYDENDKLIREVKVITLKSKLVSDFRKDFQFYKVREINNYHHAHDAYLNAVVGTALIKKYPKLESEFVYGDYKVYDVRKMIAKSEQEIGKATAKYFFYSNIMNFFKTEITLANGEIRKRPLIETNGETGEIVWDKGRDFATVRKVLSMPQVNIVKKTEVQTGGFSKESILPKRNSDKLIARKKDWDPKKYGGFDSPTVAYSVLVVAKVEKGKSKKLKSVKELLGITIMERSSFEKNPIDFLEAKGYKEVKKDLIIKLPKYSLFELENGRKRMLASAGELQKGNELALPSKYVNFLYLASHYEKLKGSPEDNEQKQLFVEQHKHYLDEIIEQISEFSKRVILADANLDKVLSAYNKHRDKPIREQAENIIHLFTLTNLGAPAAFKYFDTTIDRKRYTSTKEVLDATLIHQSITGLYETRIDLSQLGGDGGPAPAPAPAPAPGGLDDEYRLYSPLVKPDQNIQFWLEQFPQAWAETAGMGLAKQVPPQVIQLKASATPVSVRQYPLSKEAQEGIRPHVQRLIQQGILVPVQSPWNTPLLPVRKPGTNDYRPVQDLREVNKRVQDIHPTVPNPYNLLCALPPQRSWYTVLDLKDAFFCLRLHPTSQPLFAFEWRDPGTGRTGQLTWTRLPQGFKNSPTIFNEALHRDLANFRIQHPQVTLLQYVDDLLLAGATKQDCLEGTKALLLELSDLGYRASAKKAQICRREVTYLGYSLRDGQRWLTEARKKTVVQIPAPTTAKQVREFLGKAGFCRLFIPGFATLAAPLYPLTKPKGEFSWAPEHQKAFDAIKKALLSAPALALPDVTKPFTLYVDERKGVARGVLTQTLGPWRRPVAYLSKKLDPVASGWPVCLKAIAAVAILVKDADKLTLGQNITVIAPHALENIVRQPPDRWMTNARMTHYQSLLLTERVTFAPPAALNPATLLPEETDEPVTHDCHQLLIEETGVRKDLTDIPLTGEVLTWFTDGSSYVVEGKRMAGAAVVDGTRTIWASSLPEGTSAQKAELMALTQALRLAEGKSINIYTDSRYAFATAHVHGAIYKQRGWLTSAGREIKNKEEILSLLEALHLPKRLAIIHCPGHQKAKDPISRGNQMADRVAKQAAQGVNLLPAGKRTADGSEFEKRTADGSEFESPKKKAKVE

SEQ ID NO: 63 - protein, 2088 aa, synthetic construct
MPAAKRVKLDGGDKKYSIGLDIGTNSVGWAVITDEYKVPSKKFKVLGNTDRHSIKKNLIGALLFDSGETAEATRLKRTARRRYTRRKNRICYLQEIFSNEMAKVDDSFFHRLEESFLVEEDKKHERHPIFGNIVDEVAYHEKYPTIYHLRKKLVDSTDKADLRLIYLALAHMIKFRGHFLIEGDLNPDNSDVDKLFIQLVQTYNQLFEENPINASGVDAKAILSARLSKSRRLENLIAQLPGEKKNGLFGNLIALSLGLTPNFKSNFDLAEDAKLQLSKDTYDDDLDNLLAQIGDQYADLFLAAKNLSDAILLSDILRVNTEITKAPLSASMIKRYDEHHQDLTLLKALVRQQLPEKYKEIFFDQSKNGYAGYIDGGASQEEFYKFIKPILEKMDGTEELLVKLNREDLLRKQRTFDNGSIPHQIHLGELHAILRRQEDFYPFLKDNREKIEKILTFRIPYYVGPLARGNSRFAWMTRKSEETITPWNFEEVVDKGASAQSFIERMTNFDKNLPNEKVLPKHSLLYEYFTVYNELTKVKYVTEGMRKPAFLSGEQKKAIVDLLFKTNRKVTVKQLKEDYFKKIECFDSVEISGVEDRFNASLGTYHDLLKIIKDKDFLDNEENEDILEDIVLTLTLFEDREMIEERLKTYAHLFDDKVMKQLKRRRYTGWGRLSRKLINGIRDKQSGKTILDFLKSDGFANRNFMQLIHDDSLTFKEDIQKAQVSGQGDSLHEHIANLAGSPAIKKGILQTVKVVDELVKVMGRHKPENIVIEMARENQTTQKGQKNSRERMKRIEEGIKELGSQILKEHPVENTQLQNEKLYLYYLQNGRDMYVDQELDINRLSDYDVDHIVPQSFLKDDSIDNKVLTRSDKARGKSDNVPSEEVVKKMKNYWRQLLNAKLITQRKFDNLTKAERGGLSELDKAGFIKRQLVETRQITKHVAQILDSRMNTKYDENDKLIREVKVITLKSKLVSDFRKDFQFYKVREINNYHHAHDAYLNAVVGTALIKKYPKLESEFVYGDYKVYDVRKMIAKSEQEIGKATAKYFFYSNIMNFFKTEITLANGEIRKRPLIETNGETGEIVWDKGRDFATVRKVLSMPQVNIVKKTEVQTGGFSKESILPKRNSDKLIARKKDWDPKKYGGFDSPTVAYSVLVVAKVEKGKSKKLKSVKELLGITIMERSSFEKNPIDFLEAKGYKEVKKDLIIKLPKYSLFELENGRKRMLASAGELQKGNELALPSKYVNFLYLASHYEKLKGSPEDNEQKQLFVEQHKHYLDEIIEQISEFSKRVILADANLDKVLSAYNKHRDKPIREQAENIIHLFTLTNLGAPAAFKYFDTTIDRKRYTSTKEVLDATLIHQSITGLYETRIDLSQLGGDGGGGGEAAAKPAPGGLDDEYRLYSPLVKPDQNIQFWLEQFPQAWAETAGMGLAKQVPPQVIQLKASATPVSVRQYPLSKEAQEGIRPHVQRLIQQGILVPVQSPWNTPLLPVRKPGTNDYRPVQDLREVNKRVQDIHPTVPNPYNLLCALPPQRSWYTVLDLKDAFFCLRLHPTSQPLFAFEWRDPGTGRTGQLTWTRLPQGFKNSPTIFNEALHRDLANFRIQHPQVTLLQYVDDLLLAGATKQDCLEGTKALLLELSDLGYRASAKKAQICRREVTYLGYSLRDGQRWLTEARKKTVVQIPAPTTAKQVREFLGKAGFCRLFIPGFATLAAPLYPLTKPKGEFSWAPEHQKAFDAIKKALLSAPALALPDVTKPFTLYVDERKGVARGVLTQTLGPWRRPVAYLSKKLDPVASGWPVCLKAIAAVAILVKDADKLTLGQNITVIAPHALENIVRQPPDRWMTNARMTHYQSLLLTERVTFAPPAALNPATLLPEETDEPVTHDCHQLLIEETGVRKDLTDIPLTGEVLTWFTDGSSYVVEGKRMAGAAVVDGTRTIWASSLPEGTSAQKAELMALTQALRLAEGKSINIYTDSRYAFATAHVHGAIYKQRGWLTSAGREIKNKEEILSLLEALHLPKRLAIIHCPGHQKAKDPISRGNQMADRVAKQAAQGVNLLPAGKRTADGSEFEKRTADGSEFESPKKKAKVE

SEQ ID NO: 64 - protein, 2086 aa, synthetic construct
MPAAKRVKLDGGDKKYSIGLDIGTNSVGWAVITDEYKVPSKKFKVLGNTDRHSIKKNLIGALLFDSGETAEATRLKRTARRRYTRRKNRICYLQEIFSNEMAKVDDSFFHRLEESFLVEEDKKHERHPIFGNIVDEVAYHEKYPTIYHLRKKLVDSTDKADLRLIYLALAHMIKFRGHFLIEGDLNPDNSDVDKLFIQLVQTYNQLFEENPINASGVDAKAILSARLSKSRRLENLIAQLPGEKKNGLFGNLIALSLGLTPNFKSNFDLAEDAKLQLSKDTYDDDLDNLLAQIGDQYADLFLAAKNLSDAILLSDILRVNTEITKAPLSASMIKRYDEHHQDLTLLKALVRQQLPEKYKEIFFDQSKNGYAGYIDGGASQEEFYKFIKPILEKMDGTEELLVKLNREDLLRKQRTFDNGSIPHQIHLGELHAILRRQEDFYPFLKDNREKIEKILTFRIPYYVGPLARGNSRFAWMTRKSEETITPWNFEEVVDKGASAQSFIERMTNFDKNLPNEKVLPKHSLLYEYFTVYNELTKVKYVTEGMRKPAFLSGEQKKAIVDLLFKTNRKVTVKQLKEDYFKKIECFDSVEISGVEDRFNASLGTYHDLLKIIKDKDFLDNEENEDILEDIVLTLTLFEDREMIEERLKTYAHLFDDKVMKQLKRRRYTGWGRLSRKLINGIRDKQSGKTILDFLKSDGFANRNFMQLIHDDSLTFKEDIQKAQVSGQGDSLHEHIANLAGSPAIKKGILQTVKVVDELVKVMGRHKPENIVIEMARENQTTQKGQKNSRERMKRIEEGIKELGSQILKEHPVENTQLQNEKLYLYYLQNGRDMYVDQELDINRLSDYDVDHIVPQSFLKDDSIDNKVLTRSDKARGKSDNVPSEEVVKKMKNYWRQLLNAKLITQRKFDNLTKAERGGLSELDKAGFIKRQLVETRQITKHVAQILDSRMNTKYDENDKLIREVKVITLKSKLVSDFRKDFQFYKVREINNYHHAHDAYLNAVVGTALIKKYPKLESEFVYGDYKVYDVRKMIAKSEQEIGKATAKYFFYSNIMNFFKTEITLANGEIRKRPLIETNGETGEIVWDKGRDFATVRKVLSMPQVNIVKKTEVQTGGFSKESILPKRNSDKLIARKKDWDPKKYGGFDSPTVAYSVLVVAKVEKGKSKKLKSVKELLGITIMERSSFEKNPIDFLEAKGYKEVKKDLIIKLPKYSLFELENGRKRMLASAGELQKGNELALPSKYVNFLYLASHYEKLKGSPEDNEQKQLFVEQHKHYLDEIIEQISEFSKRVILADANLDKVLSAYNKHRDKPIREQAENIIHLFTLTNLGAPAAFKYFDTTIDRKRYTSTKEVLDATLIHQSITGLYETRIDLSQLGGDGGGSSGGSPAPGGLDDEYRLYSPLVKPDQNIQFWLEQFPQAWAETAGMGLAKQVPPQVIQLKASATPVSVRQYPLSKEAQEGIRPHVQRLIQQGILVPVQSPWNTPLLPVRKPGTNDYRPVQDLREVNKRVQDIHPTVPNPYNLLCALPPQRSWYTVLDLKDAFFCLRLHPTSQPLFAFEWRDPGTGRTGQLTWTRLPQGFKNSPTIFNEALHRDLANFRIQHPQVTLLQYVDDLLLAGATKQDCLEGTKALLLELSDLGYRASAKKAQICRREVTYLGYSLRDGQRWLTEARKKTVVQIPAPTTAKQVREFLGKAGFCRLFIPGFATLAAPLYPLTKPKGEFSWAPEHQKAFDAIKKALLSAPALALPDVTKPFTLYVDERKGVARGVLTQTLGPWRRPVAYLSKKLDPVASGWPVCLKAIAAVAILVKDADKLTLGQNITVIAPHALENIVRQPPDRWMTNARMTHYQSLLLTERVTFAPPAALNPATLLPEETDEPVTHDCHQLLIEETGVRKDLTDIPLTGEVLTWFTDGSSYVVEGKRMAGAAVVDGTRTIWASSLPEGTSAQKAELMALTQALRLAEGKSINIYTDSRYAFATAHVHGAIYKQRGWLTSAGREIKNKEEILSLLEALHLPKRLAIIHCPGHQKAKDPISRGNQMADRVAKQAAQGVNLLPAGKRTADGSEFEKRTADGSEFESPKKKAKVE

SEQ ID NO: 65 - protein, 2088 aa, synthetic construct
MPAAKRVKLDGGDKKYSIGLDIGTNSVGWAVITDEYKVPSKKFKVLGNTDRHSIKKNLIGALLFDSGETAEATRLKRTARRRYTRRKNRICYLQEIFSNEMAKVDDSFFHRLEESFLVEEDKKHERHPIFGNIVDEVAYHEKYPTIYHLRKKLVDSTDKADLRLIYLALAHMIKFRGHFLIEGDLNPDNSDVDKLFIQLVQTYNQLFEENPINASGVDAKAILSARLSKSRRLENLIAQLPGEKKNGLFGNLIALSLGLTPNFKSNFDLAEDAKLQLSKDTYDDDLDNLLAQIGDQYADLFLAAKNLSDAILLSDILRVNTEITKAPLSASMIKRYDEHHQDLTLLKALVRQQLPEKYKEIFFDQSKNGYAGYIDGGASQEEFYKFIKPILEKMDGTEELLVKLNREDLLRKQRTFDNGSIPHQIHLGELHAILRRQEDFYPFLKDNREKIEKILTFRIPYYVGPLARGNSRFAWMTRKSEETITPWNFEEVVDKGASAQSFIERMTNFDKNLPNEKVLPKHSLLYEYFTVYNELTKVKYVTEGMRKPAFLSGEQKKAIVDLLFKTNRKVTVKQLKEDYFKKIECFDSVEISGVEDRFNASLGTYHDLLKIIKDKDFLDNEENEDILEDIVLTLTLFEDREMIEERLKTYAHLFDDKVMKQLKRRRYTGWGRLSRKLINGIRDKQSGKTILDFLKSDGFANRNFMQLIHDDSLTFKEDIQKAQVSGQGDSLHEHIANLAGSPAIKKGILQTVKVVDELVKVMGRHKPENIVIEMARENQTTQKGQKNSRERMKRIEEGIKELGSQILKEHPVENTQLQNEKLYLYYLQNGRDMYVDQELDINRLSDYDVDHIVPQSFLKDDSIDNKVLTRSDKARGKSDNVPSEEVVKKMKNYWRQLLNAKLITQRKFDNLTKAERGGLSELDKAGFIKRQLVETRQITKHVAQILDSRMNTKYDENDKLIREVKVITLKSKLVSDFRKDFQFYKVREINNYHHAHDAYLNAVVGTALIKKYPKLESEFVYGDYKVYDVRKMIAKSEQEIGKATAKYFFYSNIMNFFKTEITLANGEIRKRPLIETNGETGEIVWDKGRDFATVRKVLSMPQVNIVKKTEVQTGGFSKESILPKRNSDKLIARKKDWDPKKYGGFDSPTVAYSVLVVAKVEKGKSKKLKSVKELLGITIMERSSFEKNPIDFLEAKGYKEVKKDLIIKLPKYSLFELENGRKRMLASAGELQKGNELALPSKYVNFLYLASHYEKLKGSPEDNEQKQLFVEQHKHYLDEIIEQISEFSKRVILADANLDKVLSAYNKHRDKPIREQAENIIHLFTLTNLGAPAAFKYFDTTIDRKRYTSTKEVLDATLIHQSITGLYETRIDLSQLGGDGGGGGEAAAKGGSGGLDDEYRLYSPLVKPDQNIQFWLEQFPQAWAETAGMGLAKQVPPQVIQLKASATPVSVRQYPLSKEAQEGIRPHVQRLIQQGILVPVQSPWNTPLLPVRKPGTNDYRPVQDLREVNKRVQDIHPTVPNPYNLLCALPPQRSWYTVLDLKDAFFCLRLHPTSQPLFAFEWRDPGTGRTGQLTWTRLPQGFKNSPTIFNEALHRDLANFRIQHPQVTLLQYVDDLLLAGATKQDCLEGTKALLLELSDLGYRASAKKAQICRREVTYLGYSLRDGQRWLTEARKKTVVQIPAPTTAKQVREFLGKAGFCRLFIPGFATLAAPLYPLTKPKGEFSWAPEHQKAFDAIKKALLSAPALALPDVTKPFTLYVDERKGVARGVLTQTLGPWRRPVAYLSKKLDPVASGWPVCLKAIAAVAILVKDADKLTLGQNITVIAPHALENIVRQPPDRWMTNARMTHYQSLLLTERVTFAPPAALNPATLLPEETDEPVTHDCHQLLIEETGVRKDLTDIPLTGEVLTWFTDGSSYVVEGKRMAGAAVVDGTRTIWASSLPEGTSAQKAELMALTQALRLAEGKSINIYTDSRYAFATAHVHGAIYKQRGWLTSAGREIKNKEEILSLLEALHLPKRLAIIHCPGHQKAKDPISRGNQMADRVAKQAAQGVNLLPAGKRTADGSEFEKRTADGSEFESPKKKAKVE

SEQ ID NO: 66 - protein, 2081 aa, synthetic construct
MPAAKRVKLDGGDKKYSIGLDIGTNSVGWAVITDEYKVPSKKFKVLGNTDRHSIKKNLIGALLFDSGETAEATRLKRTARRRYTRRKNRICYLQEIFSNEMAKVDDSFFHRLEESFLVEEDKKHERHPIFGNIVDEVAYHEKYPTIYHLRKKLVDSTDKADLRLIYLALAHMIKFRGHFLIEGDLNPDNSDVDKLFIQLVQTYNQLFEENPINASGVDAKAILSARLSKSRRLENLIAQLPGEKKNGLFGNLIALSLGLTPNFKSNFDLAEDAKLQLSKDTYDDDLDNLLAQIGDQYADLFLAAKNLSDAILLSDILRVNTEITKAPLSASMIKRYDEHHQDLTLLKALVRQQLPEKYKEIFFDQSKNGYAGYIDGGASQEEFYKFIKPILEKMDGTEELLVKLNREDLLRKQRTFDNGSIPHQIHLGELHAILRRQEDFYPFLKDNREKIEKILTFRIPYYVGPLARGNSRFAWMTRKSEETITPWNFEEVVDKGASAQSFIERMTNFDKNLPNEKVLPKHSLLYEYFTVYNELTKVKYVTEGMRKPAFLSGEQKKAIVDLLFKTNRKVTVKQLKEDYFKKIECFDSVEISGVEDRFNASLGTYHDLLKIIKDKDFLDNEENEDILEDIVLTLTLFEDREMIEERLKTYAHLFDDKVMKQLKRRRYTGWGRLSRKLINGIRDKQSGKTILDFLKSDGFANRNFMQLIHDDSLTFKEDIQKAQVSGQGDSLHEHIANLAGSPAIKKGILQTVKVVDELVKVMGRHKPENIVIEMARENQTTQKGQKNSRERMKRIEEGIKELGSQILKEHPVENTQLQNEKLYLYYLQNGRDMYVDQELDINRLSDYDVDHIVPQSFLKDDSIDNKVLTRSDKARGKSDNVPSEEVVKKMKNYWRQLLNAKLITQRKFDNLTKAERGGLSELDKAGFIKRQLVETRQITKHVAQILDSRMNTKYDENDKLIREVKVITLKSKLVSDFRKDFQFYKVREINNYHHAHDAYLNAVVGTALIKKYPKLESEFVYGDYKVYDVRKMIAKSEQEIGKATAKYFFYSNIMNFFKTEITLANGEIRKRPLIETNGETGEIVWDKGRDFATVRKVLSMPQVNIVKKTEVQTGGFSKESILPKRNSDKLIARKKDWDPKKYGGFDSPTVAYSVLVVAKVEKGKSKKLKSVKELLGITIMERSSFEKNPIDFLEAKGYKEVKKDLIIKLPKYSLFELENGRKRMLASAGELQKGNELALPSKYVNFLYLASHYEKLKGSPEDNEQKQLFVEQHKHYLDEIIEQISEFSKRVILADANLDKVLSAYNKHRDKPIREQAENIIHLFTLTNLGAPAAFKYFDTTIDRKRYTSTKEVLDATLIHQSITGLYETRIDLSQLGGDGGGGGGGGLDDEYRLYSPLVKPDQNIQFWLEQFPQAWAETAGMGLAKQVPPQVIQLKASATPVSVRQYPLSKEAQEGIRPHVQRLIQQGILVPVQSPWNTPLLPVRKPGTNDYRPVQDLREVNKRVQDIHPTVPNPYNLLCALPPQRSWYTVLDLKDAFFCLRLHPTSQPLFAFEWRDPGTGRTGQLTWTRLPQGFKNSPTIFNEALHRDLANFRIQHPQVTLLQYVDDLLLAGATKQDCLEGTKALLLELSDLGYRASAKKAQICRREVTYLGYSLRDGQRWLTEARKKTVVQIPAPTTAKQVREFLGKAGFCRLFIPGFATLAAPLYPLTKPKGEFSWAPEHQKAFDAIKKALLSAPALALPDVTKPFTLYVDERKGVARGVLTQTLGPWRRPVAYLSKKLDPVASGWPVCLKAIAAVAILVKDADKLTLGQNITVIAPHALENIVRQPPDRWMTNARMTHYQSLLLTERVTFAPPAALNPATLLPEETDEPVTHDCHQLLIEETGVRKDLTDIPLTGEVLTWFTDGSSYVVEGKRMAGAAVVDGTRTIWASSLPEGTSAQKAELMALTQALRLAEGKSINIYTDSRYAFATAHVHGAIYKQRGWLTSAGREIKNKEEILSLLEALHLPKRLAIIHCPGHQKAKDPISRGNQMADRVAKQAAQGVNLLPAGKRTADGSEFEKRTADGSEFESPKKKAKVE

SEQ ID NO: 67 - protein, 2089 aa, synthetic construct
MPAAKRVKLDGGDKKYSIGLDIGTNSVGWAVITDEYKVPSKKFKVLGNTDRHSIKKNLIGALLFDSGETAEATRLKRTARRRYTRRKNRICYLQEIFSNEMAKVDDSFFHRLEESFLVEEDKKHERHPIFGNIVDEVAYHEKYPTIYHLRKKLVDSTDKADLRLIYLALAHMIKFRGHFLIEGDLNPDNSDVDKLFIQLVQTYNQLFEENPINASGVDAKAILSARLSKSRRLENLIAQLPGEKKNGLFGNLIALSLGLTPNFKSNFDLAEDAKLQLSKDTYDDDLDNLLAQIGDQYADLFLAAKNLSDAILLSDILRVNTEITKAPLSASMIKRYDEHHQDLTLLKALVRQQLPEKYKEIFFDQSKNGYAGYIDGGASQEEFYKFIKPILEKMDGTEELLVKLNREDLLRKQRTFDNGSIPHQIHLGELHAILRRQEDFYPFLKDNREKIEKILTFRIPYYVGPLARGNSRFAWMTRKSEETITPWNFEEVVDKGASAQSFIERMTNFDKNLPNEKVLPKHSLLYEYFTVYNELTKVKYVTEGMRKPAFLSGEQKKAIVDLLFKTNRKVTVKQLKEDYFKKIECFDSVEISGVEDRFNASLGTYHDLLKIIKDKDFLDNEENEDILEDIVLTLTLFEDREMIEERLKTYAHLFDDKVMKQLKRRRYTGWGRLSRKLINGIRDKQSGKTILDFLKSDGFANRNFMQLIHDDSLTFKEDIQKAQVSGQGDSLHEHIANLAGSPAIKKGILQTVKVVDELVKVMGRHKPENIVIEMARENQTTQKGQKNSRERMKRIEEGIKELGSQILKEHPVENTQLQNEKLYLYYLQNGRDMYVDQELDINRLSDYDVDHIVPQSFLKDDSIDNKVLTRSDKARGKSDNVPSEEVVKKMKNYWRQLLNAKLITQRKFDNLTKAERGGLSELDKAGFIKRQLVETRQITKHVAQILDSRMNTKYDENDKLIREVKVITLKSKLVSDFRKDFQFYKVREINNYHHAHDAYLNAVVGTALIKKYPKLESEFVYGDYKVYDVRKMIAKSEQEIGKATAKYFFYSNIMNFFKTEITLANGEIRKRPLIETNGETGEIVWDKGRDFATVRKVLSMPQVNIVKKTEVQTGGFSKESILPKRNSDKLIARKKDWDPKKYGGFDSPTVAYSVLVVAKVEKGKSKKLKSVKELLGITIMERSSFEKNPIDFLEAKGYKEVKKDLIIKLPKYSLFELENGRKRMLASAGELQKGNELALPSKYVNFLYLASHYEKLKGSPEDNEQKQLFVEQHKHYLDEIIEQISEFSKRVILADANLDKVLSAYNKHRDKPIREQAENIIHLFTLTNLGAPAAFKYFDTTIDRKRYTSTKEVLDATLIHQSITGLYETRIDLSQLGGDGGGGSGGSGGSGGSGGLDDEYRLYSPLVKPDQNIQFWLEQFPQAWAETAGMGLAKQVPPQVIQLKASATPVSVRQYPLSKEAQEGIRPHVQRLIQQGILVPVQSPWNTPLLPVRKPGTNDYRPVQDLREVNKRVQDIHPTVPNPYNLLCALPPQRSWYTVLDLKDAFFCLRLHPTSQPLFAFEWRDPGTGRTGQLTWTRLPQGFKNSPTIFNEALHRDLANFRIQHPQVTLLQYVDDLLLAGATKQDCLEGTKALLLELSDLGYRASAKKAQICRREVTYLGYSLRDGQRWLTEARKKTVVQIPAPTTAKQVREFLGKAGFCRLFIPGFATLAAPLYPLTKPKGEFSWAPEHQKAFDAIKKALLSAPALALPDVTKPFTLYVDERKGVARGVLTQTLGPWRRPVAYLSKKLDPVASGWPVCLKAIAAVAILVKDADKLTLGQNITVIAPHALENIVRQPPDRWMTNARMTHYQSLLLTERVTFAPPAALNPATLLPEETDEPVTHDCHQLLIEETGVRKDLTDIPLTGEVLTWFTDGSSYVVEGKRMAGAAVVDGTRTIWASSLPEGTSAQKAELMALTQALRLAEGKSINIYTDSRYAFATAHVHGAIYKQRGWLTSAGREIKNKEEILSLLEALHLPKRLAIIHCPGHQKAKDPISRGNQMADRVAKQAAQGVNLLPAGKRTADGSEFEKRTADGSEFESPKKKAKVE

SEQ ID NO: 68 - protein, 2088 aa, synthetic construct
MPAAKRVKLDGGDKKYSIGLDIGTNSVGWAVITDEYKVPSKKFKVLGNTDRHSIKKNLIGALLFDSGETAEATRLKRTARRRYTRRKNRICYLQEIFSNEMAKVDDSFFHRLEESFLVEEDKKHERHPIFGNIVDEVAYHEKYPTIYHLRKKLVDSTDKADLRLIYLALAHMIKFRGHFLIEGDLNPDNSDVDKLFIQLVQTYNQLFEENPINASGVDAKAILSARLSKSRRLENLIAQLPGEKKNGLFGNLIALSLGLTPNFKSNFDLAEDAKLQLSKDTYDDDLDNLLAQIGDQYADLFLAAKNLSDAILLSDILRVNTEITKAPLSASMIKRYDEHHQDLTLLKALVRQQLPEKYKEIFFDQSKNGYAGYIDGGASQEEFYKFIKPILEKMDGTEELLVKLNREDLLRKQRTFDNGSIPHQIHLGELHAILRRQEDFYPFLKDNREKIEKILTFRIPYYVGPLARGNSRFAWMTRKSEETITPWNFEEVVDKGASAQSFIERMTNFDKNLPNEKVLPKHSLLYEYFTVYNELTKVKYVTEGMRKPAFLSGEQKKAIVDLLFKTNRKVTVKQLKEDYFKKIECFDSVEISGVEDRFNASLGTYHDLLKIIKDKDFLDNEENEDILEDIVLTLTLFEDREMIEERLKTYAHLFDDKVMKQLKRRRYTGWGRLSRKLINGIRDKQSGKTILDFLKSDGFANRNFMQLIHDDSLTFKEDIQKAQVSGQGDSLHEHIANLAGSPAIKKGILQTVKVVDELVKVMGRHKPENIVIEMARENQTTQKGQKNSRERMKRIEEGIKELGSQILKEHPVENTQLQNEKLYLYYLQNGRDMYVDQELDINRLSDYDVDHIVPQSFLKDDSIDNKVLTRSDKARGKSDNVPSEEVVKKMKNYWRQLLNAKLITQRKFDNLTKAERGGLSELDKAGFIKRQLVETRQITKHVAQILDSRMNTKYDENDKLIREVKVITLKSKLVSDFRKDFQFYKVREINNYHHAHDAYLNAVVGTALIKKYPKLESEFVYGDYKVYDVRKMIAKSEQEIGKATAKYFFYSNIMNFFKTEITLANGEIRKRPLIETNGETGEIVWDKGRDFATVRKVLSMPQVNIVKKTEVQTGGFSKESILPKRNSDKLIARKKDWDPKKYGGFDSPTVAYSVLVVAKVEKGKSKKLKSVKELLGITIMERSSFEKNPIDFLEAKGYKEVKKDLIIKLPKYSLFELENGRKRMLASAGELQKGNELALPSKYVNFLYLASHYEKLKGSPEDNEQKQLFVEQHKHYLDEIIEQISEFSKRVILADANLDKVLSAYNKHRDKPIREQAENIIHLFTLTNLGAPAAFKYFDTTIDRKRYTSTKEVLDATLIHQSITGLYETRIDLSQLGGDGGGGGGGSEAAAKGGLDDEYRLYSPLVKPDQNIQFWLEQFPQAWAETAGMGLAKQVPPQVIQLKASATPVSVRQYPLSKEAQEGIRPHVQRLIQQGILVPVQSPWNTPLLPVRKPGTNDYRPVQDLREVNKRVQDIHPTVPNPYNLLCALPPQRSWYTVLDLKDAFFCLRLHPTSQPLFAFEWRDPGTGRTGQLTWTRLPQGFKNSPTIFNEALHRDLANFRIQHPQVTLLQYVDDLLLAGATKQDCLEGTKALLLELSDLGYRASAKKAQICRREVTYLGYSLRDGQRWLTEARKKTVVQIPAPTTAKQVREFLGKAGFCRLFIPGFATLAAPLYPLTKPKGEFSWAPEHQKAFDAIKKALLSAPALALPDVTKPFTLYVDERKGVARGVLTQTLGPWRRPVAYLSKKLDPVASGWPVCLKAIAAVAILVKDADKLTLGQNITVIAPHALENIVRQPPDRWMTNARMTHYQSLLLTERVTFAPPAALNPATLLPEETDEPVTHDCHQLLIEETGVRKDLTDIPLTGEVLTWFTDGSSYVVEGKRMAGAAVVDGTRTIWASSLPEGTSAQKAELMALTQALRLAEGKSINIYTDSRYAFATAHVHGAIYKQRGWLTSAGREIKNKEEILSLLEALHLPKRLAIIHCPGHQKAKDPISRGNQMADRVAKQAAQGVNLLPAGKRTADGSEFEKRTADGSEFESPKKKAKVE

SEQ ID NO: 69 - protein, 2086 aa, synthetic construct
MPAAKRVKLDGGDKKYSIGLDIGTNSVGWAVITDEYKVPSKKFKVLGNTDRHSIKKNLIGALLFDSGETAEATRLKRTARRRYTRRKNRICYLQEIFSNEMAKVDDSFFHRLEESFLVEEDKKHERHPIFGNIVDEVAYHEKYPTIYHLRKKLVDSTDKADLRLIYLALAHMIKFRGHFLIEGDLNPDNSDVDKLFIQLVQTYNQLFEENPINASGVDAKAILSARLSKSRRLENLIAQLPGEKKNGLFGNLIALSLGLTPNFKSNFDLAEDAKLQLSKDTYDDDLDNLLAQIGDQYADLFLAAKNLSDAILLSDILRVNTEITKAPLSASMIKRYDEHHQDLTLLKALVRQQLPEKYKEIFFDQSKNGYAGYIDGGASQEEFYKFIKPILEKMDGTEELLVKLNREDLLRKQRTFDNGSIPHQIHLGELHAILRRQEDFYPFLKDNREKIEKILTFRIPYYVGPLARGNSRFAWMTRKSEETITPWNFEEVVDKGASAQSFIERMTNFDKNLPNEKVLPKHSLLYEYFTVYNELTKVKYVTEGMRKPAFLSGEQKKAIVDLLFKTNRKVTVKQLKEDYFKKIECFDSVEISGVEDRFNASLGTYHDLLKIIKDKDFLDNEENEDILEDIVLTLTLFEDREMIEERLKTYAHLFDDKVMKQLKRRRYTGWGRLSRKLINGIRDKQSGKTILDFLKSDGFANRNFMQLIHDDSLTFKEDIQKAQVSGQGDSLHEHIANLAGSPAIKKGILQTVKVVDELVKVMGRHKPENIVIEMARENQTTQKGQKNSRERMKRIEEGIKELGSQILKEHPVENTQLQNEKLYLYYLQNGRDMYVDQELDINRLSDYDVDHIVPQSFLKDDSIDNKVLTRSDKARGKSDNVPSEEVVKKMKNYWRQLLNAKLITQRKFDNLTKAERGGLSELDKAGFIKRQLVETRQITKHVAQILDSRMNTKYDENDKLIREVKVITLKSKLVSDFRKDFQFYKVREINNYHHAHDAYLNAVVGTALIKKYPKLESEFVYGDYKVYDVRKMIAKSEQEIGKATAKYFFYSNIMNFFKTEITLANGEIRKRPLIETNGETGEIVWDKGRDFATVRKVLSMPQVNIVKKTEVQTGGFSKESILPKRNSDKLIARKKDWDPKKYGGFDSPTVAYSVLVVAKVEKGKSKKLKSVKELLGITIMERSSFEKNPIDFLEAKGYKEVKKDLIIKLPKYSLFELENGRKRMLASAGELQKGNELALPSKYVNFLYLASHYEKLKGSPEDNEQKQLFVEQHKHYLDEIIEQISEFSKRVILADANLDKVLSAYNKHRDKPIREQAENIIHLFTLTNLGAPAAFKYFDTTIDRKRYTSTKEVLDATLIHQSITGLYETRIDLSQLGGDGGGSSPAPGGSGGLDDEYRLYSPLVKPDQNIQFWLEQFPQAWAETAGMGLAKQVPPQVIQLKASATPVSVRQYPLSKEAQEGIRPHVQRLIQQGILVPVQSPWNTPLLPVRKPGTNDYRPVQDLREVNKRVQDIHPTVPNPYNLLCALPPQRSWYTVLDLKDAFFCLRLHPTSQPLFAFEWRDPGTGRTGQLTWTRLPQGFKNSPTIFNEALHRDLANFRIQHPQVTLLQYVDDLLLAGATKQDCLEGTKALLLELSDLGYRASAKKAQICRREVTYLGYSLRDGQRWLTEARKKTVVQIPAPTTAKQVREFLGKAGFCRLFIPGFATLAAPLYPLTKPKGEFSWAPEHQKAFDAIKKALLSAPALALPDVTKPFTLYVDERKGVARGVLTQTLGPWRRPVAYLSKKLDPVASGWPVCLKAIAAVAILVKDADKLTLGQNITVIAPHALENIVRQPPDRWMTNARMTHYQSLLLTERVTFAPPAALNPATLLPEETDEPVTHDCHQLLIEETGVRKDLTDIPLTGEVLTWFTDGSSYVVEGKRMAGAAVVDGTRTIWASSLPEGTSAQKAELMALTQALRLAEGKSINIYTDSRYAFATAHVHGAIYKQRGWLTSAGREIKNKEEILSLLEALHLPKRLAIIHCPGHQKAKDPISRGNQMADRVAKQAAQGVNLLPAGKRTADGSEFEKRTADGSEFESPKKKAKVE

SEQ ID NO: 70 - protein, 2082 aa, synthetic construct
MPAAKRVKLDGGDKKYSIGLDIGTNSVGWAVITDEYKVPSKKFKVLGNTDRHSIKKNLIGALLFDSGETAEATRLKRTARRRYTRRKNRICYLQEIFSNEMAKVDDSFFHRLEESFLVEEDKKHERHPIFGNIVDEVAYHEKYPTIYHLRKKLVDSTDKADLRLIYLALAHMIKFRGHFLIEGDLNPDNSDVDKLFIQLVQTYNQLFEENPINASGVDAKAILSARLSKSRRLENLIAQLPGEKKNGLFGNLIALSLGLTPNFKSNFDLAEDAKLQLSKDTYDDDLDNLLAQIGDQYADLFLAAKNLSDAILLSDILRVNTEITKAPLSASMIKRYDEHHQDLTLLKALVRQQLPEKYKEIFFDQSKNGYAGYIDGGASQEEFYKFIKPILEKMDGTEELLVKLNREDLLRKQRTFDNGSIPHQIHLGELHAILRRQEDFYPFLKDNREKIEKILTFRIPYYVGPLARGNSRFAWMTRKSEETITPWNFEEVVDKGASAQSFIERMTNFDKNLPNEKVLPKHSLLYEYFTVYNELTKVKYVTEGMRKPAFLSGEQKKAIVDLLFKTNRKVTVKQLKEDYFKKIECFDSVEISGVEDRFNASLGTYHDLLKIIKDKDFLDNEENEDILEDIVLTLTLFEDREMIEERLKTYAHLFDDKVMKQLKRRRYTGWGRLSRKLINGIRDKQSGKTILDFLKSDGFANRNFMQLIHDDSLTFKEDIQKAQVSGQGDSLHEHIANLAGSPAIKKGILQTVKVVDELVKVMGRHKPENIVIEMARENQTTQKGQKNSRERMKRIEEGIKELGSQILKEHPVENTQLQNEKLYLYYLQNGRDMYVDQELDINRLSDYDVDHIVPQSFLKDDSIDNKVLTRSDKARGKSDNVPSEEVVKKMKNYWRQLLNAKLITQRKFDNLTKAERGGLSELDKAGFIKRQLVETRQITKHVAQILDSRMNTKYDENDKLIREVKVITLKSKLVSDFRKDFQFYKVREINNYHHAHDAYLNAVVGTALIKKYPKLESEFVYGDYKVYDVRKMIAKSEQEIGKATAKYFFYSNIMNFFKTEITLANGEIRKRPLIETNGETGEIVWDKGRDFATVRKVLSMPQVNIVKKTEVQTGGFSKESILPKRNSDKLIARKKDWDPKKYGGFDSPTVAYSVLVVAKVEKGKSKKLKSVKELLGITIMERSSFEKNPIDFLEAKGYKEVKKDLIIKLPKYSLFELENGRKRMLASAGELQKGNELALPSKYVNFLYLASHYEKLKGSPEDNEQKQLFVEQHKHYLDEIIEQISEFSKRVILADANLDKVLSAYNKHRDKPIREQAENIIHLFTLTNLGAPAAFKYFDTTIDRKRYTSTKEVLDATLIHQSITGLYETRIDLSQLGGDGGGGGGGGGLDDEYRLYSPLVKPDQNIQFWLEQFPQAWAETAGMGLAKQVPPQVIQLKASATPVSVRQYPLSKEAQEGIRPHVQRLIQQGILVPVQSPWNTPLLPVRKPGTNDYRPVQDLREVNKRVQDIHPTVPNPYNLLCALPPQRSWYTVLDLKDAFFCLRLHPTSQPLFAFEWRDPGTGRTGQLTWTRLPQGFKNSPTIFNEALHRDLANFRIQHPQVTLLQYVDDLLLAGATKQDCLEGTKALLLELSDLGYRASAKKAQICRREVTYLGYSLRDGQRWLTEARKKTVVQIPAPTTAKQVREFLGKAGFCRLFIPGFATLAAPLYPLTKPKGEFSWAPEHQKAFDAIKKALLSAPALALPDVTKPFTLYVDERKGVARGVLTQTLGPWRRPVAYLSKKLDPVASGWPVCLKAIAAVAILVKDADKLTLGQNITVIAPHALENIVRQPPDRWMTNARMTHYQSLLLTERVTFAPPAALNPATLLPEETDEPVTHDCHQLLIEETGVRKDLTDIPLTGEVLTWFTDGSSYVVEGKRMAGAAVVDGTRTIWASSLPEGTSAQKAELMALTQALRLAEGKSINIYTDSRYAFATAHVHGAIYKQRGWLTSAGREIKNKEEILSLLEALHLPKRLAIIHCPGHQKAKDPISRGNQMADRVAKQAAQGVNLLPAGKRTADGSEFEKRTADGSEFESPKKKAKVE

SEQ ID NO: 71 - protein, 2088 aa, synthetic construct
MPAAKRVKLDGGDKKYSIGLDIGTNSVGWAVITDEYKVPSKKFKVLGNTDRHSIKKNLIGALLFDSGETAEATRLKRTARRRYTRRKNRICYLQEIFSNEMAKVDDSFFHRLEESFLVEEDKKHERHPIFGNIVDEVAYHEKYPTIYHLRKKLVDSTDKADLRLIYLALAHMIKFRGHFLIEGDLNPDNSDVDKLFIQLVQTYNQLFEENPINASGVDAKAILSARLSKSRRLENLIAQLPGEKKNGLFGNLIALSLGLTPNFKSNFDLAEDAKLQLSKDTYDDDLDNLLAQIGDQYADLFLAAKNLSDAILLSDILRVNTEITKAPLSASMIKRYDEHHQDLTLLKALVRQQLPEKYKEIFFDQSKNGYAGYIDGGASQEEFYKFIKPILEKMDGTEELLVKLNREDLLRKQRTFDNGSIPHQIHLGELHAILRRQEDFYPFLKDNREKIEKILTFRIPYYVGPLARGNSRFAWMTRKSEETITPWNFEEVVDKGASAQSFIERMTNFDKNLPNEKVLPKHSLLYEYFTVYNELTKVKYVTEGMRKPAFLSGEQKKAIVDLLFKTNRKVTVKQLKEDYFKKIECFDSVEISGVEDRFNASLGTYHDLLKIIKDKDFLDNEENEDILEDIVLTLTLFEDREMIEERLKTYAHLFDDKVMKQLKRRRYTGWGRLSRKLINGIRDKQSGKTILDFLKSDGFANRNFMQLIHDDSLTFKEDIQKAQVSGQGDSLHEHIANLAGSPAIKKGILQTVKVVDELVKVMGRHKPENIVIEMARENQTTQKGQKNSRERMKRIEEGIKELGSQILKEHPVENTQLQNEKLYLYYLQNGRDMYVDQELDINRLSDYDVDHIVPQSFLKDDSIDNKVLTRSDKARGKSDNVPSEEVVKKMKNYWRQLLNAKLITQRKFDNLTKAERGGLSELDKAGFIKRQLVETRQITKHVAQILDSRMNTKYDENDKLIREVKVITLKSKLVSDFRKDFQFYKVREINNYHHAHDAYLNAVVGTALIKKYPKLESEFVYGDYKVYDVRKMIAKSEQEIGKATAKYFFYSNIMNFFKTEITLANGEIRKRPLIETNGETGEIVWDKGRDFATVRKVLSMPQVNIVKKTEVQTGGFSKESILPKRNSDKLIARKKDWDPKKYGGFDSPTVAYSVLVVAKVEKGKSKKLKSVKELLGITIMERSSFEKNPIDFLEAKGYKEVKKDLIIKLPKYSLFELENGRKRMLASAGELQKGNELALPSKYVNFLYLASHYEKLKGSPEDNEQKQLFVEQHKHYLDEIIEQISEFSKRVILADANLDKVLSAYNKHRDKPIREQAENIIHLFTLTNLGAPAAFKYFDTTIDRKRYTSTKEVLDATLIHQSITGLYETRIDLSQLGGDGGEAAAKGGSGSSGGLDDEYRLYSPLVKPDQNIQFWLEQFPQAWAETAGMGLAKQVPPQVIQLKASATPVSVRQYPLSKEAQEGIRPHVQRLIQQGILVPVQSPWNTPLLPVRKPGTNDYRPVQDLREVNKRVQDIHPTVPNPYNLLCALPPQRSWYTVLDLKDAFFCLRLHPTSQPLFAFEWRDPGTGRTGQLTWTRLPQGFKNSPTIFNEALHRDLANFRIQHPQVTLLQYVDDLLLAGATKQDCLEGTKALLLELSDLGYRASAKKAQICRREVTYLGYSLRDGQRWLTEARKKTVVQIPAPTTAKQVREFLGKAGFCRLFIPGFATLAAPLYPLTKPKGEFSWAPEHQKAFDAIKKALLSAPALALPDVTKPFTLYVDERKGVARGVLTQTLGPWRRPVAYLSKKLDPVASGWPVCLKAIAAVAILVKDADKLTLGQNITVIAPHALENIVRQPPDRWMTNARMTHYQSLLLTERVTFAPPAALNPATLLPEETDEPVTHDCHQLLIEETGVRKDLTDIPLTGEVLTWFTDGSSYVVEGKRMAGAAVVDGTRTIWASSLPEGTSAQKAELMALTQALRLAEGKSINIYTDSRYAFATAHVHGAIYKQRGWLTSAGREIKNKEEILSLLEALHLPKRLAIIHCPGHQKAKDPISRGNQMADRVAKQAAQGVNLLPAGKRTADGSEFEKRTADGSEFESPKKKAKVE

SEQ ID NO: 72 - protein, 2088 aa, synthetic construct
MPAAKRVKLDGGDKKYSIGLDIGTNSVGWAVITDEYKVPSKKFKVLGNTDRHSIKKNLIGALLFDSGETAEATRLKRTARRRYTRRKNRICYLQEIFSNEMAKVDDSFFHRLEESFLVEEDKKHERHPIFGNIVDEVAYHEKYPTIYHLRKKLVDSTDKADLRLIYLALAHMIKFRGHFLIEGDLNPDNSDVDKLFIQLVQTYNQLFEENPINASGVDAKAILSARLSKSRRLENLIAQLPGEKKNGLFGNLIALSLGLTPNFKSNFDLAEDAKLQLSKDTYDDDLDNLLAQIGDQYADLFLAAKNLSDAILLSDILRVNTEITKAPLSASMIKRYDEHHQDLTLLKALVRQQLPEKYKEIFFDQSKNGYAGYIDGGASQEEFYKFIKPILEKMDGTEELLVKLNREDLLRKQRTFDNGSIPHQIHLGELHAILRRQEDFYPFLKDNREKIEKILTFRIPYYVGPLARGNSRFAWMTRKSEETITPWNFEEVVDKGASAQSFIERMTNFDKNLPNEKVLPKHSLLYEYFTVYNELTKVKYVTEGMRKPAFLSGEQKKAIVDLLFKTNRKVTVKQLKEDYFKKIECFDSVEISGVEDRFNASLGTYHDLLKIIKDKDFLDNEENEDILEDIVLTLTLFEDREMIEERLKTYAHLFDDKVMKQLKRRRYTGWGRLSRKLINGIRDKQSGKTILDFLKSDGFANRNFMQLIHDDSLTFKEDIQKAQVSGQGDSLHEHIANLAGSPAIKKGILQTVKVVDELVKVMGRHKPENIVIEMARENQTTQKGQKNSRERMKRIEEGIKELGSQILKEHPVENTQLQNEKLYLYYLQNGRDMYVDQELDINRLSDYDVDHIVPQSFLKDDSIDNKVLTRSDKARGKSDNVPSEEVVKKMKNYWRQLLNAKLITQRKFDNLTKAERGGLSELDKAGFIKRQLVETRQITKHVAQILDSRMNTKYDENDKLIREVKVITLKSKLVSDFRKDFQFYKVREINNYHHAHDAYLNAVVGTALIKKYPKLESEFVYGDYKVYDVRKMIAKSEQEIGKATAKYFFYSNIMNFFKTEITLANGEIRKRPLIETNGETGEIVWDKGRDFATVRKVLSMPQVNIVKKTEVQTGGFSKESILPKRNSDKLIARKKDWDPKKYGGFDSPTVAYSVLVVAKVEKGKSKKLKSVKELLGITIMERSSFEKNPIDFLEAKGYKEVKKDLIIKLPKYSLFELENGRKRMLASAGELQKGNELALPSKYVNFLYLASHYEKLKGSPEDNEQKQLFVEQHKHYLDEIIEQISEFSKRVILADANLDKVLSAYNKHRDKPIREQAENIIHLFTLTNLGAPAAFKYFDTTIDRKRYTSTKEVLDATLIHQSITGLYETRIDLSQLGGDGGEAAAKGGSGGGGGLDDEYRLYSPLVKPDQNIQFWLEQFPQAWAETAGMGLAKQVPPQVIQLKASATPVSVRQYPLSKEAQEGIRPHVQRLIQQGILVPVQSPWNTPLLPVRKPGTNDYRPVQDLREVNKRVQDIHPTVPNPYNLLCALPPQRSWYTVLDLKDAFFCLRLHPTSQPLFAFEWRDPGTGRTGQLTWTRLPQGFKNSPTIFNEALHRDLANFRIQHPQVTLLQYVDDLLLAGATKQDCLEGTKALLLELSDLGYRASAKKAQICRREVTYLGYSLRDGQRWLTEARKKTVVQIPAPTTAKQVREFLGKAGFCRLFIPGFATLAAPLYPLTKPKGEFSWAPEHQKAFDAIKKALLSAPALALPDVTKPFTLYVDERKGVARGVLTQTLGPWRRPVAYLSKKLDPVASGWPVCLKAIAAVAILVKDADKLTLGQNITVIAPHALENIVRQPPDRWMTNARMTHYQSLLLTERVTFAPPAALNPATLLPEETDEPVTHDCHQLLIEETGVRKDLTDIPLTGEVLTWFTDGSSYVVEGKRMAGAAVVDGTRTIWASSLPEGTSAQKAELMALTQALRLAEGKSINIYTDSRYAFATAHVHGAIYKQRGWLTSAGREIKNKEEILSLLEALHLPKRLAIIHCPGHQKAKDPISRGNQMADRVAKQAAQGVNLLPAGKRTADGSEFEKRTADGSEFESPKKKAKVE

SEQ ID NO: 73 - protein, 2086 aa, synthetic construct
MPAAKRVKLDGGDKKYSIGLDIGTNSVGWAVITDEYKVPSKKFKVLGNTDRHSIKKNLIGALLFDSGETAEATRLKRTARRRYTRRKNRICYLQEIFSNEMAKVDDSFFHRLEESFLVEEDKKHERHPIFGNIVDEVAYHEKYPTIYHLRKKLVDSTDKADLRLIYLALAHMIKFRGHFLIEGDLNPDNSDVDKLFIQLVQTYNQLFEENPINASGVDAKAILSARLSKSRRLENLIAQLPGEKKNGLFGNLIALSLGLTPNFKSNFDLAEDAKLQLSKDTYDDDLDNLLAQIGDQYADLFLAAKNLSDAILLSDILRVNTEITKAPLSASMIKRYDEHHQDLTLLKALVRQQLPEKYKEIFFDQSKNGYAGYIDGGASQEEFYKFIKPILEKMDGTEELLVKLNREDLLRKQRTFDNGSIPHQIHLGELHAILRRQEDFYPFLKDNREKIEKILTFRIPYYVGPLARGNSRFAWMTRKSEETITPWNFEEVVDKGASAQSFIERMTNFDKNLPNEKVLPKHSLLYEYFTVYNELTKVKYVTEGMRKPAFLSGEQKKAIVDLLFKTNRKVTVKQLKEDYFKKIECFDSVEISGVEDRFNASLGTYHDLLKIIKDKDFLDNEENEDILEDIVLTLTLFEDREMIEERLKTYAHLFDDKVMKQLKRRRYTGWGRLSRKLINGIRDKQSGKTILDFLKSDGFANRNFMQLIHDDSLTFKEDIQKAQVSGQGDSLHEHIANLAGSPAIKKGILQTVKVVDELVKVMGRHKPENIVIEMARENQTTQKGQKNSRERMKRIEEGIKELGSQILKEHPVENTQLQNEKLYLYYLQNGRDMYVDQELDINRLSDYDVDHIVPQSFLKDDSIDNKVLTRSDKARGKSDNVPSEEVVKKMKNYWRQLLNAKLITQRKFDNLTKAERGGLSELDKAGFIKRQLVETRQITKHVAQILDSRMNTKYDENDKLIREVKVITLKSKLVSDFRKDFQFYKVREINNYHHAHDAYLNAVVGTALIKKYPKLESEFVYGDYKVYDVRKMIAKSEQEIGKATAKYFFYSNIMNFFKTEITLANGEIRKRPLIETNGETGEIVWDKGRDFATVRKVLSMPQVNIVKKTEVQTGGFSKESILPKRNSDKLIARKKDWDPKKYGGFDSPTVAYSVLVVAKVEKGKSKKLKSVKELLGITIMERSSFEKNPIDFLEAKGYKEVKKDLIIKLPKYSLFELENGRKRMLASAGELQKGNELALPSKYVNFLYLASHYEKLKGSPEDNEQKQLFVEQHKHYLDEIIEQISEFSKRVILADANLDKVLSAYNKHRDKPIREQAENIIHLFTLTNLGAPAAFKYFDTTIDRKRYTSTKEVLDATLIHQSITGLYETRIDLSQLGGDGGGSSPAPGGGGGLDDEYRLYSPLVKPDQNIQFWLEQFPQAWAETAGMGLAKQVPPQVIQLKASATPVSVRQYPLSKEAQEGIRPHVQRLIQQGILVPVQSPWNTPLLPVRKPGTNDYRPVQDLREVNKRVQDIHPTVPNPYNLLCALPPQRSWYTVLDLKDAFFCLRLHPTSQPLFAFEWRDPGTGRTGQLTWTRLPQGFKNSPTIFNEALHRDLANFRIQHPQVTLLQYVDDLLLAGATKQDCLEGTKALLLELSDLGYRASAKKAQICRREVTYLGYSLRDGQRWLTEARKKTVVQIPAPTTAKQVREFLGKAGFCRLFIPGFATLAAPLYPLTKPKGEFSWAPEHQKAFDAIKKALLSAPALALPDVTKPFTLYVDERKGVARGVLTQTLGPWRRPVAYLSKKLDPVASGWPVCLKAIAAVAILVKDADKLTLGQNITVIAPHALENIVRQPPDRWMTNARMTHYQSLLLTERVTFAPPAALNPATLLPEETDEPVTHDCHQLLIEETGVRKDLTDIPLTGEVLTWFTDGSSYVVEGKRMAGAAVVDGTRTIWASSLPEGTSAQKAELMALTQALRLAEGKSINIYTDSRYAFATAHVHGAIYKQRGWLTSAGREIKNKEEILSLLEALHLPKRLAIIHCPGHQKAKDPISRGNQMADRVAKQAAQGVNLLPAGKRTADGSEFEKRTADGSEFESPKKKAKVE

SEQ ID NO: 74 - protein, 2089 aa, synthetic construct
MPAAKRVKLDGGDKKYSIGLDIGTNSVGWAVITDEYKVPSKKFKVLGNTDRHSIKKNLIGALLFDSGETAEATRLKRTARRRYTRRKNRICYLQEIFSNEMAKVDDSFFHRLEESFLVEEDKKHERHPIFGNIVDEVAYHEKYPTIYHLRKKLVDSTDKADLRLIYLALAHMIKFRGHFLIEGDLNPDNSDVDKLFIQLVQTYNQLFEENPINASGVDAKAILSARLSKSRRLENLIAQLPGEKKNGLFGNLIALSLGLTPNFKSNFDLAEDAKLQLSKDTYDDDLDNLLAQIGDQYADLFLAAKNLSDAILLSDILRVNTEITKAPLSASMIKRYDEHHQDLTLLKALVRQQLPEKYKEIFFDQSKNGYAGYIDGGASQEEFYKFIKPILEKMDGTEELLVKLNREDLLRKQRTFDNGSIPHQIHLGELHAILRRQEDFYPFLKDNREKIEKILTFRIPYYVGPLARGNSRFAWMTRKSEETITPWNFEEVVDKGASAQSFIERMTNFDKNLPNEKVLPKHSLLYEYFTVYNELTKVKYVTEGMRKPAFLSGEQKKAIVDLLFKTNRKVTVKQLKEDYFKKIECFDSVEISGVEDRFNASLGTYHDLLKIIKDKDFLDNEENEDILEDIVLTLTLFEDREMIEERLKTYAHLFDDKVMKQLKRRRYTGWGRLSRKLINGIRDKQSGKTILDFLKSDGFANRNFMQLIHDDSLTFKEDIQKAQVSGQGDSLHEHIANLAGSPAIKKGILQTVKVVDELVKVMGRHKPENIVIEMARENQTTQKGQKNSRERMKRIEEGIKELGSQILKEHPVENTQLQNEKLYLYYLQNGRDMYVDQELDINRLSDYDVDHIVPQSFLKDDSIDNKVLTRSDKARGKSDNVPSEEVVKKMKNYWRQLLNAKLITQRKFDNLTKAERGGLSELDKAGFIKRQLVETRQITKHVAQILDSRMNTKYDENDKLIREVKVITLKSKLVSDFRKDFQFYKVREINNYHHAHDAYLNAVVGTALIKKYPKLESEFVYGDYKVYDVRKMIAKSEQEIGKATAKYFFYSNIMNFFKTEITLANGEIRKRPLIETNGETGEIVWDKGRDFATVRKVLSMPQVNIVKKTEVQTGGFSKESILPKRNSDKLIARKKDWDPKKYGGFDSPTVAYSVLVVAKVEKGKSKKLKSVKELLGITIMERSSFEKNPIDFLEAKGYKEVKKDLIIKLPKYSLFELENGRKRMLASAGELQKGNELALPSKYVNFLYLASHYEKLKGSPEDNEQKQLFVEQHKHYLDEIIEQISEFSKRVILADANLDKVLSAYNKHRDKPIREQAENIIHLFTLTNLGAPAAFKYFDTTIDRKRYTSTKEVLDATLIHQSITGLYETRIDLSQLGGDGGGSAGSAAGSGEFGGLDDEYRLYSPLVKPDQNIQFWLEQFPQAWAETAGMGLAKQVPPQVIQLKASATPVSVRQYPLSKEAQEGIRPHVQRLIQQGILVPVQSPWNTPLLPVRKPGTNDYRPVQDLREVNKRVQDIHPTVPNPYNLLCALPPQRSWYTVLDLKDAFFCLRLHPTSQPLFAFEWRDPGTGRTGQLTWTRLPQGFKNSPTIFNEALHRDLANFRIQHPQVTLLQYVDDLLLAGATKQDCLEGTKALLLELSDLGYRASAKKAQICRREVTYLGYSLRDGQRWLTEARKKTVVQIPAPTTAKQVREFLGKAGFCRLFIPGFATLAAPLYPLTKPKGEFSWAPEHQKAFDAIKKALLSAPALALPDVTKPFTLYVDERKGVARGVLTQTLGPWRRPVAYLSKKLDPVASGWPVCLKAIAAVAILVKDADKLTLGQNITVIAPHALENIVRQPPDRWMTNARMTHYQSLLLTERVTFAPPAALNPATLLPEETDEPVTHDCHQLLIEETGVRKDLTDIPLTGEVLTWFTDGSSYVVEGKRMAGAAVVDGTRTIWASSLPEGTSAQKAELMALTQALRLAEGKSINIYTDSRYAFATAHVHGAIYKQRGWLTSAGREIKNKEEILSLLEALHLPKRLAIIHCPGHQKAKDPISRGNQMADRVAKQAAQGVNLLPAGKRTADGSEFEKRTADGSEFESPKKKAKVE

SEQ ID NO: 75 - protein, 2092 aa, synthetic construct
MPAAKRVKLDGGDKKYSIGLDIGTNSVGWAVITDEYKVPSKKFKVLGNTDRHSIKKNLIGALLFDSGETAEATRLKRTARRRYTRRKNRICYLQEIFSNEMAKVDDSFFHRLEESFLVEEDKKHERHPIFGNIVDEVAYHEKYPTIYHLRKKLVDSTDKADLRLIYLALAHMIKFRGHFLIEGDLNPDNSDVDKLFIQLVQTYNQLFEENPINASGVDAKAILSARLSKSRRLENLIAQLPGEKKNGLFGNLIALSLGLTPNFKSNFDLAEDAKLQLSKDTYDDDLDNLLAQIGDQYADLFLAAKNLSDAILLSDILRVNTEITKAPLSASMIKRYDEHHQDLTLLKALVRQQLPEKYKEIFFDQSKNGYAGYIDGGASQEEFYKFIKPILEKMDGTEELLVKLNREDLLRKQRTFDNGSIPHQIHLGELHAILRRQEDFYPFLKDNREKIEKILTFRIPYYVGPLARGNSRFAWMTRKSEETITPWNFEEVVDKGASAQSFIERMTNFDKNLPNEKVLPKHSLLYEYFTVYNELTKVKYVTEGMRKPAFLSGEQKKAIVDLLFKTNRKVTVKQLKEDYFKKIECFDSVEISGVEDRFNASLGTYHDLLKIIKDKDFLDNEENEDILEDIVLTLTLFEDREMIEERLKTYAHLFDDKVMKQLKRRRYTGWGRLSRKLINGIRDKQSGKTILDFLKSDGFANRNFMQLIHDDSLTFKEDIQKAQVSGQGDSLHEHIANLAGSPAIKKGILQTVKVVDELVKVMGRHKPENIVIEMARENQTTQKGQKNSRERMKRIEEGIKELGSQILKEHPVENTQLQNEKLYLYYLQNGRDMYVDQELDINRLSDYDVDHIVPQSFLKDDSIDNKVLTRSDKARGKSDNVPSEEVVKKMKNYWRQLLNAKLITQRKFDNLTKAERGGLSELDKAGFIKRQLVETRQITKHVAQILDSRMNTKYDENDKLIREVKVITLKSKLVSDFRKDFQFYKVREINNYHHAHDAYLNAVVGTALIKKYPKLESEFVYGDYKVYDVRKMIAKSEQEIGKATAKYFFYSNIMNFFKTEITLANGEIRKRPLIETNGETGEIVWDKGRDFATVRKVLSMPQVNIVKKTEVQTGGFSKESILPKRNSDKLIARKKDWDPKKYGGFDSPTVAYSVLVVAKVEKGKSKKLKSVKELLGITIMERSSFEKNPIDFLEAKGYKEVKKDLIIKLPKYSLFELENGRKRMLASAGELQKGNELALPSKYVNFLYLASHYEKLKGSPEDNEQKQLFVEQHKHYLDEIIEQISEFSKRVILADANLDKVLSAYNKHRDKPIREQAENIIHLFTLTNLGAPAAFKYFDTTIDRKRYTSTKEVLDATLIHQSITGLYETRIDLSQLGGDGGGGGGSEAAAKGGGGSGGLDDEYRLYSPLVKPDQNIQFWLEQFPQAWAETAGMGLAKQVPPQVIQLKASATPVSVRQYPLSKEAQEGIRPHVQRLIQQGILVPVQSPWNTPLLPVRKPGTNDYRPVQDLREVNKRVQDIHPTVPNPYNLLCALPPQRSWYTVLDLKDAFFCLRLHPTSQPLFAFEWRDPGTGRTGQLTWTRLPQGFKNSPTIFNEALHRDLANFRIQHPQVTLLQYVDDLLLAGATKQDCLEGTKALLLELSDLGYRASAKKAQICRREVTYLGYSLRDGQRWLTEARKKTVVQIPAPTTAKQVREFLGKAGFCRLFIPGFATLAAPLYPLTKPKGEFSWAPEHQKAFDAIKKALLSAPALALPDVTKPFTLYVDERKGVARGVLTQTLGPWRRPVAYLSKKLDPVASGWPVCLKAIAAVAILVKDADKLTLGQNITVIAPHALENIVRQPPDRWMTNARMTHYQSLLLTERVTFAPPAALNPATLLPEETDEPVTHDCHQLLIEETGVRKDLTDIPLTGEVLTWFTDGSSYVVEGKRMAGAAVVDGTRTIWASSLPEGTSAQKAELMALTQALRLAEGKSINIYTDSRYAFATAHVHGAIYKQRGWLTSAGREIKNKEEILSLLEALHLPKRLAIIHCPGHQKAKDPISRGNQMADRVAKQAAQGVNLLPAGKRTADGSEFEKRTADGSEFESPKKKAKVE

SEQ ID NO: 76 - protein, 2083 aa, synthetic construct
MPAAKRVKLDGGDKKYSIGLDIGTNSVGWAVITDEYKVPSKKFKVLGNTDRHSIKKNLIGALLFDSGETAEATRLKRTARRRYTRRKNRICYLQEIFSNEMAKVDDSFFHRLEESFLVEEDKKHERHPIFGNIVDEVAYHEKYPTIYHLRKKLVDSTDKADLRLIYLALAHMIKFRGHFLIEGDLNPDNSDVDKLFIQLVQTYNQLFEENPINASGVDAKAILSARLSKSRRLENLIAQLPGEKKNGLFGNLIALSLGLTPNFKSNFDLAEDAKLQLSKDTYDDDLDNLLAQIGDQYADLFLAAKNLSDAILLSDILRVNTEITKAPLSASMIKRYDEHHQDLTLLKALVRQQLPEKYKEIFFDQSKNGYAGYIDGGASQEEFYKFIKPILEKMDGTEELLVKLNREDLLRKQRTFDNGSIPHQIHLGELHAILRRQEDFYPFLKDNREKIEKILTFRIPYYVGPLARGNSRFAWMTRKSEETITPWNFEEVVDKGASAQSFIERMTNFDKNLPNEKVLPKHSLLYEYFTVYNELTKVKYVTEGMRKPAFLSGEQKKAIVDLLFKTNRKVTVKQLKEDYFKKIECFDSVEISGVEDRFNASLGTYHDLLKIIKDKDFLDNEENEDILEDIVLTLTLFEDREMIEERLKTYAHLFDDKVMKQLKRRRYTGWGRLSRKLINGIRDKQSGKTILDFLKSDGFANRNFMQLIHDDSLTFKEDIQKAQVSGQGDSLHEHIANLAGSPAIKKGILQTVKVVDELVKVMGRHKPENIVIEMARENQTTQKGQKNSRERMKRIEEGIKELGSQILKEHPVENTQLQNEKLYLYYLQNGRDMYVDQELDINRLSDYDVDHIVPQSFLKDDSIDNKVLTRSDKARGKSDNVPSEEVVKKMKNYWRQLLNAKLITQRKFDNLTKAERGGLSELDKAGFIKRQLVETRQITKHVAQILDSRMNTKYDENDKLIREVKVITLKSKLVSDFRKDFQFYKVREINNYHHAHDAYLNAVVGTALIKKYPKLESEFVYGDYKVYDVRKMIAKSEQEIGKATAKYFFYSNIMNFFKTEITLANGEIRKRPLIETNGETGEIVWDKGRDFATVRKVLSMPQVNIVKKTEVQTGGFSKESILPKRNSDKLIARKKDWDPKKYGGFDSPTVAYSVLVVAKVEKGKSKKLKSVKELLGITIMERSSFEKNPIDFLEAKGYKEVKKDLIIKLPKYSLFELENGRKRMLASAGELQKGNELALPSKYVNFLYLASHYEKLKGSPEDNEQKQLFVEQHKHYLDEIIEQISEFSKRVILADANLDKVLSAYNKHRDKPIREQAENIIHLFTLTNLGAPAAFKYFDTTIDRKRYTSTKEVLDATLIHQSITGLYETRIDLSQLGGDGGGGGPAPGGLDDEYRLYSPLVKPDQNIQFWLEQFPQAWAETAGMGLAKQVPPQVIQLKASATPVSVRQYPLSKEAQEGIRPHVQRLIQQGILVPVQSPWNTPLLPVRKPGTNDYRPVQDLREVNKRVQDIHPTVPNPYNLLCALPPQRSWYTVLDLKDAFFCLRLHPTSQPLFAFEWRDPGTGRTGQLTWTRLPQGFKNSPTIFNEALHRDLANFRIQHPQVTLLQYVDDLLLAGATKQDCLEGTKALLLELSDLGYRASAKKAQICRREVTYLGYSLRDGQRWLTEARKKTVVQIPAPTTAKQVREFLGKAGFCRLFIPGFATLAAPLYPLTKPKGEFSWAPEHQKAFDAIKKALLSAPALALPDVTKPFTLYVDERKGVARGVLTQTLGPWRRPVAYLSKKLDPVASGWPVCLKAIAAVAILVKDADKLTLGQNITVIAPHALENIVRQPPDRWMTNARMTHYQSLLLTERVTFAPPAALNPATLLPEETDEPVTHDCHQLLIEETGVRKDLTDIPLTGEVLTWFTDGSSYVVEGKRMAGAAVVDGTRTIWASSLPEGTSAQKAELMALTQALRLAEGKSINIYTDSRYAFATAHVHGAIYKQRGWLTSAGREIKNKEEILSLLEALHLPKRLAIIHCPGHQKAKDPISRGNQMADRVAKQAAQGVNLLPAGKRTADGSEFEKRTADGSEFESPKKKAKVE

SEQ ID NO: 77 - protein, 2084 aa, synthetic construct
MPAAKRVKLDGGDKKYSIGLDIGTNSVGWAVITDEYKVPSKKFKVLGNTDRHSIKKNLIGALLFDSGETAEATRLKRTARRRYTRRKNRICYLQEIFSNEMAKVDDSFFHRLEESFLVEEDKKHERHPIFGNIVDEVAYHEKYPTIYHLRKKLVDSTDKADLRLIYLALAHMIKFRGHFLIEGDLNPDNSDVDKLFIQLVQTYNQLFEENPINASGVDAKAILSARLSKSRRLENLIAQLPGEKKNGLFGNLIALSLGLTPNFKSNFDLAEDAKLQLSKDTYDDDLDNLLAQIGDQYADLFLAAKNLSDAILLSDILRVNTEITKAPLSASMIKRYDEHHQDLTLLKALVRQQLPEKYKEIFFDQSKNGYAGYIDGGASQEEFYKFIKPILEKMDGTEELLVKLNREDLLRKQRTFDNGSIPHQIHLGELHAILRRQEDFYPFLKDNREKIEKILTFRIPYYVGPLARGNSRFAWMTRKSEETITPWNFEEVVDKGASAQSFIERMTNFDKNLPNEKVLPKHSLLYEYFTVYNELTKVKYVTEGMRKPAFLSGEQKKAIVDLLFKTNRKVTVKQLKEDYFKKIECFDSVEISGVEDRFNASLGTYHDLLKIIKDKDFLDNEENEDILEDIVLTLTLFEDREMIEERLKTYAHLFDDKVMKQLKRRRYTGWGRLSRKLINGIRDKQSGKTILDFLKSDGFANRNFMQLIHDDSLTFKEDIQKAQVSGQGDSLHEHIANLAGSPAIKKGILQTVKVVDELVKVMGRHKPENIVIEMARENQTTQKGQKNSRERMKRIEEGIKELGSQILKEHPVENTQLQNEKLYLYYLQNGRDMYVDQELDINRLSDYDVDHIVPQSFLKDDSIDNKVLTRSDKARGKSDNVPSEEVVKKMKNYWRQLLNAKLITQRKFDNLTKAERGGLSELDKAGFIKRQLVETRQITKHVAQILDSRMNTKYDENDKLIREVKVITLKSKLVSDFRKDFQFYKVREINNYHHAHDAYLNAVVGTALIKKYPKLESEFVYGDYKVYDVRKMIAKSEQEIGKATAKYFFYSNIMNFFKTEITLANGEIRKRPLIETNGETGEIVWDKGRDFATVRKVLSMPQVNIVKKTEVQTGGFSKESILPKRNSDKLIARKKDWDPKKYGGFDSPTVAYSVLVVAKVEKGKSKKLKSVKELLGITIMERSSFEKNPIDFLEAKGYKEVKKDLIIKLPKYSLFELENGRKRMLASAGELQKGNELALPSKYVNFLYLASHYEKLKGSPEDNEQKQLFVEQHKHYLDEIIEQISEFSKRVILADANLDKVLSAYNKHRDKPIREQAENIIHLFTLTNLGAPAAFKYFDTTIDRKRYTSTKEVLDATLIHQSITGLYETRIDLSQLGGDGGGGGGGGGGGLDDEYRLYSPLVKPDQNIQFWLEQFPQAWAETAGMGLAKQVPPQVIQLKASATPVSVRQYPLSKEAQEGIRPHVQRLIQQGILVPVQSPWNTPLLPVRKPGTNDYRPVQDLREVNKRVQDIHPTVPNPYNLLCALPPQRSWYTVLDLKDAFFCLRLHPTSQPLFAFEWRDPGTGRTGQLTWTRLPQGFKNSPTIFNEALHRDLANFRIQHPQVTLLQYVDDLLLAGATKQDCLEGTKALLLELSDLGYRASAKKAQICRREVTYLGYSLRDGQRWLTEARKKTVVQIPAPTTAKQVREFLGKAGFCRLFIPGFATLAAPLYPLTKPKGEFSWAPEHQKAFDAIKKALLSAPALALPDVTKPFTLYVDERKGVARGVLTQTLGPWRRPVAYLSKKLDPVASGWPVCLKAIAAVAILVKDADKLTLGQNITVIAPHALENIVRQPPDRWMTNARMTHYQSLLLTERVTFAPPAALNPATLLPEETDEPVTHDCHQLLIEETGVRKDLTDIPLTGEVLTWFTDGSSYVVEGKRMAGAAVVDGTRTIWASSLPEGTSAQKAELMALTQALRLAEGKSINIYTDSRYAFATAHVHGAIYKQRGWLTSAGREIKNKEEILSLLEALHLPKRLAIIHCPGHQKAKDPISRGNQMADRVAKQAAQGVNLLPAGKRTADGSEFEKRTADGSEFESPKKKAKVE

SEQ ID NO: 78 - protein, 2083 aa, synthetic construct
MPAAKRVKLDGGDKKYSIGLDIGTNSVGWAVITDEYKVPSKKFKVLGNTDRHSIKKNLIGALLFDSGETAEATRLKRTARRRYTRRKNRICYLQEIFSNEMAKVDDSFFHRLEESFLVEEDKKHERHPIFGNIVDEVAYHEKYPTIYHLRKKLVDSTDKADLRLIYLALAHMIKFRGHFLIEGDLNPDNSDVDKLFIQLVQTYNQLFEENPINASGVDAKAILSARLSKSRRLENLIAQLPGEKKNGLFGNLIALSLGLTPNFKSNFDLAEDAKLQLSKDTYDDDLDNLLAQIGDQYADLFLAAKNLSDAILLSDILRVNTEITKAPLSASMIKRYDEHHQDLTLLKALVRQQLPEKYKEIFFDQSKNGYAGYIDGGASQEEFYKFIKPILEKMDGTEELLVKLNREDLLRKQRTFDNGSIPHQIHLGELHAILRRQEDFYPFLKDNREKIEKILTFRIPYYVGPLARGNSRFAWMTRKSEETITPWNFEEVVDKGASAQSFIERMTNFDKNLPNEKVLPKHSLLYEYFTVYNELTKVKYVTEGMRKPAFLSGEQKKAIVDLLFKTNRKVTVKQLKEDYFKKIECFDSVEISGVEDRFNASLGTYHDLLKIIKDKDFLDNEENEDILEDIVLTLTLFEDREMIEERLKTYAHLFDDKVMKQLKRRRYTGWGRLSRKLINGIRDKQSGKTILDFLKSDGFANRNFMQLIHDDSLTFKEDIQKAQVSGQGDSLHEHIANLAGSPAIKKGILQTVKVVDELVKVMGRHKPENIVIEMARENQTTQKGQKNSRERMKRIEEGIKELGSQILKEHPVENTQLQNEKLYLYYLQNGRDMYVDQELDINRLSDYDVDHIVPQSFLKDDSIDNKVLTRSDKARGKSDNVPSEEVVKKMKNYWRQLLNAKLITQRKFDNLTKAERGGLSELDKAGFIKRQLVETRQITKHVAQILDSRMNTKYDENDKLIREVKVITLKSKLVSDFRKDFQFYKVREINNYHHAHDAYLNAVVGTALIKKYPKLESEFVYGDYKVYDVRKMIAKSEQEIGKATAKYFFYSNIMNFFKTEITLANGEIRKRPLIETNGETGEIVWDKGRDFATVRKVLSMPQVNIVKKTEVQTGGFSKESILPKRNSDKLIARKKDWDPKKYGGFDSPTVAYSVLVVAKVEKGKSKKLKSVKELLGITIMERSSFEKNPIDFLEAKGYKEVKKDLIIKLPKYSLFELENGRKRMLASAGELQKGNELALPSKYVNFLYLASHYEKLKGSPEDNEQKQLFVEQHKHYLDEIIEQISEFSKRVILADANLDKVLSAYNKHRDKPIREQAENIIHLFTLTNLGAPAAFKYFDTTIDRKRYTSTKEVLDATLIHQSITGLYETRIDLSQLGGDGGGGSPAPGGLDDEYRLYSPLVKPDQNIQFWLEQFPQAWAETAGMGLAKQVPPQVIQLKASATPVSVRQYPLSKEAQEGIRPHVQRLIQQGILVPVQSPWNTPLLPVRKPGTNDYRPVQDLREVNKRVQDIHPTVPNPYNLLCALPPQRSWYTVLDLKDAFFCLRLHPTSQPLFAFEWRDPGTGRTGQLTWTRLPQGFKNSPTIFNEALHRDLANFRIQHPQVTLLQYVDDLLLAGATKQDCLEGTKALLLELSDLGYRASAKKAQICRREVTYLGYSLRDGQRWLTEARKKTVVQIPAPTTAKQVREFLGKAGFCRLFIPGFATLAAPLYPLTKPKGEFSWAPEHQKAFDAIKKALLSAPALALPDVTKPFTLYVDERKGVARGVLTQTLGPWRRPVAYLSKKLDPVASGWPVCLKAIAAVAILVKDADKLTLGQNITVIAPHALENIVRQPPDRWMTNARMTHYQSLLLTERVTFAPPAALNPATLLPEETDEPVTHDCHQLLIEETGVRKDLTDIPLTGEVLTWFTDGSSYVVEGKRMAGAAVVDGTRTIWASSLPEGTSAQKAELMALTQALRLAEGKSINIYTDSRYAFATAHVHGAIYKQRGWLTSAGREIKNKEEILSLLEALHLPKRLAIIHCPGHQKAKDPISRGNQMADRVAKQAAQGVNLLPAGKRTADGSEFEKRTADGSEFESPKKKAKVE

SEQ ID NO: 79 - protein, 2083 aa, synthetic construct
MPAAKRVKLDGGDKKYSIGLDIGTNSVGWAVITDEYKVPSKKFKVLGNTDRHSIKKNLIGALLFDSGETAEATRLKRTARRRYTRRKNRICYLQEIFSNEMAKVDDSFFHRLEESFLVEEDKKHERHPIFGNIVDEVAYHEKYPTIYHLRKKLVDSTDKADLRLIYLALAHMIKFRGHFLIEGDLNPDNSDVDKLFIQLVQTYNQLFEENPINASGVDAKAILSARLSKSRRLENLIAQLPGEKKNGLFGNLIALSLGLTPNFKSNFDLAEDAKLQLSKDTYDDDLDNLLAQIGDQYADLFLAAKNLSDAILLSDILRVNTEITKAPLSASMIKRYDEHHQDLTLLKALVRQQLPEKYKEIFFDQSKNGYAGYIDGGASQEEFYKFIKPILEKMDGTEELLVKLNREDLLRKQRTFDNGSIPHQIHLGELHAILRRQEDFYPFLKDNREKIEKILTFRIPYYVGPLARGNSRFAWMTRKSEETITPWNFEEVVDKGASAQSFIERMTNFDKNLPNEKVLPKHSLLYEYFTVYNELTKVKYVTEGMRKPAFLSGEQKKAIVDLLFKTNRKVTVKQLKEDYFKKIECFDSVEISGVEDRFNASLGTYHDLLKIIKDKDFLDNEENEDILEDIVLTLTLFEDREMIEERLKTYAHLFDDKVMKQLKRRRYTGWGRLSRKLINGIRDKQSGKTILDFLKSDGFANRNFMQLIHDDSLTFKEDIQKAQVSGQGDSLHEHIANLAGSPAIKKGILQTVKVVDELVKVMGRHKPENIVIEMARENQTTQKGQKNSRERMKRIEEGIKELGSQILKEHPVENTQLQNEKLYLYYLQNGRDMYVDQELDINRLSDYDVDHIVPQSFLKDDSIDNKVLTRSDKARGKSDNVPSEEVVKKMKNYWRQLLNAKLITQRKFDNLTKAERGGLSELDKAGFIKRQLVETRQITKHVAQILDSRMNTKYDENDKLIREVKVITLKSKLVSDFRKDFQFYKVREINNYHHAHDAYLNAVVGTALIKKYPKLESEFVYGDYKVYDVRKMIAKSEQEIGKATAKYFFYSNIMNFFKTEITLANGEIRKRPLIETNGETGEIVWDKGRDFATVRKVLSMPQVNIVKKTEVQTGGFSKESILPKRNSDKLIARKKDWDPKKYGGFDSPTVAYSVLVVAKVEKGKSKKLKSVKELLGITIMERSSFEKNPIDFLEAKGYKEVKKDLIIKLPKYSLFELENGRKRMLASAGELQKGNELALPSKYVNFLYLASHYEKLKGSPEDNEQKQLFVEQHKHYLDEIIEQISEFSKRVILADANLDKVLSAYNKHRDKPIREQAENIIHLFTLTNLGAPAAFKYFDTTIDRKRYTSTKEVLDATLIHQSITGLYETRIDLSQLGGDGGPAPGGGGGLDDEYRLYSPLVKPDQNIQFWLEQFPQAWAETAGMGLAKQVPPQVIQLKASATPVSVRQYPLSKEAQEGIRPHVQRLIQQGILVPVQSPWNTPLLPVRKPGTNDYRPVQDLREVNKRVQDIHPTVPNPYNLLCALPPQRSWYTVLDLKDAFFCLRLHPTSQPLFAFEWRDPGTGRTGQLTWTRLPQGFKNSPTIFNEALHRDLANFRIQHPQVTLLQYVDDLLLAGATKQDCLEGTKALLLELSDLGYRASAKKAQICRREVTYLGYSLRDGQRWLTEARKKTVVQIPAPTTAKQVREFLGKAGFCRLFIPGFATLAAPLYPLTKPKGEFSWAPEHQKAFDAIKKALLSAPALALPDVTKPFTLYVDERKGVARGVLTQTLGPWRRPVAYLSKKLDPVASGWPVCLKAIAAVAILVKDADKLTLGQNITVIAPHALENIVRQPPDRWMTNARMTHYQSLLLTERVTFAPPAALNPATLLPEETDEPVTHDCHQLLIEETGVRKDLTDIPLTGEVLTWFTDGSSYVVEGKRMAGAAVVDGTRTIWASSLPEGTSAQKAELMALTQALRLAEGKSINIYTDSRYAFATAHVHGAIYKQRGWLTSAGREIKNKEEILSLLEALHLPKRLAIIHCPGHQKAKDPISRGNQMADRVAKQAAQGVNLLPAGKRTADGSEFEKRTADGSEFESPKKKAKVE

SEQ ID NO: 80 - protein, 2088 aa, synthetic construct
MPAAKRVKLDGGDKKYSIGLDIGTNSVGWAVITDEYKVPSKKFKVLGNTDRHSIKKNLIGALLFDSGETAEATRLKRTARRRYTRRKNRICYLQEIFSNEMAKVDDSFFHRLEESFLVEEDKKHERHPIFGNIVDEVAYHEKYPTIYHLRKKLVDSTDKADLRLIYLALAHMIKFRGHFLIEGDLNPDNSDVDKLFIQLVQTYNQLFEENPINASGVDAKAILSARLSKSRRLENLIAQLPGEKKNGLFGNLIALSLGLTPNFKSNFDLAEDAKLQLSKDTYDDDLDNLLAQIGDQYADLFLAAKNLSDAILLSDILRVNTEITKAPLSASMIKRYDEHHQDLTLLKALVRQQLPEKYKEIFFDQSKNGYAGYIDGGASQEEFYKFIKPILEKMDGTEELLVKLNREDLLRKQRTFDNGSIPHQIHLGELHAILRRQEDFYPFLKDNREKIEKILTFRIPYYVGPLARGNSRFAWMTRKSEETITPWNFEEVVDKGASAQSFIERMTNFDKNLPNEKVLPKHSLLYEYFTVYNELTKVKYVTEGMRKPAFLSGEQKKAIVDLLFKTNRKVTVKQLKEDYFKKIECFDSVEISGVEDRFNASLGTYHDLLKIIKDKDFLDNEENEDILEDIVLTLTLFEDREMIEERLKTYAHLFDDKVMKQLKRRRYTGWGRLSRKLINGIRDKQSGKTILDFLKSDGFANRNFMQLIHDDSLTFKEDIQKAQVSGQGDSLHEHIANLAGSPAIKKGILQTVKVVDELVKVMGRHKPENIVIEMARENQTTQKGQKNSRERMKRIEEGIKELGSQILKEHPVENTQLQNEKLYLYYLQNGRDMYVDQELDINRLSDYDVDHIVPQSFLKDDSIDNKVLTRSDKARGKSDNVPSEEVVKKMKNYWRQLLNAKLITQRKFDNLTKAERGGLSELDKAGFIKRQLVETRQITKHVAQILDSRMNTKYDENDKLIREVKVITLKSKLVSDFRKDFQFYKVREINNYHHAHDAYLNAVVGTALIKKYPKLESEFVYGDYKVYDVRKMIAKSEQEIGKATAKYFFYSNIMNFFKTEITLANGEIRKRPLIETNGETGEIVWDKGRDFATVRKVLSMPQVNIVKKTEVQTGGFSKESILPKRNSDKLIARKKDWDPKKYGGFDSPTVAYSVLVVAKVEKGKSKKLKSVKELLGITIMERSSFEKNPIDFLEAKGYKEVKKDLIIKLPKYSLFELENGRKRMLASAGELQKGNELALPSKYVNFLYLASHYEKLKGSPEDNEQKQLFVEQHKHYLDEIIEQISEFSKRVILADANLDKVLSAYNKHRDKPIREQAENIIHLFTLTNLGAPAAFKYFDTTIDRKRYTSTKEVLDATLIHQSITGLYETRIDLSQLGGDGGGGSGSSEAAAKGGLDDEYRLYSPLVKPDQNIQFWLEQFPQAWAETAGMGLAKQVPPQVIQLKASATPVSVRQYPLSKEAQEGIRPHVQRLIQQGILVPVQSPWNTPLLPVRKPGTNDYRPVQDLREVNKRVQDIHPTVPNPYNLLCALPPQRSWYTVLDLKDAFFCLRLHPTSQPLFAFEWRDPGTGRTGQLTWTRLPQGFKNSPTIFNEALHRDLANFRIQHPQVTLLQYVDDLLLAGATKQDCLEGTKALLLELSDLGYRASAKKAQICRREVTYLGYSLRDGQRWLTEARKKTVVQIPAPTTAKQVREFLGKAGFCRLFIPGFATLAAPLYPLTKPKGEFSWAPEHQKAFDAIKKALLSAPALALPDVTKPFTLYVDERKGVARGVLTQTLGPWRRPVAYLSKKLDPVASGWPVCLKAIAAVAILVKDADKLTLGQNITVIAPHALENIVRQPPDRWMTNARMTHYQSLLLTERVTFAPPAALNPATLLPEETDEPVTHDCHQLLIEETGVRKDLTDIPLTGEVLTWFTDGSSYVVEGKRMAGAAVVDGTRTIWASSLPEGTSAQKAELMALTQALRLAEGKSINIYTDSRYAFATAHVHGAIYKQRGWLTSAGREIKNKEEILSLLEALHLPKRLAIIHCPGHQKAKDPISRGNQMADRVAKQAAQGVNLLPAGKRTADGSEFEKRTADGSEFESPKKKAKVE

SEQ ID NO: 81 - protein, 2083 aa, synthetic construct
MPAAKRVKLDGGDKKYSIGLDIGTNSVGWAVITDEYKVPSKKFKVLGNTDRHSIKKNLIGALLFDSGETAEATRLKRTARRRYTRRKNRICYLQEIFSNEMAKVDDSFFHRLEESFLVEEDKKHERHPIFGNIVDEVAYHEKYPTIYHLRKKLVDSTDKADLRLIYLALAHMIKFRGHFLIEGDLNPDNSDVDKLFIQLVQTYNQLFEENPINASGVDAKAILSARLSKSRRLENLIAQLPGEKKNGLFGNLIALSLGLTPNFKSNFDLAEDAKLQLSKDTYDDDLDNLLAQIGDQYADLFLAAKNLSDAILLSDILRVNTEITKAPLSASMIKRYDEHHQDLTLLKALVRQQLPEKYKEIFFDQSKNGYAGYIDGGASQEEFYKFIKPILEKMDGTEELLVKLNREDLLRKQRTFDNGSIPHQIHLGELHAILRRQEDFYPFLKDNREKIEKILTFRIPYYVGPLARGNSRFAWMTRKSEETITPWNFEEVVDKGASAQSFIERMTNFDKNLPNEKVLPKHSLLYEYFTVYNELTKVKYVTEGMRKPAFLSGEQKKAIVDLLFKTNRKVTVKQLKEDYFKKIECFDSVEISGVEDRFNASLGTYHDLLKIIKDKDFLDNEENEDILEDIVLTLTLFEDREMIEERLKTYAHLFDDKVMKQLKRRRYTGWGRLSRKLINGIRDKQSGKTILDFLKSDGFANRNFMQLIHDDSLTFKEDIQKAQVSGQGDSLHEHIANLAGSPAIKKGILQTVKVVDELVKVMGRHKPENIVIEMARENQTTQKGQKNSRERMKRIEEGIKELGSQILKEHPVENTQLQNEKLYLYYLQNGRDMYVDQELDINRLSDYDVDHIVPQSFLKDDSIDNKVLTRSDKARGKSDNVPSEEVVKKMKNYWRQLLNAKLITQRKFDNLTKAERGGLSELDKAGFIKRQLVETRQITKHVAQILDSRMNTKYDENDKLIREVKVITLKSKLVSDFRKDFQFYKVREINNYHHAHDAYLNAVVGTALIKKYPKLESEFVYGDYKVYDVRKMIAKSEQEIGKATAKYFFYSNIMNFFKTEITLANGEIRKRPLIETNGETGEIVWDKGRDFATVRKVLSMPQVNIVKKTEVQTGGFSKESILPKRNSDKLIARKKDWDPKKYGGFDSPTVAYSVLVVAKVEKGKSKKLKSVKELLGITIMERSSFEKNPIDFLEAKGYKEVKKDLIIKLPKYSLFELENGRKRMLASAGELQKGNELALPSKYVNFLYLASHYEKLKGSPEDNEQKQLFVEQHKHYLDEIIEQISEFSKRVILADANLDKVLSAYNKHRDKPIREQAENIIHLFTLTNLGAPAAFKYFDTTIDRKRYTSTKEVLDATLIHQSITGLYETRIDLSQLGGDGGGSSGGGGGLDDEYRLYSPLVKPDQNIQFWLEQFPQAWAETAGMGLAKQVPPQVIQLKASATPVSVRQYPLSKEAQEGIRPHVQRLIQQGILVPVQSPWNTPLLPVRKPGTNDYRPVQDLREVNKRVQDIHPTVPNPYNLLCALPPQRSWYTVLDLKDAFFCLRLHPTSQPLFAFEWRDPGTGRTGQLTWTRLPQGFKNSPTIFNEALHRDLANFRIQHPQVTLLQYVDDLLLAGATKQDCLEGTKALLLELSDLGYRASAKKAQICRREVTYLGYSLRDGQRWLTEARKKTVVQIPAPTTAKQVREFLGKAGFCRLFIPGFATLAAPLYPLTKPKGEFSWAPEHQKAFDAIKKALLSAPALALPDVTKPFTLYVDERKGVARGVLTQTLGPWRRPVAYLSKKLDPVASGWPVCLKAIAAVAILVKDADKLTLGQNITVIAPHALENIVRQPPDRWMTNARMTHYQSLLLTERVTFAPPAALNPATLLPEETDEPVTHDCHQLLIEETGVRKDLTDIPLTGEVLTWFTDGSSYVVEGKRMAGAAVVDGTRTIWASSLPEGTSAQKAELMALTQALRLAEGKSINIYTDSRYAFATAHVHGAIYKQRGWLTSAGREIKNKEEILSLLEALHLPKRLAIIHCPGHQKAKDPISRGNQMADRVAKQAAQGVNLLPAGKRTADGSEFEKRTADGSEFESPKKKAKVE

SEQ ID NO: 82 - protein, 2086 aa, synthetic construct
MPAAKRVKLDGGDKKYSIGLDIGTNSVGWAVITDEYKVPSKKFKVLGNTDRHSIKKNLIGALLFDSGETAEATRLKRTARRRYTRRKNRICYLQEIFSNEMAKVDDSFFHRLEESFLVEEDKKHERHPIFGNIVDEVAYHEKYPTIYHLRKKLVDSTDKADLRLIYLALAHMIKFRGHFLIEGDLNPDNSDVDKLFIQLVQTYNQLFEENPINASGVDAKAILSARLSKSRRLENLIAQLPGEKKNGLFGNLIALSLGLTPNFKSNFDLAEDAKLQLSKDTYDDDLDNLLAQIGDQYADLFLAAKNLSDAILLSDILRVNTEITKAPLSASMIKRYDEHHQDLTLLKALVRQQLPEKYKEIFFDQSKNGYAGYIDGGASQEEFYKFIKPILEKMDGTEELLVKLNREDLLRKQRTFDNGSIPHQIHLGELHAILRRQEDFYPFLKDNREKIEKILTFRIPYYVGPLARGNSRFAWMTRKSEETITPWNFEEVVDKGASAQSFIERMTNFDKNLPNEKVLPKHSLLYEYFTVYNELTKVKYVTEGMRKPAFLSGEQKKAIVDLLFKTNRKVTVKQLKEDYFKKIECFDSVEISGVEDRFNASLGTYHDLLKIIKDKDFLDNEENEDILEDIVLTLTLFEDREMIEERLKTYAHLFDDKVMKQLKRRRYTGWGRLSRKLINGIRDKQSGKTILDFLKSDGFANRNFMQLIHDDSLTFKEDIQKAQVSGQGDSLHEHIANLAGSPAIKKGILQTVKVVDELVKVMGRHKPENIVIEMARENQTTQKGQKNSRERMKRIEEGIKELGSQILKEHPVENTQLQNEKLYLYYLQNGRDMYVDQELDINRLSDYDVDHIVPQSFLKDDSIDNKVLTRSDKARGKSDNVPSEEVVKKMKNYWRQLLNAKLITQRKFDNLTKAERGGLSELDKAGFIKRQLVETRQITKHVAQILDSRMNTKYDENDKLIREVKVITLKSKLVSDFRKDFQFYKVREINNYHHAHDAYLNAVVGTALIKKYPKLESEFVYGDYKVYDVRKMIAKSEQEIGKATAKYFFYSNIMNFFKTEITLANGEIRKRPLIETNGETGEIVWDKGRDFATVRKVLSMPQVNIVKKTEVQTGGFSKESILPKRNSDKLIARKKDWDPKKYGGFDSPTVAYSVLVVAKVEKGKSKKLKSVKELLGITIMERSSFEKNPIDFLEAKGYKEVKKDLIIKLPKYSLFELENGRKRMLASAGELQKGNELALPSKYVNFLYLASHYEKLKGSPEDNEQKQLFVEQHKHYLDEIIEQISEFSKRVILADANLDKVLSAYNKHRDKPIREQAENIIHLFTLTNLGAPAAFKYFDTTIDRKRYTSTKEVLDATLIHQSITGLYETRIDLSQLGGDGGPAPGSSGGSGGLDDEYRLYSPLVKPDQNIQFWLEQFPQAWAETAGMGLAKQVPPQVIQLKASATPVSVRQYPLSKEAQEGIRPHVQRLIQQGILVPVQSPWNTPLLPVRKPGTNDYRPVQDLREVNKRVQDIHPTVPNPYNLLCALPPQRSWYTVLDLKDAFFCLRLHPTSQPLFAFEWRDPGTGRTGQLTWTRLPQGFKNSPTIFNEALHRDLANFRIQHPQVTLLQYVDDLLLAGATKQDCLEGTKALLLELSDLGYRASAKKAQICRREVTYLGYSLRDGQRWLTEARKKTVVQIPAPTTAKQVREFLGKAGFCRLFIPGFATLAAPLYPLTKPKGEFSWAPEHQKAFDAIKKALLSAPALALPDVTKPFTLYVDERKGVARGVLTQTLGPWRRPVAYLSKKLDPVASGWPVCLKAIAAVAILVKDADKLTLGQNITVIAPHALENIVRQPPDRWMTNARMTHYQSLLLTERVTFAPPAALNPATLLPEETDEPVTHDCHQLLIEETGVRKDLTDIPLTGEVLTWFTDGSSYVVEGKRMAGAAVVDGTRTIWASSLPEGTSAQKAELMALTQALRLAEGKSINIYTDSRYAFATAHVHGAIYKQRGWLTSAGREIKNKEEILSLLEALHLPKRLAIIHCPGHQKAKDPISRGNQMADRVAKQAAQGVNLLPAGKRTADGSEFEKRTADGSEFESPKKKAKVE

SEQ ID NO: 83 - protein, 2088 aa, synthetic construct
MPAAKRVKLDGGDKKYSIGLDIGTNSVGWAVITDEYKVPSKKFKVLGNTDRHSIKKNLIGALLFDSGETAEATRLKRTARRRYTRRKNRICYLQEIFSNEMAKVDDSFFHRLEESFLVEEDKKHERHPIFGNIVDEVAYHEKYPTIYHLRKKLVDSTDKADLRLIYLALAHMIKFRGHFLIEGDLNPDNSDVDKLFIQLVQTYNQLFEENPINASGVDAKAILSARLSKSRRLENLIAQLPGEKKNGLFGNLIALSLGLTPNFKSNFDLAEDAKLQLSKDTYDDDLDNLLAQIGDQYADLFLAAKNLSDAILLSDILRVNTEITKAPLSASMIKRYDEHHQDLTLLKALVRQQLPEKYKEIFFDQSKNGYAGYIDGGASQEEFYKFIKPILEKMDGTEELLVKLNREDLLRKQRTFDNGSIPHQIHLGELHAILRRQEDFYPFLKDNREKIEKILTFRIPYYVGPLARGNSRFAWMTRKSEETITPWNFEEVVDKGASAQSFIERMTNFDKNLPNEKVLPKHSLLYEYFTVYNELTKVKYVTEGMRKPAFLSGEQKKAIVDLLFKTNRKVTVKQLKEDYFKKIECFDSVEISGVEDRFNASLGTYHDLLKIIKDKDFLDNEENEDILEDIVLTLTLFEDREMIEERLKTYAHLFDDKVMKQLKRRRYTGWGRLSRKLINGIRDKQSGKTILDFLKSDGFANRNFMQLIHDDSLTFKEDIQKAQVSGQGDSLHEHIANLAGSPAIKKGILQTVKVVDELVKVMGRHKPENIVIEMARENQTTQKGQKNSRERMKRIEEGIKELGSQILKEHPVENTQLQNEKLYLYYLQNGRDMYVDQELDINRLSDYDVDHIVPQSFLKDDSIDNKVLTRSDKARGKSDNVPSEEVVKKMKNYWRQLLNAKLITQRKFDNLTKAERGGLSELDKAGFIKRQLVETRQITKHVAQILDSRMNTKYDENDKLIREVKVITLKSKLVSDFRKDFQFYKVREINNYHHAHDAYLNAVVGTALIKKYPKLESEFVYGDYKVYDVRKMIAKSEQEIGKATAKYFFYSNIMNFFKTEITLANGEIRKRPLIETNGETGEIVWDKGRDFATVRKVLSMPQVNIVKKTEVQTGGFSKESILPKRNSDKLIARKKDWDPKKYGGFDSPTVAYSVLVVAKVEKGKSKKLKSVKELLGITIMERSSFEKNPIDFLEAKGYKEVKKDLIIKLPKYSLFELENGRKRMLASAGELQKGNELALPSKYVNFLYLASHYEKLKGSPEDNEQKQLFVEQHKHYLDEIIEQISEFSKRVILADANLDKVLSAYNKHRDKPIREQAENIIHLFTLTNLGAPAAFKYFDTTIDRKRYTSTKEVLDATLIHQSITGLYETRIDLSQLGGDGGEAAAKGSSGGSGGLDDEYRLYSPLVKPDQNIQFWLEQFPQAWAETAGMGLAKQVPPQVIQLKASATPVSVRQYPLSKEAQEGIRPHVQRLIQQGILVPVQSPWNTPLLPVRKPGTNDYRPVQDLREVNKRVQDIHPTVPNPYNLLCALPPQRSWYTVLDLKDAFFCLRLHPTSQPLFAFEWRDPGTGRTGQLTWTRLPQGFKNSPTIFNEALHRDLANFRIQHPQVTLLQYVDDLLLAGATKQDCLEGTKALLLELSDLGYRASAKKAQICRREVTYLGYSLRDGQRWLTEARKKTVVQIPAPTTAKQVREFLGKAGFCRLFIPGFATLAAPLYPLTKPKGEFSWAPEHQKAFDAIKKALLSAPALALPDVTKPFTLYVDERKGVARGVLTQTLGPWRRPVAYLSKKLDPVASGWPVCLKAIAAVAILVKDADKLTLGQNITVIAPHALENIVRQPPDRWMTNARMTHYQSLLLTERVTFAPPAALNPATLLPEETDEPVTHDCHQLLIEETGVRKDLTDIPLTGEVLTWFTDGSSYVVEGKRMAGAAVVDGTRTIWASSLPEGTSAQKAELMALTQALRLAEGKSINIYTDSRYAFATAHVHGAIYKQRGWLTSAGREIKNKEEILSLLEALHLPKRLAIIHCPGHQKAKDPISRGNQMADRVAKQAAQGVNLLPAGKRTADGSEFEKRTADGSEFESPKKKAKVE

SEQ ID NO: 84 - protein, 2082 aa, synthetic construct
MPAAKRVKLDGGDKKYSIGLDIGTNSVGWAVITDEYKVPSKKFKVLGNTDRHSIKKNLIGALLFDSGETAEATRLKRTARRRYTRRKNRICYLQEIFSNEMAKVDDSFFHRLEESFLVEEDKKHERHPIFGNIVDEVAYHEKYPTIYHLRKKLVDSTDKADLRLIYLALAHMIKFRGHFLIEGDLNPDNSDVDKLFIQLVQTYNQLFEENPINASGVDAKAILSARLSKSRRLENLIAQLPGEKKNGLFGNLIALSLGLTPNFKSNFDLAEDAKLQLSKDTYDDDLDNLLAQIGDQYADLFLAAKNLSDAILLSDILRVNTEITKAPLSASMIKRYDEHHQDLTLLKALVRQQLPEKYKEIFFDQSKNGYAGYIDGGASQEEFYKFIKPILEKMDGTEELLVKLNREDLLRKQRTFDNGSIPHQIHLGELHAILRRQEDFYPFLKDNREKIEKILTFRIPYYVGPLARGNSRFAWMTRKSEETITPWNFEEVVDKGASAQSFIERMTNFDKNLPNEKVLPKHSLLYEYFTVYNELTKVKYVTEGMRKPAFLSGEQKKAIVDLLFKTNRKVTVKQLKEDYFKKIECFDSVEISGVEDRFNASLGTYHDLLKIIKDKDFLDNEENEDILEDIVLTLTLFEDREMIEERLKTYAHLFDDKVMKQLKRRRYTGWGRLSRKLINGIRDKQSGKTILDFLKSDGFANRNFMQLIHDDSLTFKEDIQKAQVSGQGDSLHEHIANLAGSPAIKKGILQTVKVVDELVKVMGRHKPENIVIEMARENQTTQKGQKNSRERMKRIEEGIKELGSQILKEHPVENTQLQNEKLYLYYLQNGRDMYVDQELDINRLSDYDVDHIVPQSFLKDDSIDNKVLTRSDKARGKSDNVPSEEVVKKMKNYWRQLLNAKLITQRKFDNLTKAERGGLSELDKAGFIKRQLVETRQITKHVAQILDSRMNTKYDENDKLIREVKVITLKSKLVSDFRKDFQFYKVREINNYHHAHDAYLNAVVGTALIKKYPKLESEFVYGDYKVYDVRKMIAKSEQEIGKATAKYFFYSNIMNFFKTEITLANGEIRKRPLIETNGETGEIVWDKGRDFATVRKVLSMPQVNIVKKTEVQTGGFSKESILPKRNSDKLIARKKDWDPKKYGGFDSPTVAYSVLVVAKVEKGKSKKLKSVKELLGITIMERSSFEKNPIDFLEAKGYKEVKKDLIIKLPKYSLFELENGRKRMLASAGELQKGNELALPSKYVNFLYLASHYEKLKGSPEDNEQKQLFVEQHKHYLDEIIEQISEFSKRVILADANLDKVLSAYNKHRDKPIREQAENIIHLFTLTNLGAPAAFKYFDTTIDRKRYTSTKEVLDATLIHQSITGLYETRIDLSQLGGDGGGGGGSGGLDDEYRLYSPLVKPDQNIQFWLEQFPQAWAETAGMGLAKQVPPQVIQLKASATPVSVRQYPLSKEAQEGIRPHVQRLIQQGILVPVQSPWNTPLLPVRKPGTNDYRPVQDLREVNKRVQDIHPTVPNPYNLLCALPPQRSWYTVLDLKDAFFCLRLHPTSQPLFAFEWRDPGTGRTGQLTWTRLPQGFKNSPTIFNEALHRDLANFRIQHPQVTLLQYVDDLLLAGATKQDCLEGTKALLLELSDLGYRASAKKAQICRREVTYLGYSLRDGQRWLTEARKKTVVQIPAPTTAKQVREFLGKAGFCRLFIPGFATLAAPLYPLTKPKGEFSWAPEHQKAFDAIKKALLSAPALALPDVTKPFTLYVDERKGVARGVLTQTLGPWRRPVAYLSKKLDPVASGWPVCLKAIAAVAILVKDADKLTLGQNITVIAPHALENIVRQPPDRWMTNARMTHYQSLLLTERVTFAPPAALNPATLLPEETDEPVTHDCHQLLIEETGVRKDLTDIPLTGEVLTWFTDGSSYVVEGKRMAGAAVVDGTRTIWASSLPEGTSAQKAELMALTQALRLAEGKSINIYTDSRYAFATAHVHGAIYKQRGWLTSAGREIKNKEEILSLLEALHLPKRLAIIHCPGHQKAKDPISRGNQMADRVAKQAAQGVNLLPAGKRTADGSEFEKRTADGSEFESPKKKAKVE

SEQ ID NO: 85 - protein, 2086 aa, synthetic construct
MPAAKRVKLDGGDKKYSIGLDIGTNSVGWAVITDEYKVPSKKFKVLGNTDRHSIKKNLIGALLFDSGETAEATRLKRTARRRYTRRKNRICYLQEIFSNEMAKVDDSFFHRLEESFLVEEDKKHERHPIFGNIVDEVAYHEKYPTIYHLRKKLVDSTDKADLRLIYLALAHMIKFRGHFLIEGDLNPDNSDVDKLFIQLVQTYNQLFEENPINASGVDAKAILSARLSKSRRLENLIAQLPGEKKNGLFGNLIALSLGLTPNFKSNFDLAEDAKLQLSKDTYDDDLDNLLAQIGDQYADLFLAAKNLSDAILLSDILRVNTEITKAPLSASMIKRYDEHHQDLTLLKALVRQQLPEKYKEIFFDQSKNGYAGYIDGGASQEEFYKFIKPILEKMDGTEELLVKLNREDLLRKQRTFDNGSIPHQIHLGELHAILRRQEDFYPFLKDNREKIEKILTFRIPYYVGPLARGNSRFAWMTRKSEETITPWNFEEVVDKGASAQSFIERMTNFDKNLPNEKVLPKHSLLYEYFTVYNELTKVKYVTEGMRKPAFLSGEQKKAIVDLLFKTNRKVTVKQLKEDYFKKIECFDSVEISGVEDRFNASLGTYHDLLKIIKDKDFLDNEENEDILEDIVLTLTLFEDREMIEERLKTYAHLFDDKVMKQLKRRRYTGWGRLSRKLINGIRDKQSGKTILDFLKSDGFANRNFMQLIHDDSLTFKEDIQKAQVSGQGDSLHEHIANLAGSPAIKKGILQTVKVVDELVKVMGRHKPENIVIEMARENQTTQKGQKNSRERMKRIEEGIKELGSQILKEHPVENTQLQNEKLYLYYLQNGRDMYVDQELDINRLSDYDVDHIVPQSFLKDDSIDNKVLTRSDKARGKSDNVPSEEVVKKMKNYWRQLLNAKLITQRKFDNLTKAERGGLSELDKAGFIKRQLVETRQITKHVAQILDSRMNTKYDENDKLIREVKVITLKSKLVSDFRKDFQFYKVREINNYHHAHDAYLNAVVGTALIKKYPKLESEFVYGDYKVYDVRKMIAKSEQEIGKATAKYFFYSNIMNFFKTEITLANGEIRKRPLIETNGETGEIVWDKGRDFATVRKVLSMPQVNIVKKTEVQTGGFSKESILPKRNSDKLIARKKDWDPKKYGGFDSPTVAYSVLVVAKVEKGKSKKLKSVKELLGITIMERSSFEKNPIDFLEAKGYKEVKKDLIIKLPKYSLFELENGRKRMLASAGELQKGNELALPSKYVNFLYLASHYEKLKGSPEDNEQKQLFVEQHKHYLDEIIEQISEFSKRVILADANLDKVLSAYNKHRDKPIREQAENIIHLFTLTNLGAPAAFKYFDTTIDRKRYTSTKEVLDATLIHQSITGLYETRIDLSQLGGDGGGSSGGSGGGGGLDDEYRLYSPLVKPDQNIQFWLEQFPQAWAETAGMGLAKQVPPQVIQLKASATPVSVRQYPLSKEAQEGIRPHVQRLIQQGILVPVQSPWNTPLLPVRKPGTNDYRPVQDLREVNKRVQDIHPTVPNPYNLLCALPPQRSWYTVLDLKDAFFCLRLHPTSQPLFAFEWRDPGTGRTGQLTWTRLPQGFKNSPTIFNEALHRDLANFRIQHPQVTLLQYVDDLLLAGATKQDCLEGTKALLLELSDLGYRASAKKAQICRREVTYLGYSLRDGQRWLTEARKKTVVQIPAPTTAKQVREFLGKAGFCRLFIPGFATLAAPLYPLTKPKGEFSWAPEHQKAFDAIKKALLSAPALALPDVTKPFTLYVDERKGVARGVLTQTLGPWRRPVAYLSKKLDPVASGWPVCLKAIAAVAILVKDADKLTLGQNITVIAPHALENIVRQPPDRWMTNARMTHYQSLLLTERVTFAPPAALNPATLLPEETDEPVTHDCHQLLIEETGVRKDLTDIPLTGEVLTWFTDGSSYVVEGKRMAGAAVVDGTRTIWASSLPEGTSAQKAELMALTQALRLAEGKSINIYTDSRYAFATAHVHGAIYKQRGWLTSAGREIKNKEEILSLLEALHLPKRLAIIHCPGHQKAKDPISRGNQMADRVAKQAAQGVNLLPAGKRTADGSEFEKRTADGSEFESPKKKAKVE

SEQ ID NO: 86 - protein, 2088 aa, synthetic construct
MPAAKRVKLDGGDKKYSIGLDIGTNSVGWAVITDEYKVPSKKFKVLGNTDRHSIKKNLIGALLFDSGETAEATRLKRTARRRYTRRKNRICYLQEIFSNEMAKVDDSFFHRLEESFLVEEDKKHERHPIFGNIVDEVAYHEKYPTIYHLRKKLVDSTDKADLRLIYLALAHMIKFRGHFLIEGDLNPDNSDVDKLFIQLVQTYNQLFEENPINASGVDAKAILSARLSKSRRLENLIAQLPGEKKNGLFGNLIALSLGLTPNFKSNFDLAEDAKLQLSKDTYDDDLDNLLAQIGDQYADLFLAAKNLSDAILLSDILRVNTEITKAPLSASMIKRYDEHHQDLTLLKALVRQQLPEKYKEIFFDQSKNGYAGYIDGGASQEEFYKFIKPILEKMDGTEELLVKLNREDLLRKQRTFDNGSIPHQIHLGELHAILRRQEDFYPFLKDNREKIEKILTFRIPYYVGPLARGNSRFAWMTRKSEETITPWNFEEVVDKGASAQSFIERMTNFDKNLPNEKVLPKHSLLYEYFTVYNELTKVKYVTEGMRKPAFLSGEQKKAIVDLLFKTNRKVTVKQLKEDYFKKIECFDSVEISGVEDRFNASLGTYHDLLKIIKDKDFLDNEENEDILEDIVLTLTLFEDREMIEERLKTYAHLFDDKVMKQLKRRRYTGWGRLSRKLINGIRDKQSGKTILDFLKSDGFANRNFMQLIHDDSLTFKEDIQKAQVSGQGDSLHEHIANLAGSPAIKKGILQTVKVVDELVKVMGRHKPENIVIEMARENQTTQKGQKNSRERMKRIEEGIKELGSQILKEHPVENTQLQNEKLYLYYLQNGRDMYVDQELDINRLSDYDVDHIVPQSFLKDDSIDNKVLTRSDKARGKSDNVPSEEVVKKMKNYWRQLLNAKLITQRKFDNLTKAERGGLSELDKAGFIKRQLVETRQITKHVAQILDSRMNTKYDENDKLIREVKVITLKSKLVSDFRKDFQFYKVREINNYHHAHDAYLNAVVGTALIKKYPKLESEFVYGDYKVYDVRKMIAKSEQEIGKATAKYFFYSNIMNFFKTEITLANGEIRKRPLIETNGETGEIVWDKGRDFATVRKVLSMPQVNIVKKTEVQTGGFSKESILPKRNSDKLIARKKDWDPKKYGGFDSPTVAYSVLVVAKVEKGKSKKLKSVKELLGITIMERSSFEKNPIDFLEAKGYKEVKKDLIIKLPKYSLFELENGRKRMLASAGELQKGNELALPSKYVNFLYLASHYEKLKGSPEDNEQKQLFVEQHKHYLDEIIEQISEFSKRVILADANLDKVLSAYNKHRDKPIREQAENIIHLFTLTNLGAPAAFKYFDTTIDRKRYTSTKEVLDATLIHQSITGLYETRIDLSQLGGDGGGSSPAPEAAAKGGLDDEYRLYSPLVKPDQNIQFWLEQFPQAWAETAGMGLAKQVPPQVIQLKASATPVSVRQYPLSKEAQEGIRPHVQRLIQQGILVPVQSPWNTPLLPVRKPGTNDYRPVQDLREVNKRVQDIHPTVPNPYNLLCALPPQRSWYTVLDLKDAFFCLRLHPTSQPLFAFEWRDPGTGRTGQLTWTRLPQGFKNSPTIFNEALHRDLANFRIQHPQVTLLQYVDDLLLAGATKQDCLEGTKALLLELSDLGYRASAKKAQICRREVTYLGYSLRDGQRWLTEARKKTVVQIPAPTTAKQVREFLGKAGFCRLFIPGFATLAAPLYPLTKPKGEFSWAPEHQKAFDAIKKALLSAPALALPDVTKPFTLYVDERKGVARGVLTQTLGPWRRPVAYLSKKLDPVASGWPVCLKAIAAVAILVKDADKLTLGQNITVIAPHALENIVRQPPDRWMTNARMTHYQSLLLTERVTFAPPAALNPATLLPEETDEPVTHDCHQLLIEETGVRKDLTDIPLTGEVLTWFTDGSSYVVEGKRMAGAAVVDGTRTIWASSLPEGTSAQKAELMALTQALRLAEGKSINIYTDSRYAFATAHVHGAIYKQRGWLTSAGREIKNKEEILSLLEALHLPKRLAIIHCPGHQKAKDPISRGNQMADRVAKQAAQGVNLLPAGKRTADGSEFEKRTADGSEFESPKKKAKVE

SEQ ID NO: 87 - protein, 2083 aa, synthetic construct
MPAAKRVKLDGGDKKYSIGLDIGTNSVGWAVITDEYKVPSKKFKVLGNTDRHSIKKNLIGALLFDSGETAEATRLKRTARRRYTRRKNRICYLQEIFSNEMAKVDDSFFHRLEESFLVEEDKKHERHPIFGNIVDEVAYHEKYPTIYHLRKKLVDSTDKADLRLIYLALAHMIKFRGHFLIEGDLNPDNSDVDKLFIQLVQTYNQLFEENPINASGVDAKAILSARLSKSRRLENLIAQLPGEKKNGLFGNLIALSLGLTPNFKSNFDLAEDAKLQLSKDTYDDDLDNLLAQIGDQYADLFLAAKNLSDAILLSDILRVNTEITKAPLSASMIKRYDEHHQDLTLLKALVRQQLPEKYKEIFFDQSKNGYAGYIDGGASQEEFYKFIKPILEKMDGTEELLVKLNREDLLRKQRTFDNGSIPHQIHLGELHAILRRQEDFYPFLKDNREKIEKILTFRIPYYVGPLARGNSRFAWMTRKSEETITPWNFEEVVDKGASAQSFIERMTNFDKNLPNEKVLPKHSLLYEYFTVYNELTKVKYVTEGMRKPAFLSGEQKKAIVDLLFKTNRKVTVKQLKEDYFKKIECFDSVEISGVEDRFNASLGTYHDLLKIIKDKDFLDNEENEDILEDIVLTLTLFEDREMIEERLKTYAHLFDDKVMKQLKRRRYTGWGRLSRKLINGIRDKQSGKTILDFLKSDGFANRNFMQLIHDDSLTFKEDIQKAQVSGQGDSLHEHIANLAGSPAIKKGILQTVKVVDELVKVMGRHKPENIVIEMARENQTTQKGQKNSRERMKRIEEGIKELGSQILKEHPVENTQLQNEKLYLYYLQNGRDMYVDQELDINRLSDYDVDHIVPQSFLKDDSIDNKVLTRSDKARGKSDNVPSEEVVKKMKNYWRQLLNAKLITQRKFDNLTKAERGGLSELDKAGFIKRQLVETRQITKHVAQILDSRMNTKYDENDKLIREVKVITLKSKLVSDFRKDFQFYKVREINNYHHAHDAYLNAVVGTALIKKYPKLESEFVYGDYKVYDVRKMIAKSEQEIGKATAKYFFYSNIMNFFKTEITLANGEIRKRPLIETNGETGEIVWDKGRDFATVRKVLSMPQVNIVKKTEVQTGGFSKESILPKRNSDKLIARKKDWDPKKYGGFDSPTVAYSVLVVAKVEKGKSKKLKSVKELLGITIMERSSFEKNPIDFLEAKGYKEVKKDLIIKLPKYSLFELENGRKRMLASAGELQKGNELALPSKYVNFLYLASHYEKLKGSPEDNEQKQLFVEQHKHYLDEIIEQISEFSKRVILADANLDKVLSAYNKHRDKPIREQAENIIHLFTLTNLGAPAAFKYFDTTIDRKRYTSTKEVLDATLIHQSITGLYETRIDLSQLGGDGGGGGGGSGGLDDEYRLYSPLVKPDQNIQFWLEQFPQAWAETAGMGLAKQVPPQVIQLKASATPVSVRQYPLSKEAQEGIRPHVQRLIQQGILVPVQSPWNTPLLPVRKPGTNDYRPVQDLREVNKRVQDIHPTVPNPYNLLCALPPQRSWYTVLDLKDAFFCLRLHPTSQPLFAFEWRDPGTGRTGQLTWTRLPQGFKNSPTIFNEALHRDLANFRIQHPQVTLLQYVDDLLLAGATKQDCLEGTKALLLELSDLGYRASAKKAQICRREVTYLGYSLRDGQRWLTEARKKTVVQIPAPTTAKQVREFLGKAGFCRLFIPGFATLAAPLYPLTKPKGEFSWAPEHQKAFDAIKKALLSAPALALPDVTKPFTLYVDERKGVARGVLTQTLGPWRRPVAYLSKKLDPVASGWPVCLKAIAAVAILVKDADKLTLGQNITVIAPHALENIVRQPPDRWMTNARMTHYQSLLLTERVTFAPPAALNPATLLPEETDEPVTHDCHQLLIEETGVRKDLTDIPLTGEVLTWFTDGSSYVVEGKRMAGAAVVDGTRTIWASSLPEGTSAQKAELMALTQALRLAEGKSINIYTDSRYAFATAHVHGAIYKQRGWLTSAGREIKNKEEILSLLEALHLPKRLAIIHCPGHQKAKDPISRGNQMADRVAKQAAQGVNLLPAGKRTADGSEFEKRTADGSEFESPKKKAKVE

SEQ ID NO: 88 - protein, 2083 aa, synthetic construct
MPAAKRVKLDGGDKKYSIGLDIGTNSVGWAVITDEYKVPSKKFKVLGNTDRHSIKKNLIGALLFDSGETAEATRLKRTARRRYTRRKNRICYLQEIFSNEMAKVDDSFFHRLEESFLVEEDKKHERHPIFGNIVDEVAYHEKYPTIYHLRKKLVDSTDKADLRLIYLALAHMIKFRGHFLIEGDLNPDNSDVDKLFIQLVQTYNQLFEENPINASGVDAKAILSARLSKSRRLENLIAQLPGEKKNGLFGNLIALSLGLTPNFKSNFDLAEDAKLQLSKDTYDDDLDNLLAQIGDQYADLFLAAKNLSDAILLSDILRVNTEITKAPLSASMIKRYDEHHQDLTLLKALVRQQLPEKYKEIFFDQSKNGYAGYIDGGASQEEFYKFIKPILEKMDGTEELLVKLNREDLLRKQRTFDNGSIPHQIHLGELHAILRRQEDFYPFLKDNREKIEKILTFRIPYYVGPLARGNSRFAWMTRKSEETITPWNFEEVVDKGASAQSFIERMTNFDKNLPNEKVLPKHSLLYEYFTVYNELTKVKYVTEGMRKPAFLSGEQKKAIVDLLFKTNRKVTVKQLKEDYFKKIECFDSVEISGVEDRFNASLGTYHDLLKIIKDKDFLDNEENEDILEDIVLTLTLFEDREMIEERLKTYAHLFDDKVMKQLKRRRYTGWGRLSRKLINGIRDKQSGKTILDFLKSDGFANRNFMQLIHDDSLTFKEDIQKAQVSGQGDSLHEHIANLAGSPAIKKGILQTVKVVDELVKVMGRHKPENIVIEMARENQTTQKGQKNSRERMKRIEEGIKELGSQILKEHPVENTQLQNEKLYLYYLQNGRDMYVDQELDINRLSDYDVDHIVPQSFLKDDSIDNKVLTRSDKARGKSDNVPSEEVVKKMKNYWRQLLNAKLITQRKFDNLTKAERGGLSELDKAGFIKRQLVETRQITKHVAQILDSRMNTKYDENDKLIREVKVITLKSKLVSDFRKDFQFYKVREINNYHHAHDAYLNAVVGTALIKKYPKLESEFVYGDYKVYDVRKMIAKSEQEIGKATAKYFFYSNIMNFFKTEITLANGEIRKRPLIETNGETGEIVWDKGRDFATVRKVLSMPQVNIVKKTEVQTGGFSKESILPKRNSDKLIARKKDWDPKKYGGFDSPTVAYSVLVVAKVEKGKSKKLKSVKELLGITIMERSSFEKNPIDFLEAKGYKEVKKDLIIKLPKYSLFELENGRKRMLASAGELQKGNELALPSKYVNFLYLASHYEKLKGSPEDNEQKQLFVEQHKHYLDEIIEQISEFSKRVILADANLDKVLSAYNKHRDKPIREQAENIIHLFTLTNLGAPAAFKYFDTTIDRKRYTSTKEVLDATLIHQSITGLYETRIDLSQLGGDGGGSSGGSGGLDDEYRLYSPLVKPDQNIQFWLEQFPQAWAETAGMGLAKQVPPQVIQLKASATPVSVRQYPLSKEAQEGIRPHVQRLIQQGILVPVQSPWNTPLLPVRKPGTNDYRPVQDLREVNKRVQDIHPTVPNPYNLLCALPPQRSWYTVLDLKDAFFCLRLHPTSQPLFAFEWRDPGTGRTGQLTWTRLPQGFKNSPTIFNEALHRDLANFRIQHPQVTLLQYVDDLLLAGATKQDCLEGTKALLLELSDLGYRASAKKAQICRREVTYLGYSLRDGQRWLTEARKKTVVQIPAPTTAKQVREFLGKAGFCRLFIPGFATLAAPLYPLTKPKGEFSWAPEHQKAFDAIKKALLSAPALALPDVTKPFTLYVDERKGVARGVLTQTLGPWRRPVAYLSKKLDPVASGWPVCLKAIAAVAILVKDADKLTLGQNITVIAPHALENIVRQPPDRWMTNARMTHYQSLLLTERVTFAPPAALNPATLLPEETDEPVTHDCHQLLIEETGVRKDLTDIPLTGEVLTWFTDGSSYVVEGKRMAGAAVVDGTRTIWASSLPEGTSAQKAELMALTQALRLAEGKSINIYTDSRYAFATAHVHGAIYKQRGWLTSAGREIKNKEEILSLLEALHLPKRLAIIHCPGHQKAKDPISRGNQMADRVAKQAAQGVNLLPAGKRTADGSEFEKRTADGSEFESPKKKAKVE

SEQ ID NO: 89 - protein, 2086 aa, synthetic construct
MPAAKRVKLDGGDKKYSIGLDIGTNSVGWAVITDEYKVPSKKFKVLGNTDRHSIKKNLIGALLFDSGETAEATRLKRTARRRYTRRKNRICYLQEIFSNEMAKVDDSFFHRLEESFLVEEDKKHERHPIFGNIVDEVAYHEKYPTIYHLRKKLVDSTDKADLRLIYLALAHMIKFRGHFLIEGDLNPDNSDVDKLFIQLVQTYNQLFEENPINASGVDAKAILSARLSKSRRLENLIAQLPGEKKNGLFGNLIALSLGLTPNFKSNFDLAEDAKLQLSKDTYDDDLDNLLAQIGDQYADLFLAAKNLSDAILLSDILRVNTEITKAPLSASMIKRYDEHHQDLTLLKALVRQQLPEKYKEIFFDQSKNGYAGYIDGGASQEEFYKFIKPILEKMDGTEELLVKLNREDLLRKQRTFDNGSIPHQIHLGELHAILRRQEDFYPFLKDNREKIEKILTFRIPYYVGPLARGNSRFAWMTRKSEETITPWNFEEVVDKGASAQSFIERMTNFDKNLPNEKVLPKHSLLYEYFTVYNELTKVKYVTEGMRKPAFLSGEQKKAIVDLLFKTNRKVTVKQLKEDYFKKIECFDSVEISGVEDRFNASLGTYHDLLKIIKDKDFLDNEENEDILEDIVLTLTLFEDREMIEERLKTYAHLFDDKVMKQLKRRRYTGWGRLSRKLINGIRDKQSGKTILDFLKSDGFANRNFMQLIHDDSLTFKEDIQKAQVSGQGDSLHEHIANLAGSPAIKKGILQTVKVVDELVKVMGRHKPENIVIEMARENQTTQKGQKNSRERMKRIEEGIKELGSQILKEHPVENTQLQNEKLYLYYLQNGRDMYVDQELDINRLSDYDVDHIVPQSFLKDDSIDNKVLTRSDKARGKSDNVPSEEVVKKMKNYWRQLLNAKLITQRKFDNLTKAERGGLSELDKAGFIKRQLVETRQITKHVAQILDSRMNTKYDENDKLIREVKVITLKSKLVSDFRKDFQFYKVREINNYHHAHDAYLNAVVGTALIKKYPKLESEFVYGDYKVYDVRKMIAKSEQEIGKATAKYFFYSNIMNFFKTEITLANGEIRKRPLIETNGETGEIVWDKGRDFATVRKVLSMPQVNIVKKTEVQTGGFSKESILPKRNSDKLIARKKDWDPKKYGGFDSPTVAYSVLVVAKVEKGKSKKLKSVKELLGITIMERSSFEKNPIDFLEAKGYKEVKKDLIIKLPKYSLFELENGRKRMLASAGELQKGNELALPSKYVNFLYLASHYEKLKGSPEDNEQKQLFVEQHKHYLDEIIEQISEFSKRVILADANLDKVLSAYNKHRDKPIREQAENIIHLFTLTNLGAPAAFKYFDTTIDRKRYTSTKEVLDATLIHQSITGLYETRIDLSQLGGDGGPAPGSSGGGGGLDDEYRLYSPLVKPDQNIQFWLEQFPQAWAETAGMGLAKQVPPQVIQLKASATPVSVRQYPLSKEAQEGIRPHVQRLIQQGILVPVQSPWNTPLLPVRKPGTNDYRPVQDLREVNKRVQDIHPTVPNPYNLLCALPPQRSWYTVLDLKDAFFCLRLHPTSQPLFAFEWRDPGTGRTGQLTWTRLPQGFKNSPTIFNEALHRDLANFRIQHPQVTLLQYVDDLLLAGATKQDCLEGTKALLLELSDLGYRASAKKAQICRREVTYLGYSLRDGQRWLTEARKKTVVQIPAPTTAKQVREFLGKAGFCRLFIPGFATLAAPLYPLTKPKGEFSWAPEHQKAFDAIKKALLSAPALALPDVTKPFTLYVDERKGVARGVLTQTLGPWRRPVAYLSKKLDPVASGWPVCLKAIAAVAILVKDADKLTLGQNITVIAPHALENIVRQPPDRWMTNARMTHYQSLLLTERVTFAPPAALNPATLLPEETDEPVTHDCHQLLIEETGVRKDLTDIPLTGEVLTWFTDGSSYVVEGKRMAGAAVVDGTRTIWASSLPEGTSAQKAELMALTQALRLAEGKSINIYTDSRYAFATAHVHGAIYKQRGWLTSAGREIKNKEEILSLLEALHLPKRLAIIHCPGHQKAKDPISRGNQMADRVAKQAAQGVNLLPAGKRTADGSEFEKRTADGSEFESPKKKAKVE

SEQ ID NO: 90 - protein, 2093 aa, synthetic construct
MPAAKRVKLDGGDKKYSIGLDIGTNSVGWAVITDEYKVPSKKFKVLGNTDRHSIKKNLIGALLFDSGETAEATRLKRTARRRYTRRKNRICYLQEIFSNEMAKVDDSFFHRLEESFLVEEDKKHERHPIFGNIVDEVAYHEKYPTIYHLRKKLVDSTDKADLRLIYLALAHMIKFRGHFLIEGDLNPDNSDVDKLFIQLVQTYNQLFEENPINASGVDAKAILSARLSKSRRLENLIAQLPGEKKNGLFGNLIALSLGLTPNFKSNFDLAEDAKLQLSKDTYDDDLDNLLAQIGDQYADLFLAAKNLSDAILLSDILRVNTEITKAPLSASMIKRYDEHHQDLTLLKALVRQQLPEKYKEIFFDQSKNGYAGYIDGGASQEEFYKFIKPILEKMDGTEELLVKLNREDLLRKQRTFDNGSIPHQIHLGELHAILRRQEDFYPFLKDNREKIEKILTFRIPYYVGPLARGNSRFAWMTRKSEETITPWNFEEVVDKGASAQSFIERMTNFDKNLPNEKVLPKHSLLYEYFTVYNELTKVKYVTEGMRKPAFLSGEQKKAIVDLLFKTNRKVTVKQLKEDYFKKIECFDSVEISGVEDRFNASLGTYHDLLKIIKDKDFLDNEENEDILEDIVLTLTLFEDREMIEERLKTYAHLFDDKVMKQLKRRRYTGWGRLSRKLINGIRDKQSGKTILDFLKSDGFANRNFMQLIHDDSLTFKEDIQKAQVSGQGDSLHEHIANLAGSPAIKKGILQTVKVVDELVKVMGRHKPENIVIEMARENQTTQKGQKNSRERMKRIEEGIKELGSQILKEHPVENTQLQNEKLYLYYLQNGRDMYVDQELDINRLSDYDVDHIVPQSFLKDDSIDNKVLTRSDKARGKSDNVPSEEVVKKMKNYWRQLLNAKLITQRKFDNLTKAERGGLSELDKAGFIKRQLVETRQITKHVAQILDSRMNTKYDENDKLIREVKVITLKSKLVSDFRKDFQFYKVREINNYHHAHDAYLNAVVGTALIKKYPKLESEFVYGDYKVYDVRKMIAKSEQEIGKATAKYFFYSNIMNFFKTEITLANGEIRKRPLIETNGETGEIVWDKGRDFATVRKVLSMPQVNIVKKTEVQTGGFSKESILPKRNSDKLIARKKDWDPKKYGGFDSPTVAYSVLVVAKVEKGKSKKLKSVKELLGITIMERSSFEKNPIDFLEAKGYKEVKKDLIIKLPKYSLFELENGRKRMLASAGELQKGNELALPSKYVNFLYLASHYEKLKGSPEDNEQKQLFVEQHKHYLDEIIEQISEFSKRVILADANLDKVLSAYNKHRDKPIREQAENIIHLFTLTNLGAPAAFKYFDTTIDRKRYTSTKEVLDATLIHQSITGLYETRIDLSQLGGDGGSGSETPGTSESATPESGGLDDEYRLYSPLVKPDQNIQFWLEQFPQAWAETAGMGLAKQVPPQVIQLKASATPVSVRQYPLSKEAQEGIRPHVQRLIQQGILVPVQSPWNTPLLPVRKPGTNDYRPVQDLREVNKRVQDIHPTVPNPYNLLCALPPQRSWYTVLDLKDAFFCLRLHPTSQPLFAFEWRDPGTGRTGQLTWTRLPQGFKNSPTIFNEALHRDLANFRIQHPQVTLLQYVDDLLLAGATKQDCLEGTKALLLELSDLGYRASAKKAQICRREVTYLGYSLRDGQRWLTEARKKTVVQIPAPTTAKQVREFLGKAGFCRLFIPGFATLAAPLYPLTKPKGEFSWAPEHQKAFDAIKKALLSAPALALPDVTKPFTLYVDERKGVARGVLTQTLGPWRRPVAYLSKKLDPVASGWPVCLKAIAAVAILVKDADKLTLGQNITVIAPHALENIVRQPPDRWMTNARMTHYQSLLLTERVTFAPPAALNPATLLPEETDEPVTHDCHQLLIEETGVRKDLTDIPLTGEVLTWFTDGSSYVVEGKRMAGAAVVDGTRTIWASSLPEGTSAQKAELMALTQALRLAEGKSINIYTDSRYAFATAHVHGAIYKQRGWLTSAGREIKNKEEILSLLEALHLPKRLAIIHCPGHQKAKDPISRGNQMADRVAKQAAQGVNLLPAGKRTADGSEFEKRTADGSEFESPKKKAKVE

SEQ ID NO: 91 - protein, 2086 aa, synthetic construct
MPAAKRVKLDGGDKKYSIGLDIGTNSVGWAVITDEYKVPSKKFKVLGNTDRHSIKKNLIGALLFDSGETAEATRLKRTARRRYTRRKNRICYLQEIFSNEMAKVDDSFFHRLEESFLVEEDKKHERHPIFGNIVDEVAYHEKYPTIYHLRKKLVDSTDKADLRLIYLALAHMIKFRGHFLIEGDLNPDNSDVDKLFIQLVQTYNQLFEENPINASGVDAKAILSARLSKSRRLENLIAQLPGEKKNGLFGNLIALSLGLTPNFKSNFDLAEDAKLQLSKDTYDDDLDNLLAQIGDQYADLFLAAKNLSDAILLSDILRVNTEITKAPLSASMIKRYDEHHQDLTLLKALVRQQLPEKYKEIFFDQSKNGYAGYIDGGASQEEFYKFIKPILEKMDGTEELLVKLNREDLLRKQRTFDNGSIPHQIHLGELHAILRRQEDFYPFLKDNREKIEKILTFRIPYYVGPLARGNSRFAWMTRKSEETITPWNFEEVVDKGASAQSFIERMTNFDKNLPNEKVLPKHSLLYEYFTVYNELTKVKYVTEGMRKPAFLSGEQKKAIVDLLFKTNRKVTVKQLKEDYFKKIECFDSVEISGVEDRFNASLGTYHDLLKIIKDKDFLDNEENEDILEDIVLTLTLFEDREMIEERLKTYAHLFDDKVMKQLKRRRYTGWGRLSRKLINGIRDKQSGKTILDFLKSDGFANRNFMQLIHDDSLTFKEDIQKAQVSGQGDSLHEHIANLAGSPAIKKGILQTVKVVDELVKVMGRHKPENIVIEMARENQTTQKGQKNSRERMKRIEEGIKELGSQILKEHPVENTQLQNEKLYLYYLQNGRDMYVDQELDINRLSDYDVDHIVPQSFLKDDSIDNKVLTRSDKARGKSDNVPSEEVVKKMKNYWRQLLNAKLITQRKFDNLTKAERGGLSELDKAGFIKRQLVETRQITKHVAQILDSRMNTKYDENDKLIREVKVITLKSKLVSDFRKDFQFYKVREINNYHHAHDAYLNAVVGTALIKKYPKLESEFVYGDYKVYDVRKMIAKSEQEIGKATAKYFFYSNIMNFFKTEITLANGEIRKRPLIETNGETGEIVWDKGRDFATVRKVLSMPQVNIVKKTEVQTGGFSKESILPKRNSDKLIARKKDWDPKKYGGFDSPTVAYSVLVVAKVEKGKSKKLKSVKELLGITIMERSSFEKNPIDFLEAKGYKEVKKDLIIKLPKYSLFELENGRKRMLASAGELQKGNELALPSKYVNFLYLASHYEKLKGSPEDNEQKQLFVEQHKHYLDEIIEQISEFSKRVILADANLDKVLSAYNKHRDKPIREQAENIIHLFTLTNLGAPAAFKYFDTTIDRKRYTSTKEVLDATLIHQSITGLYETRIDLSQLGGDGGGSSGGGPAPGGLDDEYRLYSPLVKPDQNIQFWLEQFPQAWAETAGMGLAKQVPPQVIQLKASATPVSVRQYPLSKEAQEGIRPHVQRLIQQGILVPVQSPWNTPLLPVRKPGTNDYRPVQDLREVNKRVQDIHPTVPNPYNLLCALPPQRSWYTVLDLKDAFFCLRLHPTSQPLFAFEWRDPGTGRTGQLTWTRLPQGFKNSPTIFNEALHRDLANFRIQHPQVTLLQYVDDLLLAGATKQDCLEGTKALLLELSDLGYRASAKKAQICRREVTYLGYSLRDGQRWLTEARKKTVVQIPAPTTAKQVREFLGKAGFCRLFIPGFATLAAPLYPLTKPKGEFSWAPEHQKAFDAIKKALLSAPALALPDVTKPFTLYVDERKGVARGVLTQTLGPWRRPVAYLSKKLDPVASGWPVCLKAIAAVAILVKDADKLTLGQNITVIAPHALENIVRQPPDRWMTNARMTHYQSLLLTERVTFAPPAALNPATLLPEETDEPVTHDCHQLLIEETGVRKDLTDIPLTGEVLTWFTDGSSYVVEGKRMAGAAVVDGTRTIWASSLPEGTSAQKAELMALTQALRLAEGKSINIYTDSRYAFATAHVHGAIYKQRGWLTSAGREIKNKEEILSLLEALHLPKRLAIIHCPGHQKAKDPISRGNQMADRVAKQAAQGVNLLPAGKRTADGSEFEKRTADGSEFESPKKKAKVE

SEQ ID NO: 92 - protein, 2088 aa, synthetic construct
MPAAKRVKLDGGDKKYSIGLDIGTNSVGWAVITDEYKVPSKKFKVLGNTDRHSIKKNLIGALLFDSGETAEATRLKRTARRRYTRRKNRICYLQEIFSNEMAKVDDSFFHRLEESFLVEEDKKHERHPIFGNIVDEVAYHEKYPTIYHLRKKLVDSTDKADLRLIYLALAHMIKFRGHFLIEGDLNPDNSDVDKLFIQLVQTYNQLFEENPINASGVDAKAILSARLSKSRRLENLIAQLPGEKKNGLFGNLIALSLGLTPNFKSNFDLAEDAKLQLSKDTYDDDLDNLLAQIGDQYADLFLAAKNLSDAILLSDILRVNTEITKAPLSASMIKRYDEHHQDLTLLKALVRQQLPEKYKEIFFDQSKNGYAGYIDGGASQEEFYKFIKPILEKMDGTEELLVKLNREDLLRKQRTFDNGSIPHQIHLGELHAILRRQEDFYPFLKDNREKIEKILTFRIPYYVGPLARGNSRFAWMTRKSEETITPWNFEEVVDKGASAQSFIERMTNFDKNLPNEKVLPKHSLLYEYFTVYNELTKVKYVTEGMRKPAFLSGEQKKAIVDLLFKTNRKVTVKQLKEDYFKKIECFDSVEISGVEDRFNASLGTYHDLLKIIKDKDFLDNEENEDILEDIVLTLTLFEDREMIEERLKTYAHLFDDKVMKQLKRRRYTGWGRLSRKLINGIRDKQSGKTILDFLKSDGFANRNFMQLIHDDSLTFKEDIQKAQVSGQGDSLHEHIANLAGSPAIKKGILQTVKVVDELVKVMGRHKPENIVIEMARENQTTQKGQKNSRERMKRIEEGIKELGSQILKEHPVENTQLQNEKLYLYYLQNGRDMYVDQELDINRLSDYDVDHIVPQSFLKDDSIDNKVLTRSDKARGKSDNVPSEEVVKKMKNYWRQLLNAKLITQRKFDNLTKAERGGLSELDKAGFIKRQLVETRQITKHVAQILDSRMNTKYDENDKLIREVKVITLKSKLVSDFRKDFQFYKVREINNYHHAHDAYLNAVVGTALIKKYPKLESEFVYGDYKVYDVRKMIAKSEQEIGKATAKYFFYSNIMNFFKTEITLANGEIRKRPLIETNGETGEIVWDKGRDFATVRKVLSMPQVNIVKKTEVQTGGFSKESILPKRNSDKLIARKKDWDPKKYGGFDSPTVAYSVLVVAKVEKGKSKKLKSVKELLGITIMERSSFEKNPIDFLEAKGYKEVKKDLIIKLPKYSLFELENGRKRMLASAGELQKGNELALPSKYVNFLYLASHYEKLKGSPEDNEQKQLFVEQHKHYLDEIIEQISEFSKRVILADANLDKVLSAYNKHRDKPIREQAENIIHLFTLTNLGAPAAFKYFDTTIDRKRYTSTKEVLDATLIHQSITGLYETRIDLSQLGGDGGGGSEAAAKGSSGGLDDEYRLYSPLVKPDQNIQFWLEQFPQAWAETAGMGLAKQVPPQVIQLKASATPVSVRQYPLSKEAQEGIRPHVQRLIQQGILVPVQSPWNTPLLPVRKPGTNDYRPVQDLREVNKRVQDIHPTVPNPYNLLCALPPQRSWYTVLDLKDAFFCLRLHPTSQPLFAFEWRDPGTGRTGQLTWTRLPQGFKNSPTIFNEALHRDLANFRIQHPQVTLLQYVDDLLLAGATKQDCLEGTKALLLELSDLGYRASAKKAQICRREVTYLGYSLRDGQRWLTEARKKTVVQIPAPTTAKQVREFLGKAGFCRLFIPGFATLAAPLYPLTKPKGEFSWAPEHQKAFDAIKKALLSAPALALPDVTKPFTLYVDERKGVARGVLTQTLGPWRRPVAYLSKKLDPVASGWPVCLKAIAAVAILVKDADKLTLGQNITVIAPHALENIVRQPPDRWMTNARMTHYQSLLLTERVTFAPPAALNPATLLPEETDEPVTHDCHQLLIEETGVRKDLTDIPLTGEVLTWFTDGSSYVVEGKRMAGAAVVDGTRTIWASSLPEGTSAQKAELMALTQALRLAEGKSINIYTDSRYAFATAHVHGAIYKQRGWLTSAGREIKNKEEILSLLEALHLPKRLAIIHCPGHQKAKDPISRGNQMADRVAKQAAQGVNLLPAGKRTADGSEFEKRTADGSEFESPKKKAKVE

SEQ ID NO: 93 - protein, 2088 aa, synthetic construct
MPAAKRVKLDGGDKKYSIGLDIGTNSVGWAVITDEYKVPSKKFKVLGNTDRHSIKKNLIGALLFDSGETAEATRLKRTARRRYTRRKNRICYLQEIFSNEMAKVDDSFFHRLEESFLVEEDKKHERHPIFGNIVDEVAYHEKYPTIYHLRKKLVDSTDKADLRLIYLALAHMIKFRGHFLIEGDLNPDNSDVDKLFIQLVQTYNQLFEENPINASGVDAKAILSARLSKSRRLENLIAQLPGEKKNGLFGNLIALSLGLTPNFKSNFDLAEDAKLQLSKDTYDDDLDNLLAQIGDQYADLFLAAKNLSDAILLSDILRVNTEITKAPLSASMIKRYDEHHQDLTLLKALVRQQLPEKYKEIFFDQSKNGYAGYIDGGASQEEFYKFIKPILEKMDGTEELLVKLNREDLLRKQRTFDNGSIPHQIHLGELHAILRRQEDFYPFLKDNREKIEKILTFRIPYYVGPLARGNSRFAWMTRKSEETITPWNFEEVVDKGASAQSFIERMTNFDKNLPNEKVLPKHSLLYEYFTVYNELTKVKYVTEGMRKPAFLSGEQKKAIVDLLFKTNRKVTVKQLKEDYFKKIECFDSVEISGVEDRFNASLGTYHDLLKIIKDKDFLDNEENEDILEDIVLTLTLFEDREMIEERLKTYAHLFDDKVMKQLKRRRYTGWGRLSRKLINGIRDKQSGKTILDFLKSDGFANRNFMQLIHDDSLTFKEDIQKAQVSGQGDSLHEHIANLAGSPAIKKGILQTVKVVDELVKVMGRHKPENIVIEMARENQTTQKGQKNSRERMKRIEEGIKELGSQILKEHPVENTQLQNEKLYLYYLQNGRDMYVDQELDINRLSDYDVDHIVPQSFLKDDSIDNKVLTRSDKARGKSDNVPSEEVVKKMKNYWRQLLNAKLITQRKFDNLTKAERGGLSELDKAGFIKRQLVETRQITKHVAQILDSRMNTKYDENDKLIREVKVITLKSKLVSDFRKDFQFYKVREINNYHHAHDAYLNAVVGTALIKKYPKLESEFVYGDYKVYDVRKMIAKSEQEIGKATAKYFFYSNIMNFFKTEITLANGEIRKRPLIETNGETGEIVWDKGRDFATVRKVLSMPQVNIVKKTEVQTGGFSKESILPKRNSDKLIARKKDWDPKKYGGFDSPTVAYSVLVVAKVEKGKSKKLKSVKELLGITIMERSSFEKNPIDFLEAKGYKEVKKDLIIKLPKYSLFELENGRKRMLASAGELQKGNELALPSKYVNFLYLASHYEKLKGSPEDNEQKQLFVEQHKHYLDEIIEQISEFSKRVILADANLDKVLSAYNKHRDKPIREQAENIIHLFTLTNLGAPAAFKYFDTTIDRKRYTSTKEVLDATLIHQSITGLYETRIDLSQLGGDGGPAPEAAAKGSSGGLDDEYRLYSPLVKPDQNIQFWLEQFPQAWAETAGMGLAKQVPPQVIQLKASATPVSVRQYPLSKEAQEGIRPHVQRLIQQGILVPVQSPWNTPLLPVRKPGTNDYRPVQDLREVNKRVQDIHPTVPNPYNLLCALPPQRSWYTVLDLKDAFFCLRLHPTSQPLFAFEWRDPGTGRTGQLTWTRLPQGFKNSPTIFNEALHRDLANFRIQHPQVTLLQYVDDLLLAGATKQDCLEGTKALLLELSDLGYRASAKKAQICRREVTYLGYSLRDGQRWLTEARKKTVVQIPAPTTAKQVREFLGKAGFCRLFIPGFATLAAPLYPLTKPKGEFSWAPEHQKAFDAIKKALLSAPALALPDVTKPFTLYVDERKGVARGVLTQTLGPWRRPVAYLSKKLDPVASGWPVCLKAIAAVAILVKDADKLTLGQNITVIAPHALENIVRQPPDRWMTNARMTHYQSLLLTERVTFAPPAALNPATLLPEETDEPVTHDCHQLLIEETGVRKDLTDIPLTGEVLTWFTDGSSYVVEGKRMAGAAVVDGTRTIWASSLPEGTSAQKAELMALTQALRLAEGKSINIYTDSRYAFATAHVHGAIYKQRGWLTSAGREIKNKEEILSLLEALHLPKRLAIIHCPGHQKAKDPISRGNQMADRVAKQAAQGVNLLPAGKRTADGSEFEKRTADGSEFESPKKKAKVE

SEQ ID NO: 94 - protein, 2088 aa, synthetic construct
MPAAKRVKLDGGDKKYSIGLDIGTNSVGWAVITDEYKVPSKKFKVLGNTDRHSIKKNLIGALLFDSGETAEATRLKRTARRRYTRRKNRICYLQEIFSNEMAKVDDSFFHRLEESFLVEEDKKHERHPIFGNIVDEVAYHEKYPTIYHLRKKLVDSTDKADLRLIYLALAHMIKFRGHFLIEGDLNPDNSDVDKLFIQLVQTYNQLFEENPINASGVDAKAILSARLSKSRRLENLIAQLPGEKKNGLFGNLIALSLGLTPNFKSNFDLAEDAKLQLSKDTYDDDLDNLLAQIGDQYADLFLAAKNLSDAILLSDILRVNTEITKAPLSASMIKRYDEHHQDLTLLKALVRQQLPEKYKEIFFDQSKNGYAGYIDGGASQEEFYKFIKPILEKMDGTEELLVKLNREDLLRKQRTFDNGSIPHQIHLGELHAILRRQEDFYPFLKDNREKIEKILTFRIPYYVGPLARGNSRFAWMTRKSEETITPWNFEEVVDKGASAQSFIERMTNFDKNLPNEKVLPKHSLLYEYFTVYNELTKVKYVTEGMRKPAFLSGEQKKAIVDLLFKTNRKVTVKQLKEDYFKKIECFDSVEISGVEDRFNASLGTYHDLLKIIKDKDFLDNEENEDILEDIVLTLTLFEDREMIEERLKTYAHLFDDKVMKQLKRRRYTGWGRLSRKLINGIRDKQSGKTILDFLKSDGFANRNFMQLIHDDSLTFKEDIQKAQVSGQGDSLHEHIANLAGSPAIKKGILQTVKVVDELVKVMGRHKPENIVIEMARENQTTQKGQKNSRERMKRIEEGIKELGSQILKEHPVENTQLQNEKLYLYYLQNGRDMYVDQELDINRLSDYDVDHIVPQSFLKDDSIDNKVLTRSDKARGKSDNVPSEEVVKKMKNYWRQLLNAKLITQRKFDNLTKAERGGLSELDKAGFIKRQLVETRQITKHVAQILDSRMNTKYDENDKLIREVKVITLKSKLVSDFRKDFQFYKVREINNYHHAHDAYLNAVVGTALIKKYPKLESEFVYGDYKVYDVRKMIAKSEQEIGKATAKYFFYSNIMNFFKTEITLANGEIRKRPLIETNGETGEIVWDKGRDFATVRKVLSMPQVNIVKKTEVQTGGFSKESILPKRNSDKLIARKKDWDPKKYGGFDSPTVAYSVLVVAKVEKGKSKKLKSVKELLGITIMERSSFEKNPIDFLEAKGYKEVKKDLIIKLPKYSLFELENGRKRMLASAGELQKGNELALPSKYVNFLYLASHYEKLKGSPEDNEQKQLFVEQHKHYLDEIIEQISEFSKRVILADANLDKVLSAYNKHRDKPIREQAENIIHLFTLTNLGAPAAFKYFDTTIDRKRYTSTKEVLDATLIHQSITGLYETRIDLSQLGGDGGGGSGGGEAAAKGGLDDEYRLYSPLVKPDQNIQFWLEQFPQAWAETAGMGLAKQVPPQVIQLKASATPVSVRQYPLSKEAQEGIRPHVQRLIQQGILVPVQSPWNTPLLPVRKPGTNDYRPVQDLREVNKRVQDIHPTVPNPYNLLCALPPQRSWYTVLDLKDAFFCLRLHPTSQPLFAFEWRDPGTGRTGQLTWTRLPQGFKNSPTIFNEALHRDLANFRIQHPQVTLLQYVDDLLLAGATKQDCLEGTKALLLELSDLGYRASAKKAQICRREVTYLGYSLRDGQRWLTEARKKTVVQIPAPTTAKQVREFLGKAGFCRLFIPGFATLAAPLYPLTKPKGEFSWAPEHQKAFDAIKKALLSAPALALPDVTKPFTLYVDERKGVARGVLTQTLGPWRRPVAYLSKKLDPVASGWPVCLKAIAAVAILVKDADKLTLGQNITVIAPHALENIVRQPPDRWMTNARMTHYQSLLLTERVTFAPPAALNPATLLPEETDEPVTHDCHQLLIEETGVRKDLTDIPLTGEVLTWFTDGSSYVVEGKRMAGAAVVDGTRTIWASSLPEGTSAQKAELMALTQALRLAEGKSINIYTDSRYAFATAHVHGAIYKQRGWLTSAGREIKNKEEILSLLEALHLPKRLAIIHCPGHQKAKDPISRGNQMADRVAKQAAQGVNLLPAGKRTADGSEFEKRTADGSEFESPKKKAKVE

SEQ ID NO: 95 - protein, 2086 aa, synthetic construct
MPAAKRVKLDGGDKKYSIGLDIGTNSVGWAVITDEYKVPSKKFKVLGNTDRHSIKKNLIGALLFDSGETAEATRLKRTARRRYTRRKNRICYLQEIFSNEMAKVDDSFFHRLEESFLVEEDKKHERHPIFGNIVDEVAYHEKYPTIYHLRKKLVDSTDKADLRLIYLALAHMIKFRGHFLIEGDLNPDNSDVDKLFIQLVQTYNQLFEENPINASGVDAKAILSARLSKSRRLENLIAQLPGEKKNGLFGNLIALSLGLTPNFKSNFDLAEDAKLQLSKDTYDDDLDNLLAQIGDQYADLFLAAKNLSDAILLSDILRVNTEITKAPLSASMIKRYDEHHQDLTLLKALVRQQLPEKYKEIFFDQSKNGYAGYIDGGASQEEFYKFIKPILEKMDGTEELLVKLNREDLLRKQRTFDNGSIPHQIHLGELHAILRRQEDFYPFLKDNREKIEKILTFRIPYYVGPLARGNSRFAWMTRKSEETITPWNFEEVVDKGASAQSFIERMTNFDKNLPNEKVLPKHSLLYEYFTVYNELTKVKYVTEGMRKPAFLSGEQKKAIVDLLFKTNRKVTVKQLKEDYFKKIECFDSVEISGVEDRFNASLGTYHDLLKIIKDKDFLDNEENEDILEDIVLTLTLFEDREMIEERLKTYAHLFDDKVMKQLKRRRYTGWGRLSRKLINGIRDKQSGKTILDFLKSDGFANRNFMQLIHDDSLTFKEDIQKAQVSGQGDSLHEHIANLAGSPAIKKGILQTVKVVDELVKVMGRHKPENIVIEMARENQTTQKGQKNSRERMKRIEEGIKELGSQILKEHPVENTQLQNEKLYLYYLQNGRDMYVDQELDINRLSDYDVDHIVPQSFLKDDSIDNKVLTRSDKARGKSDNVPSEEVVKKMKNYWRQLLNAKLITQRKFDNLTKAERGGLSELDKAGFIKRQLVETRQITKHVAQILDSRMNTKYDENDKLIREVKVITLKSKLVSDFRKDFQFYKVREINNYHHAHDAYLNAVVGTALIKKYPKLESEFVYGDYKVYDVRKMIAKSEQEIGKATAKYFFYSNIMNFFKTEITLANGEIRKRPLIETNGETGEIVWDKGRDFATVRKVLSMPQVNIVKKTEVQTGGFSKESILPKRNSDKLIARKKDWDPKKYGGFDSPTVAYSVLVVAKVEKGKSKKLKSVKELLGITIMERSSFEKNPIDFLEAKGYKEVKKDLIIKLPKYSLFELENGRKRMLASAGELQKGNELALPSKYVNFLYLASHYEKLKGSPEDNEQKQLFVEQHKHYLDEIIEQISEFSKRVILADANLDKVLSAYNKHRDKPIREQAENIIHLFTLTNLGAPAAFKYFDTTIDRKRYTSTKEVLDATLIHQSITGLYETRIDLSQLGGDGGGGGGSSGGSGGLDDEYRLYSPLVKPDQNIQFWLEQFPQAWAETAGMGLAKQVPPQVIQLKASATPVSVRQYPLSKEAQEGIRPHVQRLIQQGILVPVQSPWNTPLLPVRKPGTNDYRPVQDLREVNKRVQDIHPTVPNPYNLLCALPPQRSWYTVLDLKDAFFCLRLHPTSQPLFAFEWRDPGTGRTGQLTWTRLPQGFKNSPTIFNEALHRDLANFRIQHPQVTLLQYVDDLLLAGATKQDCLEGTKALLLELSDLGYRASAKKAQICRREVTYLGYSLRDGQRWLTEARKKTVVQIPAPTTAKQVREFLGKAGFCRLFIPGFATLAAPLYPLTKPKGEFSWAPEHQKAFDAIKKALLSAPALALPDVTKPFTLYVDERKGVARGVLTQTLGPWRRPVAYLSKKLDPVASGWPVCLKAIAAVAILVKDADKLTLGQNITVIAPHALENIVRQPPDRWMTNARMTHYQSLLLTERVTFAPPAALNPATLLPEETDEPVTHDCHQLLIEETGVRKDLTDIPLTGEVLTWFTDGSSYVVEGKRMAGAAVVDGTRTIWASSLPEGTSAQKAELMALTQALRLAEGKSINIYTDSRYAFATAHVHGAIYKQRGWLTSAGREIKNKEEILSLLEALHLPKRLAIIHCPGHQKAKDPISRGNQMADRVAKQAAQGVNLLPAGKRTADGSEFEKRTADGSEFESPKKKAKVE

SEQ ID NO: 96 - protein, 2104 aa, synthetic construct
MPAAKRVKLDGGDKKYSIGLDIGTNSVGWAVITDEYKVPSKKFKVLGNTDRHSIKKNLIGALLFDSGETAEATRLKRTARRRYTRRKNRICYLQEIFSNEMAKVDDSFFHRLEESFLVEEDKKHERHPIFGNIVDEVAYHEKYPTIYHLRKKLVDSTDKADLRLIYLALAHMIKFRGHFLIEGDLNPDNSDVDKLFIQLVQTYNQLFEENPINASGVDAKAILSARLSKSRRLENLIAQLPGEKKNGLFGNLIALSLGLTPNFKSNFDLAEDAKLQLSKDTYDDDLDNLLAQIGDQYADLFLAAKNLSDAILLSDILRVNTEITKAPLSASMIKRYDEHHQDLTLLKALVRQQLPEKYKEIFFDQSKNGYAGYIDGGASQEEFYKFIKPILEKMDGTEELLVKLNREDLLRKQRTFDNGSIPHQIHLGELHAILRRQEDFYPFLKDNREKIEKILTFRIPYYVGPLARGNSRFAWMTRKSEETITPWNFEEVVDKGASAQSFIERMTNFDKNLPNEKVLPKHSLLYEYFTVYNELTKVKYVTEGMRKPAFLSGEQKKAIVDLLFKTNRKVTVKQLKEDYFKKIECFDSVEISGVEDRFNASLGTYHDLLKIIKDKDFLDNEENEDILEDIVLTLTLFEDREMIEERLKTYAHLFDDKVMKQLKRRRYTGWGRLSRKLINGIRDKQSGKTILDFLKSDGFANRNFMQLIHDDSLTFKEDIQKAQVSGQGDSLHEHIANLAGSPAIKKGILQTVKVVDELVKVMGRHKPENIVIEMARENQTTQKGQKNSRERMKRIEEGIKELGSQILKEHPVENTQLQNEKLYLYYLQNGRDMYVDQELDINRLSDYDVDHIVPQSFLKDDSIDNKVLTRSDKARGKSDNVPSEEVVKKMKNYWRQLLNAKLITQRKFDNLTKAERGGLSELDKAGFIKRQLVETRQITKHVAQILDSRMNTKYDENDKLIREVKVITLKSKLVSDFRKDFQFYKVREINNYHHAHDAYLNAVVGTALIKKYPKLESEFVYGDYKVYDVRKMIAKSEQEIGKATAKYFFYSNIMNFFKTEITLANGEIRKRPLIETNGETGEIVWDKGRDFATVRKVLSMPQVNIVKKTEVQTGGFSKESILPKRNSDKLIARKKDWDPKKYGGFDSPTVAYSVLVVAKVEKGKSKKLKSVKELLGITIMERSSFEKNPIDFLEAKGYKEVKKDLIIKLPKYSLFELENGRKRMLASAGELQKGNELALPSKYVNFLYLASHYEKLKGSPEDNEQKQLFVEQHKHYLDEIIEQISEFSKRVILADANLDKVLSAYNKHRDKPIREQAENIIHLFTLTNLGAPAAFKYFDTTIDRKRYTSTKEVLDATLIHQSITGLYETRIDLSQLGGDGGEAAAKEAAAKEAAAKEAAAKEAAAKGGTLQLDDEYRLYSPLVKPDQNIQFWLEQFPQAWAETAGMGLAKQVPPQVIQLKASATPVSVRQYPLSKEAQEGIRPHVQRLIQQGILVPVQSPWNTPLLPVRKPGTNDYRPVQDLREVNKRVQDIHPTVPNPYNLLCALPPQRSWYTVLDLKDAFFCLRLHPTSQPLFAFEWRDPGTGRTGQLTWTRLPQGFKNSPTIFDEALHRDLANFRIQHPQVTLLQYVDDLLLAGATKQDCLEGTKALLLELSDLGYRASAKKAQICRREVTYLGYSLRDGQRWLTEARKKTVVQIPAPTTAKQVREFLGTAGFCRLWIPGFATLAAPLYPLTKEKGEFSWAPEHQKAFDAIKKALLSAPALALPDVTKPFTLYVDERKGVARGVLTQTLGPWRRPVAYLSKKLDPVASGWPVCLKAIAAVAILVKDADKLTLGQNITVIAPHALENIVRQPPDRWMTNARMTHYQSLLLTERVTFAPPAALNPATLLPEETDEPVTHDCHQLLIEETGVRKDLTDIPLTGEVLTWFTDGSSYVVEGKRMAGAAVVDGTRTIWASSLPEGTSAQKAELMALTQALRLAEGKSINIYTDSRYAFATAHVHGAIYKQRGLLTSAGREIKNKEEILSLLEALHLPKRLAIIHCPGHQKAKDPISRGNQMADRVAKQAAQGVNLLAGKRTADGSEFEKRTADGSEFESPKKKAKVE

SEQ ID NO: 97 - protein, 2094 aa, synthetic construct
MPAAKRVKLDGGDKKYSIGLDIGTNSVGWAVITDEYKVPSKKFKVLGNTDRHSIKKNLIGALLFDSGETAEATRLKRTARRRYTRRKNRICYLQEIFSNEMAKVDDSFFHRLEESFLVEEDKKHERHPIFGNIVDEVAYHEKYPTIYHLRKKLVDSTDKADLRLIYLALAHMIKFRGHFLIEGDLNPDNSDVDKLFIQLVQTYNQLFEENPINASGVDAKAILSARLSKSRRLENLIAQLPGEKKNGLFGNLIALSLGLTPNFKSNFDLAEDAKLQLSKDTYDDDLDNLLAQIGDQYADLFLAAKNLSDAILLSDILRVNTEITKAPLSASMIKRYDEHHQDLTLLKALVRQQLPEKYKEIFFDQSKNGYAGYIDGGASQEEFYKFIKPILEKMDGTEELLVKLNREDLLRKQRTFDNGSIPHQIHLGELHAILRRQEDFYPFLKDNREKIEKILTFRIPYYVGPLARGNSRFAWMTRKSEETITPWNFEEVVDKGASAQSFIERMTNFDKNLPNEKVLPKHSLLYEYFTVYNELTKVKYVTEGMRKPAFLSGEQKKAIVDLLFKTNRKVTVKQLKEDYFKKIECFDSVEISGVEDRFNASLGTYHDLLKIIKDKDFLDNEENEDILEDIVLTLTLFEDREMIEERLKTYAHLFDDKVMKQLKRRRYTGWGRLSRKLINGIRDKQSGKTILDFLKSDGFANRNFMQLIHDDSLTFKEDIQKAQVSGQGDSLHEHIANLAGSPAIKKGILQTVKVVDELVKVMGRHKPENIVIEMARENQTTQKGQKNSRERMKRIEEGIKELGSQILKEHPVENTQLQNEKLYLYYLQNGRDMYVDQELDINRLSDYDVDHIVPQSFLKDDSIDNKVLTRSDKARGKSDNVPSEEVVKKMKNYWRQLLNAKLITQRKFDNLTKAERGGLSELDKAGFIKRQLVETRQITKHVAQILDSRMNTKYDENDKLIREVKVITLKSKLVSDFRKDFQFYKVREINNYHHAHDAYLNAVVGTALIKKYPKLESEFVYGDYKVYDVRKMIAKSEQEIGKATAKYFFYSNIMNFFKTEITLANGEIRKRPLIETNGETGEIVWDKGRDFATVRKVLSMPQVNIVKKTEVQTGGFSKESILPKRNSDKLIARKKDWDPKKYGGFDSPTVAYSVLVVAKVEKGKSKKLKSVKELLGITIMERSSFEKNPIDFLEAKGYKEVKKDLIIKLPKYSLFELENGRKRMLASAGELQKGNELALPSKYVNFLYLASHYEKLKGSPEDNEQKQLFVEQHKHYLDEIIEQISEFSKRVILADANLDKVLSAYNKHRDKPIREQAENIIHLFTLTNLGAPAAFKYFDTTIDRKRYTSTKEVLDATLIHQSITGLYETRIDLSQLGGDGGEAAAKGGGGSEAAAKGGTLQLDDEYRLYSPLVKPDQNIQFWLEQFPQAWAETAGMGLAKQVPPQVIQLKASATPVSVRQYPLSKEAQEGIRPHVQRLIQQGILVPVQSPWNTPLLPVRKPGTNDYRPVQDLREVNKRVQDIHPTVPNPYNLLCALPPQRSWYTVLDLKDAFFCLRLHPTSQPLFAFEWRDPGTGRTGQLTWTRLPQGFKNSPTIFDEALHRDLANFRIQHPQVTLLQYVDDLLLAGATKQDCLEGTKALLLELSDLGYRASAKKAQICRREVTYLGYSLRDGQRWLTEARKKTVVQIPAPTTAKQVREFLGTAGFCRLWIPGFATLAAPLYPLTKEKGEFSWAPEHQKAFDAIKKALLSAPALALPDVTKPFTLYVDERKGVARGVLTQTLGPWRRPVAYLSKKLDPVASGWPVCLKAIAAVAILVKDADKLTLGQNITVIAPHALENIVRQPPDRWMTNARMTHYQSLLLTERVTFAPPAALNPATLLPEETDEPVTHDCHQLLIEETGVRKDLTDIPLTGEVLTWFTDGSSYVVEGKRMAGAAVVDGTRTIWASSLPEGTSAQKAELMALTQALRLAEGKSINIYTDSRYAFATAHVHGAIYKQRGLLTSAGREIKNKEEILSLLEALHLPKRLAIIHCPGHQKAKDPISRGNQMADRVAKQAAQGVNLLAGKRTADGSEFEKRTADGSEFESPKKKAKVE

SEQ ID NO: 98 - protein, 2125 aa, synthetic construct
MPAAKRVKLDGGDKKYSIGLDIGTNSVGWAVITDEYKVPSKKFKVLGNTDRHSIKKNLIGALLFDSGETAEATRLKRTARRRYTRRKNRICYLQEIFSNEMAKVDDSFFHRLEESFLVEEDKKHERHPIFGNIVDEVAYHEKYPTIYHLRKKLVDSTDKADLRLIYLALAHMIKFRGHFLIEGDLNPDNSDVDKLFIQLVQTYNQLFEENPINASGVDAKAILSARLSKSRRLENLIAQLPGEKKNGLFGNLIALSLGLTPNFKSNFDLAEDAKLQLSKDTYDDDLDNLLAQIGDQYADLFLAAKNLSDAILLSDILRVNTEITKAPLSASMIKRYDEHHQDLTLLKALVRQQLPEKYKEIFFDQSKNGYAGYIDGGASQEEFYKFIKPILEKMDGTEELLVKLNREDLLRKQRTFDNGSIPHQIHLGELHAILRRQEDFYPFLKDNREKIEKILTFRIPYYVGPLARGNSRFAWMTRKSEETITPWNFEEVVDKGASAQSFIERMTNFDKNLPNEKVLPKHSLLYEYFTVYNELTKVKYVTEGMRKPAFLSGEQKKAIVDLLFKTNRKVTVKQLKEDYFKKIECFDSVEISGVEDRFNASLGTYHDLLKIIKDKDFLDNEENEDILEDIVLTLTLFEDREMIEERLKTYAHLFDDKVMKQLKRRRYTGWGRLSRKLINGIRDKQSGKTILDFLKSDGFANRNFMQLIHDDSLTFKEDIQKAQVSGQGDSLHEHIANLAGSPAIKKGILQTVKVVDELVKVMGRHKPENIVIEMARENQTTQKGQKNSRERMKRIEEGIKELGSQILKEHPVENTQLQNEKLYLYYLQNGRDMYVDQELDINRLSDYDVDHIVPQSFLKDDSIDNKVLTRSDKARGKSDNVPSEEVVKKMKNYWRQLLNAKLITQRKFDNLTKAERGGLSELDKAGFIKRQLVETRQITKHVAQILDSRMNTKYDENDKLIREVKVITLKSKLVSDFRKDFQFYKVREINNYHHAHDAYLNAVVGTALIKKYPKLESEFVYGDYKVYDVRKMIAKSEQEIGKATAKYFFYSNIMNFFKTEITLANGEIRKRPLIETNGETGEIVWDKGRDFATVRKVLSMPQVNIVKKTEVQTGGFSKESILPKRNSDKLIARKKDWDPKKYGGFDSPTVAYSVLVVAKVEKGKSKKLKSVKELLGITIMERSSFEKNPIDFLEAKGYKEVKKDLIIKLPKYSLFELENGRKRMLASAGELQKGNELALPSKYVNFLYLASHYEKLKGSPEDNEQKQLFVEQHKHYLDEIIEQISEFSKRVILADANLDKVLSAYNKHRDKPIREQAENIIHLFTLTNLGAPAAFKYFDTTIDRKRYTSTKEVLDATLIHQSITGLYETRIDLSQLGGDGGAEAAAKEAAAKEAAAKEAAAKALEAEAAAKEAAAKEAAAKEAAAKAGGTLQLDDEYRLYSPLVKPDQNIQFWLEQFPQAWAETAGMGLAKQVPPQVIQLKASATPVSVRQYPLSKEAQEGIRPHVQRLIQQGILVPVQSPWNTPLLPVRKPGTNDYRPVQDLREVNKRVQDIHPTVPNPYNLLCALPPQRSWYTVLDLKDAFFCLRLHPTSQPLFAFEWRDPGTGRTGQLTWTRLPQGFKNSPTIFDEALHRDLANFRIQHPQVTLLQYVDDLLLAGATKQDCLEGTKALLLELSDLGYRASAKKAQICRREVTYLGYSLRDGQRWLTEARKKTVVQIPAPTTAKQVREFLGTAGFCRLWIPGFATLAAPLYPLTKEKGEFSWAPEHQKAFDAIKKALLSAPALALPDVTKPFTLYVDERKGVARGVLTQTLGPWRRPVAYLSKKLDPVASGWPVCLKAIAAVAILVKDADKLTLGQNITVIAPHALENIVRQPPDRWMTNARMTHYQSLLLTERVTFAPPAALNPATLLPEETDEPVTHDCHQLLIEETGVRKDLTDIPLTGEVLTWFTDGSSYVVEGKRMAGAAVVDGTRTIWASSLPEGTSAQKAELMALTQALRLAEGKSINIYTDSRYAFATAHVHGAIYKQRGLLTSAGREIKNKEEILSLLEALHLPKRLAIIHCPGHQKAKDPISRGNQMADRVAKQAAQGVNLLAGKRTADGSEFEKRTADGSEFESPKKKAKVE

SEQ ID NO: 99 - protein, 2094 aa, synthetic construct
MPAAKRVKLDGGDKKYSIGLDIGTNSVGWAVITDEYKVPSKKFKVLGNTDRHSIKKNLIGALLFDSGETAEATRLKRTARRRYTRRKNRICYLQEIFSNEMAKVDDSFFHRLEESFLVEEDKKHERHPIFGNIVDEVAYHEKYPTIYHLRKKLVDSTDKADLRLIYLALAHMIKFRGHFLIEGDLNPDNSDVDKLFIQLVQTYNQLFEENPINASGVDAKAILSARLSKSRRLENLIAQLPGEKKNGLFGNLIALSLGLTPNFKSNFDLAEDAKLQLSKDTYDDDLDNLLAQIGDQYADLFLAAKNLSDAILLSDILRVNTEITKAPLSASMIKRYDEHHQDLTLLKALVRQQLPEKYKEIFFDQSKNGYAGYIDGGASQEEFYKFIKPILEKMDGTEELLVKLNREDLLRKQRTFDNGSIPHQIHLGELHAILRRQEDFYPFLKDNREKIEKILTFRIPYYVGPLARGNSRFAWMTRKSEETITPWNFEEVVDKGASAQSFIERMTNFDKNLPNEKVLPKHSLLYEYFTVYNELTKVKYVTEGMRKPAFLSGEQKKAIVDLLFKTNRKVTVKQLKEDYFKKIECFDSVEISGVEDRFNASLGTYHDLLKIIKDKDFLDNEENEDILEDIVLTLTLFEDREMIEERLKTYAHLFDDKVMKQLKRRRYTGWGRLSRKLINGIRDKQSGKTILDFLKSDGFANRNFMQLIHDDSLTFKEDIQKAQVSGQGDSLHEHIANLAGSPAIKKGILQTVKVVDELVKVMGRHKPENIVIEMARENQTTQKGQKNSRERMKRIEEGIKELGSQILKEHPVENTQLQNEKLYLYYLQNGRDMYVDQELDINRLSDYDVDHIVPQSFLKDDSIDNKVLTRSDKARGKSDNVPSEEVVKKMKNYWRQLLNAKLITQRKFDNLTKAERGGLSELDKAGFIKRQLVETRQITKHVAQILDSRMNTKYDENDKLIREVKVITLKSKLVSDFRKDFQFYKVREINNYHHAHDAYLNAVVGTALIKKYPKLESEFVYGDYKVYDVRKMIAKSEQEIGKATAKYFFYSNIMNFFKTEITLANGEIRKRPLIETNGETGEIVWDKGRDFATVRKVLSMPQVNIVKKTEVQTGGFSKESILPKRNSDKLIARKKDWDPKKYGGFDSPTVAYSVLVVAKVEKGKSKKLKSVKELLGITIMERSSFEKNPIDFLEAKGYKEVKKDLIIKLPKYSLFELENGRKRMLASAGELQKGNELALPSKYVNFLYLASHYEKLKGSPEDNEQKQLFVEQHKHYLDEIIEQISEFSKRVILADANLDKVLSAYNKHRDKPIREQAENIIHLFTLTNLGAPAAFKYFDTTIDRKRYTSTKEVLDATLIHQSITGLYETRIDLSQLGGDGGGSSGSSGSSGSSGSSGGTLQLDDEYRLYSPLVKPDQNIQFWLEQFPQAWAETAGMGLAKQVPPQVIQLKASATPVSVRQYPLSKEAQEGIRPHVQRLIQQGILVPVQSPWNTPLLPVRKPGTNDYRPVQDLREVNKRVQDIHPTVPNPYNLLCALPPQRSWYTVLDLKDAFFCLRLHPTSQPLFAFEWRDPGTGRTGQLTWTRLPQGFKNSPTIFDEALHRDLANFRIQHPQVTLLQYVDDLLLAGATKQDCLEGTKALLLELSDLGYRASAKKAQICRREVTYLGYSLRDGQRWLTEARKKTVVQIPAPTTAKQVREFLGTAGFCRLWIPGFATLAAPLYPLTKEKGEFSWAPEHQKAFDAIKKALLSAPALALPDVTKPFTLYVDERKGVARGVLTQTLGPWRRPVAYLSKKLDPVASGWPVCLKAIAAVAILVKDADKLTLGQNITVIAPHALENIVRQPPDRWMTNARMTHYQSLLLTERVTFAPPAALNPATLLPEETDEPVTHDCHQLLIEETGVRKDLTDIPLTGEVLTWFTDGSSYVVEGKRMAGAAVVDGTRTIWASSLPEGTSAQKAELMALTQALRLAEGKSINIYTDSRYAFATAHVHGAIYKQRGLLTSAGREIKNKEEILSLLEALHLPKRLAIIHCPGHQKAKDPISRGNQMADRVAKQAAQGVNLLAGKRTADGSEFEKRTADGSEFESPKKKAKVE

SEQ ID NO: 100 - protein, 2085 aa, synthetic construct
MPAAKRVKLDGGDKKYSIGLDIGTNSVGWAVITDEYKVPSKKFKVLGNTDRHSIKKNLIGALLFDSGETAEATRLKRTARRRYTRRKNRICYLQEIFSNEMAKVDDSFFHRLEESFLVEEDKKHERHPIFGNIVDEVAYHEKYPTIYHLRKKLVDSTDKADLRLIYLALAHMIKFRGHFLIEGDLNPDNSDVDKLFIQLVQTYNQLFEENPINASGVDAKAILSARLSKSRRLENLIAQLPGEKKNGLFGNLIALSLGLTPNFKSNFDLAEDAKLQLSKDTYDDDLDNLLAQIGDQYADLFLAAKNLSDAILLSDILRVNTEITKAPLSASMIKRYDEHHQDLTLLKALVRQQLPEKYKEIFFDQSKNGYAGYIDGGASQEEFYKFIKPILEKMDGTEELLVKLNREDLLRKQRTFDNGSIPHQIHLGELHAILRRQEDFYPFLKDNREKIEKILTFRIPYYVGPLARGNSRFAWMTRKSEETITPWNFEEVVDKGASAQSFIERMTNFDKNLPNEKVLPKHSLLYEYFTVYNELTKVKYVTEGMRKPAFLSGEQKKAIVDLLFKTNRKVTVKQLKEDYFKKIECFDSVEISGVEDRFNASLGTYHDLLKIIKDKDFLDNEENEDILEDIVLTLTLFEDREMIEERLKTYAHLFDDKVMKQLKRRRYTGWGRLSRKLINGIRDKQSGKTILDFLKSDGFANRNFMQLIHDDSLTFKEDIQKAQVSGQGDSLHEHIANLAGSPAIKKGILQTVKVVDELVKVMGRHKPENIVIEMARENQTTQKGQKNSRERMKRIEEGIKELGSQILKEHPVENTQLQNEKLYLYYLQNGRDMYVDQELDINRLSDYDVDHIVPQSFLKDDSIDNKVLTRSDKARGKSDNVPSEEVVKKMKNYWRQLLNAKLITQRKFDNLTKAERGGLSELDKAGFIKRQLVETRQITKHVAQILDSRMNTKYDENDKLIREVKVITLKSKLVSDFRKDFQFYKVREINNYHHAHDAYLNAVVGTALIKKYPKLESEFVYGDYKVYDVRKMIAKSEQEIGKATAKYFFYSNIMNFFKTEITLANGEIRKRPLIETNGETGEIVWDKGRDFATVRKVLSMPQVNIVKKTEVQTGGFSKESILPKRNSDKLIARKKDWDPKKYGGFDSPTVAYSVLVVAKVEKGKSKKLKSVKELLGITIMERSSFEKNPIDFLEAKGYKEVKKDLIIKLPKYSLFELENGRKRMLASAGELQKGNELALPSKYVNFLYLASHYEKLKGSPEDNEQKQLFVEQHKHYLDEIIEQISEFSKRVILADANLDKVLSAYNKHRDKPIREQAENIIHLFTLTNLGAPAAFKYFDTTIDRKRYTSTKEVLDATLIHQSITGLYETRIDLSQLGGDGGGGGGSSGGTLQLDDEYRLYSPLVKPDQNIQFWLEQFPQAWAETAGMGLAKQVPPQVIQLKASATPVSVRQYPLSKEAQEGIRPHVQRLIQQGILVPVQSPWNTPLLPVRKPGTNDYRPVQDLREVNKRVQDIHPTVPNPYNLLCALPPQRSWYTVLDLKDAFFCLRLHPTSQPLFAFEWRDPGTGRTGQLTWTRLPQGFKNSPTIFDEALHRDLANFRIQHPQVTLLQYVDDLLLAGATKQDCLEGTKALLLELSDLGYRASAKKAQICRREVTYLGYSLRDGQRWLTEARKKTVVQIPAPTTAKQVREFLGTAGFCRLWIPGFATLAAPLYPLTKEKGEFSWAPEHQKAFDAIKKALLSAPALALPDVTKPFTLYVDERKGVARGVLTQTLGPWRRPVAYLSKKLDPVASGWPVCLKAIAAVAILVKDADKLTLGQNITVIAPHALENIVRQPPDRWMTNARMTHYQSLLLTERVTFAPPAALNPATLLPEETDEPVTHDCHQLLIEETGVRKDLTDIPLTGEVLTWFTDGSSYVVEGKRMAGAAVVDGTRTIWASSLPEGTSAQKAELMALTQALRLAEGKSINIYTDSRYAFATAHVHGAIYKQRGLLTSAGREIKNKEEILSLLEALHLPKRLAIIHCPGHQKAKDPISRGNQMADRVAKQAAQGVNLLAGKRTADGSEFEKRTADGSEFESPKKKAKVE

SEQ ID NO: 101 - protein, 2088 aa, synthetic construct
MPAAKRVKLDGGDKKYSIGLDIGTNSVGWAVITDEYKVPSKKFKVLGNTDRHSIKKNLIGALLFDSGETAEATRLKRTARRRYTRRKNRICYLQEIFSNEMAKVDDSFFHRLEESFLVEEDKKHERHPIFGNIVDEVAYHEKYPTIYHLRKKLVDSTDKADLRLIYLALAHMIKFRGHFLIEGDLNPDNSDVDKLFIQLVQTYNQLFEENPINASGVDAKAILSARLSKSRRLENLIAQLPGEKKNGLFGNLIALSLGLTPNFKSNFDLAEDAKLQLSKDTYDDDLDNLLAQIGDQYADLFLAAKNLSDAILLSDILRVNTEITKAPLSASMIKRYDEHHQDLTLLKALVRQQLPEKYKEIFFDQSKNGYAGYIDGGASQEEFYKFIKPILEKMDGTEELLVKLNREDLLRKQRTFDNGSIPHQIHLGELHAILRRQEDFYPFLKDNREKIEKILTFRIPYYVGPLARGNSRFAWMTRKSEETITPWNFEEVVDKGASAQSFIERMTNFDKNLPNEKVLPKHSLLYEYFTVYNELTKVKYVTEGMRKPAFLSGEQKKAIVDLLFKTNRKVTVKQLKEDYFKKIECFDSVEISGVEDRFNASLGTYHDLLKIIKDKDFLDNEENEDILEDIVLTLTLFEDREMIEERLKTYAHLFDDKVMKQLKRRRYTGWGRLSRKLINGIRDKQSGKTILDFLKSDGFANRNFMQLIHDDSLTFKEDIQKAQVSGQGDSLHEHIANLAGSPAIKKGILQTVKVVDELVKVMGRHKPENIVIEMARENQTTQKGQKNSRERMKRIEEGIKELGSQILKEHPVENTQLQNEKLYLYYLQNGRDMYVDQELDINRLSDYDVDHIVPQSFLKDDSIDNKVLTRSDKARGKSDNVPSEEVVKKMKNYWRQLLNAKLITQRKFDNLTKAERGGLSELDKAGFIKRQLVETRQITKHVAQILDSRMNTKYDENDKLIREVKVITLKSKLVSDFRKDFQFYKVREINNYHHAHDAYLNAVVGTALIKKYPKLESEFVYGDYKVYDVRKMIAKSEQEIGKATAKYFFYSNIMNFFKTEITLANGEIRKRPLIETNGETGEIVWDKGRDFATVRKVLSMPQVNIVKKTEVQTGGFSKESILPKRNSDKLIARKKDWDPKKYGGFDSPTVAYSVLVVAKVEKGKSKKLKSVKELLGITIMERSSFEKNPIDFLEAKGYKEVKKDLIIKLPKYSLFELENGRKRMLASAGELQKGNELALPSKYVNFLYLASHYEKLKGSPEDNEQKQLFVEQHKHYLDEIIEQISEFSKRVILADANLDKVLSAYNKHRDKPIREQAENIIHLFTLTNLGAPAAFKYFDTTIDRKRYTSTKEVLDATLIHQSITGLYETRIDLSQLGGDGGGSSGGSPAPGGTLQLDDEYRLYSPLVKPDQNIQFWLEQFPQAWAETAGMGLAKQVPPQVIQLKASATPVSVRQYPLSKEAQEGIRPHVQRLIQQGILVPVQSPWNTPLLPVRKPGTNDYRPVQDLREVNKRVQDIHPTVPNPYNLLCALPPQRSWYTVLDLKDAFFCLRLHPTSQPLFAFEWRDPGTGRTGQLTWTRLPQGFKNSPTIFDEALHRDLANFRIQHPQVTLLQYVDDLLLAGATKQDCLEGTKALLLELSDLGYRASAKKAQICRREVTYLGYSLRDGQRWLTEARKKTVVQIPAPTTAKQVREFLGTAGFCRLWIPGFATLAAPLYPLTKEKGEFSWAPEHQKAFDAIKKALLSAPALALPDVTKPFTLYVDERKGVARGVLTQTLGPWRRPVAYLSKKLDPVASGWPVCLKAIAAVAILVKDADKLTLGQNITVIAPHALENIVRQPPDRWMTNARMTHYQSLLLTERVTFAPPAALNPATLLPEETDEPVTHDCHQLLIEETGVRKDLTDIPLTGEVLTWFTDGSSYVVEGKRMAGAAVVDGTRTIWASSLPEGTSAQKAELMALTQALRLAEGKSINIYTDSRYAFATAHVHGAIYKQRGLLTSAGREIKNKEEILSLLEALHLPKRLAIIHCPGHQKAKDPISRGNQMADRVAKQAAQGVNLLAGKRTADGSEFEKRTADGSEFESPKKKAKVE

SEQ ID NO: 102 - protein, 6 aa, synthetic construct
GGSGGS

SEQ ID NO: 103 - protein, 9 aa, synthetic construct
GGSGGSGGS

SEQ ID NO: 104 - protein, 12 aa, synthetic construct
GGSGGSGGSGGS

SEQ ID NO: 105 - protein, 15 aa, synthetic construct
GGSGGSGGSGGSGGS

SEQ ID NO: 106 - protein, 18 aa, synthetic construct
GGSGGSGGSGGSGGSGGS

SEQ ID NO: 107 - protein, 5 aa, synthetic construct
GGGGS

SEQ ID NO: 108 - protein, 10 aa, synthetic construct
GGGGSGGGGS

SEQ ID NO: 109 - protein, 15 aa, synthetic construct
GGGGSGGGGSGGGGS

SEQ ID NO: 110 - protein, 20 aa, synthetic construct
GGGGSGGGGSGGGGSGGGGS

SEQ ID NO: 111 - protein, 25 aa, synthetic construct
GGGGSGGGGSGGGGSGGGGSGGGGS

SEQ ID NO: 112 - protein, 30 aa, synthetic construct
GGGGSGGGGSGGGGSGGGGSGGGGSGGGGS

SEQ ID NO: 113 - protein, 2097 aa, synthetic construct
MPAAKRVKLDGGDKKYSIGLDIGTNSVGWAVITDEYKVPSKKFKVLGNTDRHSIKKNLIGALLFDSGETAEATRLKRTARRRYTRRKNRICYLQEIFSNEMAKVDDSFFHRLEESFLVEEDKKHERHPIFGNIVDEVAYHEKYPTIYHLRKKLVDSTDKADLRLIYLALAHMIKFRGHFLIEGDLNPDNSDVDKLFIQLVQTYNQLFEENPINASGVDAKAILSARLSKSRRLENLIAQLPGEKKNGLFGNLIALSLGLTPNFKSNFDLAEDAKLQLSKDTYDDDLDNLLAQIGDQYADLFLAAKNLSDAILLSDILRVNTEITKAPLSASMIKRYDEHHQDLTLLKALVRQQLPEKYKEIFFDQSKNGYAGYIDGGASQEEFYKFIKPILEKMDGTEELLVKLNREDLLRKQRTFDNGSIPHQIHLGELHAILRRQEDFYPFLKDNREKIEKILTFRIPYYVGPLARGNSRFAWMTRKSEETITPWNFEEVVDKGASAQSFIERMTNFDKNLPNEKVLPKHSLLYEYFTVYNELTKVKYVTEGMRKPAFLSGEQKKAIVDLLFKTNRKVTVKQLKEDYFKKIECFDSVEISGVEDRFNASLGTYHDLLKIIKDKDFLDNEENEDILEDIVLTLTLFEDREMIEERLKTYAHLFDDKVMKQLKRRRYTGWGRLSRKLINGIRDKQSGKTILDFLKSDGFANRNFMQLIHDDSLTFKEDIQKAQVSGQGDSLHEHIANLAGSPAIKKGILQTVKVVDELVKVMGRHKPENIVIEMARENQTTQKGQKNSRERMKRIEEGIKELGSQILKEHPVENTQLQNEKLYLYYLQNGRDMYVDQELDINRLSDYDVDHIVPQSFLKDDSIDNKVLTRSDKARGKSDNVPSEEVVKKMKNYWRQLLNAKLITQRKFDNLTKAERGGLSELDKAGFIKRQLVETRQITKHVAQILDSRMNTKYDENDKLIREVKVITLKSKLVSDFRKDFQFYKVREINNYHHAHDAYLNAVVGTALIKKYPKLESEFVYGDYKVYDVRKMIAKSEQEIGKATAKYFFYSNIMNFFKTEITLANGEIRKRPLIETNGETGEIVWDKGRDFATVRKVLSMPQVNIVKKTEVQTGGFSKESILPKRNSDKLIARKKDWDPKKYGGFDSPTVAYSVLVVAKVEKGKSKKLKSVKELLGITIMERSSFEKNPIDFLEAKGYKEVKKDLIIKLPKYSLFELENGRKRMLASAGELQKGNELALPSKYVNFLYLASHYEKLKGSPEDNEQKQLFVEQHKHYLDEIIEQISEFSKRVILADANLDKVLSAYNKHRDKPIREQAENIIHLFTLTNLGAPAAFKYFDTTIDRKRYTSTKEVLDATLIHQSITGLYETRIDLSQLGGDGGGSSGSSGSSGSSGSSGSSGGTLQLDDEYRLYSPLVKPDQNIQFWLEQFPQAWAETAGMGLAKQVPPQVIQLKASATPVSVRQYPLSKEAQEGIRPHVQRLIQQGILVPVQSPWNTPLLPVRKPGTNDYRPVQDLREVNKRVQDIHPTVPNPYNLLCALPPQRSWYTVLDLKDAFFCLRLHPTSQPLFAFEWRDPGTGRTGQLTWTRLPQGFKNSPTIFNEALHRDLANFRIQHPQVTLLQYVDDLLLAGATKQDCLEGTKALLLELSDLGYRASAKKAQICRREVTYLGYSLRDGQRWLTEARKKTVVQIPAPTTAKQVREFLGTAGFCRLWIPGFATLAAPLYPLTKPKGEFSWAPEHQKAFDAIKKALLSAPALALPDVTKPFTLYVDERKGVARGVLTQTLGPWRRPVAYLSKKLDPVASGWPVCLKAIAAVAILVKDADKLTLGQNITVIAPHALENIVRQPPDRWMTNARMTHYQSLLLTERVTFAPPAALNPATLLPEETDEPVTHDCHQLLIEETGVRKDLTDIPLTGEVLTWFTDGSSYVVEGKRMAGAAVVDGTRTIWASSLPEGTSAQKAELMALTQALRLAEGKSINIYTDSRYAFATAHVHGAIYKQRGWLTSAGREIKNKEEILSLLEALHLPKRLAIIHCPGHQKAKDPISRGNQMADRVAKQAAQGVNLLAGKRTADGSEFEKRTADGSEFESPKKKAKVE

SEQ ID NO: 114 - protein, 4 aa, synthetic construct
GGGG

SEQ ID NO: 115 - protein, 5 aa, synthetic construct
GGGGG

SEQ ID NO: 116 - protein, 6 aa, synthetic construct
GGGGGG

SEQ ID NO: 117 - protein, 7 aa, synthetic construct
GGGGGGG

SEQ ID NO: 118 - protein, 8 aa, synthetic construct
GGGGGGGG

SEQ ID NO: 119 - protein, 2090 aa, synthetic construct
MPAAKRVKLDGGDKKYSIGLDIGTNSVGWAVITDEYKVPSKKFKVLGNTDRHSIKKNLIGALLFDSGETAEATRLKRTARRRYTRRKNRICYLQEIFSNEMAKVDDSFFHRLEESFLVEEDKKHERHPIFGNIVDEVAYHEKYPTIYHLRKKLVDSTDKADLRLIYLALAHMIKFRGHFLIEGDLNPDNSDVDKLFIQLVQTYNQLFEENPINASGVDAKAILSARLSKSRRLENLIAQLPGEKKNGLFGNLIALSLGLTPNFKSNFDLAEDAKLQLSKDTYDDDLDNLLAQIGDQYADLFLAAKNLSDAILLSDILRVNTEITKAPLSASMIKRYDEHHQDLTLLKALVRQQLPEKYKEIFFDQSKNGYAGYIDGGASQEEFYKFIKPILEKMDGTEELLVKLNREDLLRKQRTFDNGSIPHQIHLGELHAILRRQEDFYPFLKDNREKIEKILTFRIPYYVGPLARGNSRFAWMTRKSEETITPWNFEEVVDKGASAQSFIERMTNFDKNLPNEKVLPKHSLLYEYFTVYNELTKVKYVTEGMRKPAFLSGEQKKAIVDLLFKTNRKVTVKQLKEDYFKKIECFDSVEISGVEDRFNASLGTYHDLLKIIKDKDFLDNEENEDILEDIVLTLTLFEDREMIEERLKTYAHLFDDKVMKQLKRRRYTGWGRLSRKLINGIRDKQSGKTILDFLKSDGFANRNFMQLIHDDSLTFKEDIQKAQVSGQGDSLHEHIANLAGSPAIKKGILQTVKVVDELVKVMGRHKPENIVIEMARENQTTQKGQKNSRERMKRIEEGIKELGSQILKEHPVENTQLQNEKLYLYYLQNGRDMYVDQELDINRLSDYDVDHIVPQSFLKDDSIDNKVLTRSDKARGKSDNVPSEEVVKKMKNYWRQLLNAKLITQRKFDNLTKAERGGLSELDKAGFIKRQLVETRQITKHVAQILDSRMNTKYDENDKLIREVKVITLKSKLVSDFRKDFQFYKVREINNYHHAHDAYLNAVVGTALIKKYPKLESEFVYGDYKVYDVRKMIAKSEQEIGKATAKYFFYSNIMNFFKTEITLANGEIRKRPLIETNGETGEIVWDKGRDFATVRKVLSMPQVNIVKKTEVQTGGFSKESILPKRNSDKLIARKKDWDPKKYGGFDSPTVAYSVLVVAKVEKGKSKKLKSVKELLGITIMERSSFEKNPIDFLEAKGYKEVKKDLIIKLPKYSLFELENGRKRMLASAGELQKGNELALPSKYVNFLYLASHYEKLKGSPEDNEQKQLFVEQHKHYLDEIIEQISEFSKRVILADANLDKVLSAYNKHRDKPIREQAENIIHLFTLTNLGAPAAFKYFDTTIDRKRYTSTKEVLDATLIHQSITGLYETRIDLSQLGGDGGEAAAKGSSGGSGGTLQLDDEYRLYSPLVKPDQNIQFWLEQFPQAWAETAGMGLAKQVPPQVIQLKASATPVSVRQYPLSKEAQEGIRPHVQRLIQQGILVPVQSPWNTPLLPVRKPGTNDYRPVQDLREVNKRVQDIHPTVPNPYNLLCALPPQRSWYTVLDLKDAFFCLRLHPTSQPLFAFEWRDPGTGRTGQLTWTRLPQGFKNSPTIFNEALHRDLANFRIQHPQVTLLQYVDDLLLAGATKQDCLEGTKALLLELSDLGYRASAKKAQICRREVTYLGYSLRDGQRWLTEARKKTVVQIPAPTTAKQVREFLGTAGFCRLWIPGFATLAAPLYPLTKPKGEFSWAPEHQKAFDAIKKALLSAPALALPDVTKPFTLYVDERKGVARGVLTQTLGPWRRPVAYLSKKLDPVASGWPVCLKAIAAVAILVKDADKLTLGQNITVIAPHALENIVRQPPDRWMTNARMTHYQSLLLTERVTFAPPAALNPATLLPEETDEPVTHDCHQLLIEETGVRKDLTDIPLTGEVLTWFTDGSSYVVEGKRMAGAAVVDGTRTIWASSLPEGTSAQKAELMALTQALRLAEGKSINIYTDSRYAFATAHVHGAIYKQRGWLTSAGREIKNKEEILSLLEALHLPKRLAIIHCPGHQKAKDPISRGNQMADRVAKQAAQGVNLLAGKRTADGSEFEKRTADGSEFESPKKKAKVE

SEQ ID NO: 120 - protein, 6 aa, synthetic construct
GSSGSS

SEQ ID NO: 121 - protein, 9 aa, synthetic construct
GSSGSSGSS

SEQ ID NO: 122 - protein, 12 aa, synthetic construct
GSSGSSGSSGSS

SEQ ID NO: 123 - protein, 15 aa, synthetic construct
GSSGSSGSSGSSGSS

SEQ ID NO: 124 - protein, 18 aa, synthetic construct
GSSGSSGSSGSSGSSGSS

SEQ ID NO: 125 - protein, 5 aa, synthetic construct
EAAAK

SEQ ID NO: 126 - protein, 10 aa, synthetic construct
EAAAKEAAAK

SEQ ID NO: 127 - protein, 15 aa, synthetic construct
EAAAKEAAAKEAAAK

SEQ ID NO: 128 - protein, 20 aa, synthetic construct
EAAAKEAAAKEAAAKEAAAK

SEQ ID NO: 129 - protein, 25 aa, synthetic construct
EAAAKEAAAKEAAAKEAAAKEAAAK

SEQ ID NO: 130 - protein, 30 aa, synthetic construct
EAAAKEAAAKEAAAKEAAAKEAAAKEAAAK

SEQ ID NO: 131 - protein, 2088 aa, synthetic construct
MPAAKRVKLDGGDKKYSIGLDIGTNSVGWAVITDEYKVPSKKFKVLGNTDRHSIKKNLIGALLFDSGETAEATRLKRTARRRYTRRKNRICYLQEIFSNEMAKVDDSFFHRLEESFLVEEDKKHERHPIFGNIVDEVAYHEKYPTIYHLRKKLVDSTDKADLRLIYLALAHMIKFRGHFLIEGDLNPDNSDVDKLFIQLVQTYNQLFEENPINASGVDAKAILSARLSKSRRLENLIAQLPGEKKNGLFGNLIALSLGLTPNFKSNFDLAEDAKLQLSKDTYDDDLDNLLAQIGDQYADLFLAAKNLSDAILLSDILRVNTEITKAPLSASMIKRYDEHHQDLTLLKALVRQQLPEKYKEIFFDQSKNGYAGYIDGGASQEEFYKFIKPILEKMDGTEELLVKLNREDLLRKQRTFDNGSIPHQIHLGELHAILRRQEDFYPFLKDNREKIEKILTFRIPYYVGPLARGNSRFAWMTRKSEETITPWNFEEVVDKGASAQSFIERMTNFDKNLPNEKVLPKHSLLYEYFTVYNELTKVKYVTEGMRKPAFLSGEQKKAIVDLLFKTNRKVTVKQLKEDYFKKIECFDSVEISGVEDRFNASLGTYHDLLKIIKDKDFLDNEENEDILEDIVLTLTLFEDREMIEERLKTYAHLFDDKVMKQLKRRRYTGWGRLSRKLINGIRDKQSGKTILDFLKSDGFANRNFMQLIHDDSLTFKEDIQKAQVSGQGDSLHEHIANLAGSPAIKKGILQTVKVVDELVKVMGRHKPENIVIEMARENQTTQKGQKNSRERMKRIEEGIKELGSQILKEHPVENTQLQNEKLYLYYLQNGRDMYVDQELDINRLSDYDVDHIVPQSFLKDDSIDNKVLTRSDKARGKSDNVPSEEVVKKMKNYWRQLLNAKLITQRKFDNLTKAERGGLSELDKAGFIKRQLVETRQITKHVAQILDSRMNTKYDENDKLIREVKVITLKSKLVSDFRKDFQFYKVREINNYHHAHDAYLNAVVGTALIKKYPKLESEFVYGDYKVYDVRKMIAKSEQEIGKATAKYFFYSNIMNFFKTEITLANGEIRKRPLIETNGETGEIVWDKGRDFATVRKVLSMPQVNIVKKTEVQTGGFSKESILPKRNSDKLIARKKDWDPKKYGGFDSPTVAYSVLVVAKVEKGKSKKLKSVKELLGITIMERSSFEKNPIDFLEAKGYKEVKKDLIIKLPKYSLFELENGRKRMLASAGELQKGNELALPSKYVNFLYLASHYEKLKGSPEDNEQKQLFVEQHKHYLDEIIEQISEFSKRVILADANLDKVLSAYNKHRDKPIREQAENIIHLFTLTNLGAPAAFKYFDTTIDRKRYTSTKEVLDATLIHQSITGLYETRIDLSQLGGDGGGGSPAPGGGGGTLQLDDEYRLYSPLVKPDQNIQFWLEQFPQAWAETAGMGLAKQVPPQVIQLKASATPVSVRQYPLSKEAQEGIRPHVQRLIQQGILVPVQSPWNTPLLPVRKPGTNDYRPVQDLREVNKRVQDIHPTVPNPYNLLCALPPQRSWYTVLDLKDAFFCLRLHPTSQPLFAFEWRDPGTGRTGQLTWTRLPQGFKNSPTIFNEALHRDLANFRIQHPQVTLLQYVDDLLLAGATKQDCLEGTKALLLELSDLGYRASAKKAQICRREVTYLGYSLRDGQRWLTEARKKTVVQIPAPTTAKQVREFLGTAGFCRLWIPGFATLAAPLYPLTKPKGEFSWAPEHQKAFDAIKKALLSAPALALPDVTKPFTLYVDERKGVARGVLTQTLGPWRRPVAYLSKKLDPVASGWPVCLKAIAAVAILVKDADKLTLGQNITVIAPHALENIVRQPPDRWMTNARMTHYQSLLLTERVTFAPPAALNPATLLPEETDEPVTHDCHQLLIEETGVRKDLTDIPLTGEVLTWFTDGSSYVVEGKRMAGAAVVDGTRTIWASSLPEGTSAQKAELMALTQALRLAEGKSINIYTDSRYAFATAHVHGAIYKQRGWLTSAGREIKNKEEILSLLEALHLPKRLAIIHCPGHQKAKDPISRGNQMADRVAKQAAQGVNLLAGKRTADGSEFEKRTADGSEFESPKKKAKVE

SEQ ID NO: 132 - protein, 5 aa, synthetic construct
PAPAP

SEQ ID NO: 133 - protein, 7 aa, synthetic construct
PAPAPAP

SEQ ID NO: 134 - protein, 9 aa, synthetic construct
PAPAPAPAP

SEQ ID NO: 135 - protein, 11 aa, synthetic construct
PAPAPAPAPAP

SEQ ID NO: 136 - protein, 13 aa, synthetic construct
PAPAPAPAPAPAP

SEQ ID NO: 137 - protein, 6 aa, synthetic construct
GGSGGG

SEQ ID NO: 138 - protein, 6 aa, synthetic construct
GGGGGS

SEQ ID NO: 139 - protein, 6 aa, synthetic construct
GGSGSS

SEQ ID NO: 140 - protein, 6 aa, synthetic construct
GSSGGS

SEQ ID NO: 141 - protein, 8 aa, synthetic construct
GGSEAAAK

SEQ ID NO: 142 - protein, 8 aa, synthetic construct
EAAAKGGS

SEQ ID NO: 143 - protein, 6 aa, synthetic construct
GGSPAP

SEQ ID NO: 144 - protein, 6 aa, synthetic construct
PAPGGS

SEQ ID NO: 145 - protein, 6 aa, synthetic construct
GGGGSS

SEQ ID NO: 146 - protein, 6 aa, synthetic construct
GSSGGG

SEQ ID NO: 147 - protein, 8 aa, synthetic construct
GGGEAAAK

SEQ ID NO: 148 - protein, 8 aa, synthetic construct
EAAAKGGG

SEQ ID NO: 149 - protein, 6 aa, synthetic construct
GGGPAP

SEQ ID NO: 150 - protein, 6 aa, synthetic construct
PAPGGG

SEQ ID NO: 151 - protein, 8 aa, synthetic construct
GSSEAAAK

SEQ ID NO: 152 - protein, 8 aa, synthetic construct
EAAAKGSS

SEQ ID NO: 153 - protein, 6 aa, synthetic construct
GSSPAP

SEQ ID NO: 154 - protein, 6 aa, synthetic construct
PAPGSS

SEQ ID NO: 155 - protein, 8 aa, synthetic construct
EAAAKPAP

SEQ ID NO: 156 - protein, 8 aa, synthetic construct
PAPEAAAK

SEQ ID NO: 157 - protein, 9 aa, synthetic construct
GGSGGGGSS

SEQ ID NO: 158 - protein, 9 aa, synthetic construct
GGSGSSGGG

SEQ ID NO: 159 - protein, 9 aa, synthetic construct
GGGGGSGSS

SEQ ID NO: 160 - protein, 9 aa, synthetic construct
GGGGSSGGS

SEQ ID NO: 161 - protein, 9 aa, synthetic construct
GSSGGSGGG

SEQ ID NO: 162 - protein, 9 aa, synthetic construct
GSSGGGGGS

SEQ ID NO: 163 - protein, 11 aa, synthetic construct
GGSGGGEAAAK

SEQ ID NO: 164 - protein, 11 aa, synthetic construct
GGSEAAAKGGG

SEQ ID NO: 165 - protein, 11 aa, synthetic construct
GGGGGSEAAAK

SEQ ID NO: 166 - protein, 11 aa, synthetic construct
GGGEAAAKGGS

SEQ ID NO: 167 - protein, 11 aa, synthetic construct
EAAAKGGSGGG

SEQ ID NO: 168 - protein, 11 aa, synthetic construct
EAAAKGGGGGS

SEQ ID NO: 169 - protein, 9 aa, synthetic construct
GGSGGGPAP

SEQ ID NO: 170 - protein, 9 aa, synthetic construct
GGSPAPGGG

SEQ ID NO: 171 - protein, 9 aa, synthetic construct
GGGGGSPAP

SEQ ID NO: 172 - protein, 9 aa, synthetic construct
GGGPAPGGS

SEQ ID NO: 173 - protein, 9 aa, synthetic construct
PAPGGSGGG

SEQ ID NO: 174 - protein, 9 aa, synthetic construct
PAPGGGGGS

SEQ ID NO: 175 - protein, 11 aa, synthetic construct
GGSGSSEAAAK

SEQ ID NO: 176 - protein, 11 aa, synthetic construct
GGSEAAAKGSS

SEQ ID NO: 177 - protein, 11 aa, synthetic construct
GSSGGSEAAAK

SEQ ID NO: 178 - protein, 11 aa, synthetic construct
GSSEAAAKGGS

SEQ ID NO: 179 - protein, 11 aa, synthetic construct
EAAAKGGSGSS

SEQ ID NO: 180 - protein, 11 aa, synthetic construct
EAAAKGSSGGS

SEQ ID NO: 181 - protein, 9 aa, synthetic construct
GGSGSSPAP

SEQ ID NO: 182 - protein, 9 aa, synthetic construct
GGSPAPGSS

SEQ ID NO: 183 - protein, 9 aa, synthetic construct
GSSGGSPAP

SEQ ID NO: 184 - protein, 9 aa, synthetic construct
GSSPAPGGS

SEQ ID NO: 185 - protein, 9 aa, synthetic construct
PAPGGSGSS

SEQ ID NO: 186 - protein, 9 aa, synthetic construct
PAPGSSGGS

SEQ ID NO: 187 - protein, 11 aa, synthetic construct
GGSEAAAKPAP

SEQ ID NO: 188 - protein, 11 aa, synthetic construct
GGSPAPEAAAK

SEQ ID NO: 189 - protein, 11 aa, synthetic construct
EAAAKGGSPAP

SEQ ID NO: 190 - protein, 11 aa, synthetic construct
EAAAKPAPGGS

SEQ ID NO: 191 - protein, 11 aa, synthetic construct
PAPGGSEAAAK

SEQ ID NO: 192 - protein, 11 aa, synthetic construct
PAPEAAAKGGS

SEQ ID NO: 193 - protein, 11 aa, synthetic construct
GGGGSSEAAAK

SEQ ID NO: 194 - protein, 11 aa, synthetic construct
GGGEAAAKGSS

SEQ ID NO: 195 - protein, 11 aa, synthetic construct
GSSGGGEAAAK

SEQ ID NO: 196 - protein, 11 aa, synthetic construct
GSSEAAAKGGG

SEQ ID NO: 197 - protein, 11 aa, synthetic construct
EAAAKGGGGSS

SEQ ID NO: 198 - protein, 11 aa, synthetic construct
EAAAKGSSGGG

SEQ ID NO: 199 - protein, 9 aa, synthetic construct
GGGGSSPAP

SEQ ID NO: 200 - protein, 9 aa, synthetic construct
GGGPAPGSS

SEQ ID NO: 201 - protein, 9 aa, synthetic construct
GSSGGGPAP

SEQ ID NO: 202 - protein, 9 aa, synthetic construct
GSSPAPGGG

SEQ ID NO: 203 - protein, 9 aa, synthetic construct
PAPGGGGSS

SEQ ID NO: 204 - protein, 9 aa, synthetic construct
PAPGSSGGG

SEQ ID NO: 205 - protein, 11 aa, synthetic construct
GGGEAAAKPAP

SEQ ID NO: 206 - protein, 11 aa, synthetic construct
GGGPAPEAAAK

SEQ ID NO: 207 - protein, 11 aa, synthetic construct
EAAAKGGGPAP

SEQ ID NO: 208 - protein, 11 aa, synthetic construct
EAAAKPAPGGG

SEQ ID NO: 209 - protein, 11 aa, synthetic construct
PAPGGGEAAAK

SEQ ID NO: 210 - protein, 11 aa, synthetic construct
PAPEAAAKGGG

SEQ ID NO: 211 - protein, 11 aa, synthetic construct
GSSEAAAKPAP

SEQ ID NO: 212 - protein, 11 aa, synthetic construct
GSSPAPEAAAK

SEQ ID NO: 213 - protein, 11 aa, synthetic construct
EAAAKGSSPAP

SEQ ID NO: 214 - protein, 11 aa, synthetic construct
EAAAKPAPGSS

SEQ ID NO: 215 - protein, 11 aa, synthetic construct
PAPGSSEAAAK

SEQ ID NO: 216 - protein, 11 aa, synthetic construct
PAPEAAAKGSS

SEQ ID NO: 217 - protein, 46 aa, synthetic construct
AEAAAKEAAAKEAAAKEAAAKALEAEAAAKEAAAKEAAAKEAAAKA

SEQ ID NO: 218 - protein, 15 aa, synthetic construct
GGGGSEAAAKGGGGS

SEQ ID NO: 219 - protein, 15 aa, synthetic construct
EAAAKGGGGSEAAAK

SEQ ID NO: 220 - protein, 16 aa, synthetic construct
SGSETPGTSESATPES

SEQ ID NO: 221 - protein, 12 aa, synthetic construct
GSAGSAAGSGEF

SEQ ID NO: 222 - protein, 33 aa, synthetic construct; identical to SEQ ID NO: 6

SEQ ID NO: 223 - protein, 30 aa, synthetic construct
AHFKISGEKRPSTDPGKKAKNPKKKKKKDP

SEQ ID NO: 224 - protein, 12 aa, synthetic construct
AHRAKKMSKTHA

SEQ ID NO: 225 - protein, 14 aa, synthetic construct
ASPEYVNLPINGNG

SEQ ID NO: 226 - protein, 7 aa, synthetic construct
CTKRPRW

SEQ ID NO: 227 - protein, 16 aa, synthetic construct
DKAKRVSRNKSEKKRR

SEQ ID NO: 228 - protein, 15 aa, synthetic construct
EELRLKEELLKGIYA

SEQ ID NO: 229 - protein, 16 aa, synthetic construct
EEQLRRRKNSRLNNTG

SEQ ID NO: 230 - protein, 24 aa, synthetic construct
EVLKVIRTGKRKKKAWKRMVTKVC

SEQ ID NO: 231 - protein, 15 aa, synthetic construct
HHHHHHHHHHHHQPH

SEQ ID NO: 232 - protein, 17 aa, synthetic construct
HKKKHPDASVNFSEFSK

SEQ ID NO: 233 - protein, 6 aa, synthetic construct
HKRTKK

SEQ ID NO: 234 - protein, 29 aa, synthetic construct
IINGRKLKLKKSRRRSSQTSNNSFTSRRS

SEQ ID NO: 235 - protein, 8 aa, synthetic construct
KAEQERRK

SEQ ID NO: 236 - protein, 18 aa, synthetic construct
KEKRKRREELFIEQKKRK

SEQ ID NO: 237 - protein, 14 aa, synthetic construct
KKGKDEWFSRGKKP

SEQ ID NO: 238 - protein, 12 aa, synthetic construct
KKGPSVQKRKKT

SEQ ID NO: 239 - protein, 16 aa, synthetic construct
KKKTVINDLLHYKKEK

SEQ ID NO: 240 - protein, 17 aa, synthetic construct
KKNGGKGKNKPSAKIKK

SEQ ID NO: 241 - protein, 13 aa, synthetic construct
KKPKWDDFKKKKK

SEQ ID NO: 242 - protein, 6 aa, synthetic construct
KKRKKD

SEQ ID NO: 243 - protein, 9 aa, synthetic construct
KKRRKRRRK

SEQ ID NO: 244 - protein, 9 aa, synthetic construct
KKRRRRARK

SEQ ID NO: 245 - protein, 7 aa, synthetic construct
KKSKRGR

SEQ ID NO: 246 - protein, 8 aa, synthetic construct
KKSRKRGS

SEQ ID NO: 247 - protein, 17 aa, synthetic construct
KKSTALSRELGKIMRRR

SEQ ID NO: 248 - protein, 17 aa, synthetic construct
KKSYQDPEIIAHSRPRK

SEQ ID NO: 249 - protein, 17 aa, synthetic construct
KKTGKNRKLKSKRVKTR

SEQ ID NO: 250 - protein, 17 aa, synthetic construct
KKVSIAGQSGKLWRWKR

SEQ ID NO: 251 - protein, 20 aa, synthetic construct
KKYENVVIKRSPRKRGRPRK

SEQ ID NO: 252 - protein, 6 aa, synthetic construct
KNKKRK

SEQ ID NO: 253 - protein, 6 aa, synthetic construct
KPKKKR

SEQ ID NO: 254 - protein, 19 aa, synthetic construct
KRAMKDDSHGNSTSPKRRK

SEQ ID NO: 255 - protein, 17 aa, synthetic construct
KRANSNLVAAYEKAKKK

SEQ ID NO: 256 - protein, 22 aa, synthetic construct
KRASEDTTSGSPPKKSSAGPKR

SEQ ID NO: 257 - protein, 16 aa, synthetic construct
KRFKRRWMVRKMKTKK

SEQ ID NO: 258 - protein, 16 aa, synthetic construct
KRGLNSSFETSPKKVK

SEQ ID NO: 259 - protein, 20 aa, synthetic construct
KRGNSSIGPNDLSKRKQRKK

SEQ ID NO: 260 - protein, 23 aa, synthetic construct
KRIHSVSLSQSQIDPSKKVKRAK

SEQ ID NO: 261 - protein, 15 aa, synthetic construct
KRKGKLKNKGSKRKK

SEQ ID NO: 262 - protein, 13 aa, synthetic construct
KRRRRRRREKRKR

SEQ ID NO: 263 - protein, 18 aa, synthetic construct
KRSNDRTYSPEEEKQRRA

SEQ ID NO: 264 - protein, 21 aa, synthetic construct
KRTVATNGDASGAHRAKKMSK

SEQ ID NO: 265 - protein, 20 aa, synthetic construct
KRVYNKGEDEQEHLPKGKKR

SEQ ID NO: 266 - protein, 18 aa, synthetic construct
KSGKAPRRRAVSMDNSNK

SEQ ID NO: 267 - protein, 19 aa, synthetic construct
KVNFLDMSLDDIIIYKELE

SEQ ID NO: 268 - protein, 15 aa, synthetic construct
KVQHRIAKKTTRRRR

SEQ ID NO: 269 - protein, 8 aa, synthetic construct
LSPSLSPL

SEQ ID NO: 270 - protein, 30 aa, synthetic construct; identical to SEQ ID NO: 9

SEQ ID NO: 271 - protein, 52 aa, synthetic construct
MPQNEYIELHRKRYGYRLDYHEKKRKKESREAHERSKKAKKMIGLKAKLYHK

SEQ ID NO: 272 - protein, 10 aa, synthetic construct
MVQLRPRASR

SEQ ID NO: 273 - protein, 24 aa, synthetic construct
NNKLLAKRRKGGASPKDDPMDDIK

SEQ ID NO: 274 - protein, 20 aa, synthetic construct
NYKRPMDGTYGPPAKRHEGE

SEQ ID NO: 275 - protein, 19 aa, synthetic construct
PDTKRAKLDSSETTMVKKK

SEQ ID NO: 276 - protein, 7 aa, synthetic construct
PEKRTKI

SEQ ID NO: 277 - protein, 8 aa, synthetic construct
PGGRGKKK

SEQ ID NO: 278 - protein, 18 aa, synthetic construct
PGKMDKGEHRQERRDRPY

SEQ ID NO: 279 - protein, 11 aa, synthetic construct
PKKGDKYDKTD

SEQ ID NO: 280 - protein, 7 aa, synthetic construct
PKKKSRK

SEQ ID NO: 281 - protein, 7 aa, synthetic construct
PKKNKPE

SEQ ID NO: 282 - protein, 7 aa, synthetic construct
PKKRAKV

SEQ ID NO: 283 - protein, 9 aa, synthetic construct
PKPKKLKVE

SEQ ID NO: 284 - protein, 7 aa, synthetic construct
PKRGRGR

SEQ ID NO: 285 - protein, 9 aa, synthetic construct
PKRRLVDDA

SEQ ID NO: 286 - protein, 7 aa, synthetic construct
PKRRRTY

SEQ ID NO: 287 - protein, 6 aa, synthetic construct
PLFKRR

SEQ ID NO: 288 - protein, 7 aa, synthetic construct
PLRKAKR

SEQ ID NO: 289 - protein, 9 aa, synthetic construct
PPAKRKCIF

SEQ ID NO: 290 - protein, 8 aa, synthetic construct
PPARRRRL

SEQ ID NO: 291 - protein, 8 aa, synthetic construct
PPKKKRKV

SEQ ID NO: 292 - protein, 10 aa, synthetic construct
PPNKRMKVKH

SEQ ID NO: 293 - protein, 13 aa, synthetic construct
PPRIYPQLPSAPT

SEQ ID NO: 294 - protein, 13 aa, synthetic construct
PQRSPFPKSSVKR

SEQ ID NO: 295 - protein, 8 aa, synthetic construct
PRPRKVPR

SEQ ID NO: 296 - protein, 9 aa, synthetic construct
PRRRVQRKR

SEQ ID NO: 297 - protein, 7 aa, synthetic construct
PRRVRLK

SEQ ID NO: 298 - protein, 7 aa, synthetic construct
PSRKRPR

SEQ ID NO: 299 - protein, 8 aa, synthetic construct
PSSKKRKV

SEQ ID NO: 300 - protein, 7 aa, synthetic construct
PTKKRVK

SEQ ID NO: 301 - protein, 9 aa, synthetic construct
QRPGPYDRP

SEQ ID NO: 302 - protein, 18 aa, synthetic construct
RGKGGKGLGKGGAKRHRK

SEQ ID NO: 303 - protein, 24 aa, synthetic construct
RKAGKGGGGHKTTKKRSAKDEKVP

SEQ ID NO: 304 - protein, 9 aa, synthetic construct
RKIKLKRAK

SEQ ID NO: 305 - protein, 9 aa, synthetic construct
RKIKRKRAK

SEQ ID NO: 306 - protein, 17 aa, synthetic construct
RKKEAPGPREELRSRGR

SEQ ID NO: 307 - protein, 7 aa, synthetic construct
RKKRKGK

SEQ ID NO: 308 - protein, 9 aa, synthetic construct
RKKRRQRRR

SEQ ID NO: 309 - protein, 25 aa, synthetic construct
RKKSIPLSIKNLKRKHKRKKNKITR

SEQ ID NO: 310 - protein, 20 aa, synthetic construct
RKLVKPKNTKMKTKLRTNPY

SEQ ID NO: 311 - protein, 16 aa, synthetic construct
RKRLILSDKGQLDWKK

SEQ ID NO: 312 - protein, 7 aa, synthetic construct
RKRLKSK

SEQ ID NO: 313 - protein, 9 aa, synthetic construct
RKRRVRDNM

SEQ ID NO: 314 - protein, 22 aa, synthetic construct
RKRSPKDKKEKDLDGAGKRRKT

SEQ ID NO: 315 - protein, 22 aa, synthetic construct
RKRTPRVDGQTGENDMNKRRRK

SEQ ID NO: 316 - protein, 10 aa, synthetic construct
RLPVRRRRRR

SEQ ID NO: 317 - protein, 10 aa, synthetic construct
RLRFRKPKSK

SEQ ID NO: 318 - protein, 6 aa, synthetic construct
RQQRKR

SEQ ID NO: 319 - protein, 16 aa, synthetic construct
RRDLNSSFETSPKKVK

SEQ ID NO: 320 - protein, 8 aa, synthetic construct
RRDRAKLR

SEQ ID NO: 321 - protein, 8 aa, synthetic construct
RRGDGRRR

SEQ ID NO: 322 - protein, 11 aa, synthetic construct
RRGRKRKAEKQ

SEQ ID NO: 323 - protein, 6 aa, synthetic construct
RRKKRR

SEQ ID NO: 324 - protein, 19 aa, synthetic construct
RRKRSKSEDMDSVESKRRR

SEQ ID NO: 325 - protein, 6 aa, synthetic construct
RRKRSR

SEQ ID NO: 326 - protein, 14 aa, synthetic construct
RRPKGKTLQKRKPK

SEQ ID NO: 327 - protein, 18 aa, synthetic construct
RRRGFERFGPDNMGRKRK

SEQ ID NO: 328 - protein, 15 aa, synthetic construct
RRRGKNKVAAQNCRK

SEQ ID NO: 329 - protein, 6 aa, synthetic construct
RRRKRR

SEQ ID NO: 330 - protein, 14 aa, synthetic construct
RRRQKQKGGASRRR

SEQ ID NO: 331 - protein, 13 aa, synthetic construct
RRRREGPRARRRR

SEQ ID NO: 332 - protein, 61 aa, synthetic construct
RRTIRLKLVYDKCDRSCKIQKKNRNKCQYCRFHKCLSVGMSHNAIRFGRMPRSEKAKLKAE

SEQ ID NO: 333 - protein, 17 aa, synthetic construct
RRVPQRKEVSRCRKCRK

SEQ ID NO: 334 - protein, 32 aa, synthetic construct
RVGGRRQAVECIEDLLNEPGQPLDLSCKRPRP

SEQ ID NO: 335 - protein, 9 aa, synthetic construct
RVVKLRIAP

SEQ ID NO: 336 - protein, 6 aa, synthetic construct
RVVRRR

SEQ ID NO: 337 - protein, 12 aa, synthetic construct
SKRKTKISRKTR

SEQ ID NO: 338 - protein, 16 aa, synthetic construct
SYVKTVPNRTRTYIKL

SEQ ID NO: 339 - protein, 12 aa, synthetic construct
TGKNEAKKRKIA

SEQ ID NO: 340 - protein, 30 aa, synthetic construct
TLSPASSPSSVSCPVIPASTDESPGSALNI

SEQ ID NO: 341 - protein, 12 aa, synthetic construct
VSKKQRTGKKIH

SEQ ID NO: 342 - protein, 9 aa, synthetic construct
SPKKKRKVE

SEQ ID NO: 343 - protein, 19 aa, synthetic construct
KRTADGSEFESPKKKRKVE

SEQ ID NO: 344 - protein, 9 aa, synthetic construct
PAAKRVKLD

SEQ ID NO: 345 - protein, 7 aa, synthetic construct
PKKKRKV

SEQ ID NO: 346 - protein, 30 aa, synthetic construct; identical to SEQ ID NO: 9

SEQ ID NO: 347 - protein, 11 aa, synthetic construct
SPKKKRKVEAS

SEQ ID NO: 348 - protein, 16 aa, synthetic construct
MAPKKKRKVGIHRGVP

SEQ ID NO: 349 - protein, 2090 aa, synthetic construct
MPAAKRVKLDGGDKKYSIGLDIGTNSVGWAVITDEYKVPSKKFKVLGNTDRHSIKKNLIGALLFDSGETAEATRLKRTARRRYTRRKNRICYLQEIFSNEMAKVDDSFFHRLEESFLVEEDKKHERHPIFGNIVDEVAYHEKYPTIYHLRKKLVDSTDKADLRLIYLALAHMIKFRGHFLIEGDLNPDNSDVDKLFIQLVQTYNQLFEENPINASGVDAKAILSARLSKSRRLENLIAQLPGEKKNGLFGNLIALSLGLTPNFKSNFDLAEDAKLQLSKDTYDDDLDNLLAQIGDQYADLFLAAKNLSDAILLSDILRVNTEITKAPLSASMIKRYDEHHQDLTLLKALVRQQLPEKYKEIFFDQSKNGYAGYIDGGASQEEFYKFIKPILEKMDGTEELLVKLNREDLLRKQRTFDNGSIPHQIHLGELHAILRRQEDFYPFLKDNREKIEKILTFRIPYYVGPLARGNSRFAWMTRKSEETITPWNFEEVVDKGASAQSFIERMTNFDKNLPNEKVLPKHSLLYEYFTVYNELTKVKYVTEGMRKPAFLSGEQKKAIVDLLFKTNRKVTVKQLKEDYFKKIECFDSVEISGVEDRFNASLGTYHDLLKIIKDKDFLDNEENEDILEDIVLTLTLFEDREMIEERLKTYAHLFDDKVMKQLKRRRYTGWGRLSRKLINGIRDKQSGKTILDFLKSDGFANRNFMQLIHDDSLTFKEDIQKAQVSGQGDSLHEHIANLAGSPAIKKGILQTVKVVDELVKVMGRHKPENIVIEMARENQTTQKGQKNSRERMKRIEEGIKELGSQILKEHPVENTQLQNEKLYLYYLQNGRDMYVDQELDINRLSDYDVDHIVPQSFLKDDSIDNKVLTRSDKARGKSDNVPSEEVVKKMKNYWRQLLNAKLITQRKFDNLTKAERGGLSELDKAGFIKRQLVETRQITKHVAQILDSRMNTKYDENDKLIREVKVITLKSKLVSDFRKDFQFYKVREINNYHHAHDAYLNAVVGTALIKKYPKLESEFVYGDYKVYDVRKMIAKSEQEIGKATAKYFFYSNIMNFFKTEITLANGEIRKRPLIETNGETGEIVWDKGRDFATVRKVLSMPQVNIVKKTEVQTGGFSKESILPKRNSDKLIARKKDWDPKKYGGFDSPTVAYSVLVVAKVEKGKSKKLKSVKELLGITIMERSSFEKNPIDFLEAKGYKEVKKDLIIKLPKYSLFELENGRKRMLASAGELQKGNELALPSKYVNFLYLASHYEKLKGSPEDNEQKQLFVEQHKHYLDEIIEQISEFSKRVILADANLDKVLSAYNKHRDKPIREQAENIIHLFTLTNLGAPAAFKYFDTTIDRKRYTSTKEVLDATLIHQSITGLYETRIDLSQLGGDGGEAAAKGGSGSSGGTLQLDDEYRLYSPLVKPDQNIQFWLEQFPQAWAETAGMGLAKQVPPQVIQLKASATPVSVRQYPLSKEAQEGIRPHVQRLIQQGILVPVQSPWNTPLLPVRKPGTNDYRPVQDLREVNKRVQDIHPTVPNPYNLLCALPPQRSWYTVLDLKDAFFCLRLHPTSQPLFAFEWRDPGTGRTGQLTWTRLPQGFKNSPTIFNEALHRDLANFRIQHPQVTLLQYVDDLLLAGATKQDCLEGTKALLLELSDLGYRASAKKAQICRREVTYLGYSLRDGQRWLTEARKKTVVQIPAPTTAKQVREFLGTAGFCRLWIPGFATLAAPLYPLTKPKGEFSWAPEHQKAFDAIKKALLSAPALALPDVTKPFTLYVDERKGVARGVLTQTLGPWRRPVAYLSKKLDPVASGWPVCLKAIAAVAILVKDADKLTLGQNITVIAPHALENIVRQPPDRWMTNARMTHYQSLLLTERVTFAPPAALNPATLLPEETDEPVTHDCHQLLIEETGVRKDLTDIPLTGEVLTWFTDGSSYVVEGKRMAGAAVVDGTRTIWASSLPEGTSAQKAELMALTQALRLAEGKSINIYTDSRYAFATAHVHGAIYKQRGWLTSAGREIKNKEEILSLLEALHLPKRLAIIHCPGHQKAKDPISRGNQMADRVAKQAAQGVNLLAGKRTADGSEFEKRTADGSEFESPKKKAKVE

SEQ ID NO: 350 - protein, 2090 aa, synthetic construct
MPAAKRVKLDGGDKKYSIGLDIGTNSVGWAVITDEYKVPSKKFKVLGNTDRHSIKKNLIGALLFDSGETAEATRLKRTARRRYTRRKNRICYLQEIFSNEMAKVDDSFFHRLEESFLVEEDKKHERHPIFGNIVDEVAYHEKYPTIYHLRKKLVDSTDKADLRLIYLALAHMIKFRGHFLIEGDLNPDNSDVDKLFIQLVQTYNQLFEENPINASGVDAKAILSARLSKSRRLENLIAQLPGEKKNGLFGNLIALSLGLTPNFKSNFDLAEDAKLQLSKDTYDDDLDNLLAQIGDQYADLFLAAKNLSDAILLSDILRVNTEITKAPLSASMIKRYDEHHQDLTLLKALVRQQLPEKYKEIFFDQSKNGYAGYIDGGASQEEFYKFIKPILEKMDGTEELLVKLNREDLLRKQRTFDNGSIPHQIHLGELHAILRRQEDFYPFLKDNREKIEKILTFRIPYYVGPLARGNSRFAWMTRKSEETITPWNFEEVVDKGASAQSFIERMTNFDKNLPNEKVLPKHSLLYEYFTVYNELTKVKYVTEGMRKPAFLSGEQKKAIVDLLFKTNRKVTVKQLKEDYFKKIECFDSVEISGVEDRFNASLGTYHDLLKIIKDKDFLDNEENEDILEDIVLTLTLFEDREMIEERLKTYAHLFDDKVMKQLKRRRYTGWGRLSRKLINGIRDKQSGKTILDFLKSDGFANRNFMQLIHDDSLTFKEDIQKAQVSGQGDSLHEHIANLAGSPAIKKGILQTVKVVDELVKVMGRHKPENIVIEMARENQTTQKGQKNSRERMKRIEEGIKELGSQILKEHPVENTQLQNEKLYLYYLQNGRDMYVDQELDINRLSDYDVDHIVPQSFLKDDSIDNKVLTRSDKARGKSDNVPSEEVVKKMKNYWRQLLNAKLITQRKFDNLTKAERGGLSELDKAGFIKRQLVETRQITKHVAQILDSRMNTKYDENDKLIREVKVITLKSKLVSDFRKDFQFYKVREINNYHHAHDAYLNAVVGTALIKKYPKLESEFVYGDYKVYDVRKMIAKSEQEIGKATAKYFFYSNIMNFFKTEITLANGEIRKRPLIETNGETGEIVWDKGRDFATVRKVLSMPQVNIVKKTEVQTGGFSKESILPKRNSDKLIARKKDWDPKKYGGFDSPTVAYSVLVVAKVEKGKSKKLKSVKELLGITIMERSSFEKNPIDFLEAKGYKEVKKDLIIKLPKYSLFELENGRKRMLASAGELQKGNELALPSKYVNFLYLASHYEKLKGSPEDNEQKQLFVEQHKHYLDEIIEQISEFSKRVILADANLDKVLSAYNKHRDKPIREQAENIIHLFTLTNLGAPAAFKYFDTTIDRKRYTSTKEVLDATLIHQSITGLYETRIDLSQLGGDGGPAPAPAPAPAPGGTLQLDDEYRLYSPLVKPDQNIQFWLEQFPQAWAETAGMGLAKQVPPQVIQLKASATPVSVRQYPLSKEAQEGIRPHVQRLIQQGILVPVQSPWNTPLLPVRKPGTNDYRPVQDLREVNKRVQDIHPTVPNPYNLLCALPPQRSWYTVLDLKDAFFCLRLHPTSQPLFAFEWRDPGTGRTGQLTWTRLPQGFKNSPTIFNEALHRDLANFRIQHPQVTLLQYVDDLLLAGATKQDCLEGTKALLLELSDLGYRASAKKAQICRREVTYLGYSLRDGQRWLTEARKKTVVQIPAPTTAKQVREFLGTAGFCRLWIPGFATLAAPLYPLTKPKGEFSWAPEHQKAFDAIKKALLSAPALALPDVTKPFTLYVDERKGVARGVLTQTLGPWRRPVAYLSKKLDPVASGWPVCLKAIAAVAILVKDADKLTLGQNITVIAPHALENIVRQPPDRWMTNARMTHYQSLLLTERVTFAPPAALNPATLLPEETDEPVTHDCHQLLIEETGVRKDLTDIPLTGEVLTWFTDGSSYVVEGKRMAGAAVVDGTRTIWASSLPEGTSAQKAELMALTQALRLAEGKSINIYTDSRYAFATAHVHGAIYKQRGWLTSAGREIKNKEEILSLLEALHLPKRLAIIHCPGHQKAKDPISRGNQMADRVAKQAAQGVNLLAGKRTADGSEFEKRTADGSEFESPKKKAKVE

SEQ ID NO: 351 - protein, 2099 aa, synthetic construct
MPAAKRVKLDGGDKKYSIGLDIGTNSVGWAVITDEYKVPSKKFKVLGNTDRHSIKKNLIGALLFDSGETAEATRLKRTARRRYTRRKNRICYLQEIFSNEMAKVDDSFFHRLEESFLVEEDKKHERHPIFGNIVDEVAYHEKYPTIYHLRKKLVDSTDKADLRLIYLALAHMIKFRGHFLIEGDLNPDNSDVDKLFIQLVQTYNQLFEENPINASGVDAKAILSARLSKSRRLENLIAQLPGEKKNGLFGNLIALSLGLTPNFKSNFDLAEDAKLQLSKDTYDDDLDNLLAQIGDQYADLFLAAKNLSDAILLSDILRVNTEITKAPLSASMIKRYDEHHQDLTLLKALVRQQLPEKYKEIFFDQSKNGYAGYIDGGASQEEFYKFIKPILEKMDGTEELLVKLNREDLLRKQRTFDNGSIPHQIHLGELHAILRRQEDFYPFLKDNREKIEKILTFRIPYYVGPLARGNSRFAWMTRKSEETITPWNFEEVVDKGASAQSFIERMTNFDKNLPNEKVLPKHSLLYEYFTVYNELTKVKYVTEGMRKPAFLSGEQKKAIVDLLFKTNRKVTVKQLKEDYFKKIECFDSVEISGVEDRFNASLGTYHDLLKIIKDKDFLDNEENEDILEDIVLTLTLFEDREMIEERLKTYAHLFDDKVMKQLKRRRYTGWGRLSRKLINGIRDKQSGKTILDFLKSDGFANRNFMQLIHDDSLTFKEDIQKAQVSGQGDSLHEHIANLAGSPAIKKGILQTVKVVDELVKVMGRHKPENIVIEMARENQTTQKGQKNSRERMKRIEEGIKELGSQILKEHPVENTQLQNEKLYLYYLQNGRDMYVDQELDINRLSDYDVDHIVPQSFLKDDSIDNKVLTRSDKARGKSDNVPSEEVVKKMKNYWRQLLNAKLITQRKFDNLTKAERGGLSELDKAGFIKRQLVETRQITKHVAQILDSRMNTKYDENDKLIREVKVITLKSKLVSDFRKDFQFYKVREINNYHHAHDAYLNAVVGTALIKKYPKLESEFVYGDYKVYDVRKMIAKSEQEIGKATAKYFFYSNIMNFFKTEITLANGEIRKRPLIETNGETGEIVWDKGRDFATVRKVLSMPQVNIVKKTEVQTGGFSKESILPKRNSDKLIARKKDWDPKKYGGFDSPTVAYSVLVVAKVEKGKSKKLKSVKELLGITIMERSSFEKNPIDFLEAKGYKEVKKDLIIKLPKYSLFELENGRKRMLASAGELQKGNELALPSKYVNFLYLASHYEKLKGSPEDNEQKQLFVEQHKHYLDEIIEQISEFSKRVILADANLDKVLSAYNKHRDKPIREQAENIIHLFTLTNLGAPAAFKYFDTTIDRKRYTSTKEVLDATLIHQSITGLYETRIDLSQLGGDGGEAAAKEAAAKEAAAKEAAAKGGTLQLDDEYRLYSPLVKPDQNIQFWLEQFPQAWAETAGMGLAKQVPPQVIQLKASATPVSVRQYPLSKEAQEGIRPHVQRLIQQGILVPVQSPWNTPLLPVRKPGTNDYRPVQDLREVNKRVQDIHPTVPNPYNLLCALPPQRSWYTVLDLKDAFFCLRLHPTSQPLFAFEWRDPGTGRTGQLTWTRLPQGFKNSPTIFNEALHRDLANFRIQHPQVTLLQYVDDLLLAGATKQDCLEGTKALLLELSDLGYRASAKKAQICRREVTYLGYSLRDGQRWLTEARKKTVVQIPAPTTAKQVREFLGTAGFCRLWIPGFATLAAPLYPLTKPKGEFSWAPEHQKAFDAIKKALLSAPALALPDVTKPFTLYVDERKGVARGVLTQTLGPWRRPVAYLSKKLDPVASGWPVCLKAIAAVAILVKDADKLTLGQNITVIAPHALENIVRQPPDRWMTNARMTHYQSLLLTERVTFAPPAALNPATLLPEETDEPVTHDCHQLLIEETGVRKDLTDIPLTGEVLTWFTDGSSYVVEGKRMAGAAVVDGTRTIWASSLPEGTSAQKAELMALTQALRLAEGKSINIYTDSRYAFATAHVHGAIYKQRGWLTSAGREIKNKEEILSLLEALHLPKRLAIIHCPGHQKAKDPISRGNQMADRVAKQAAQGVNLLAGKRTADGSEFEKRTADGSEFESPKKKAKVE

SEQ ID NO: 352 - protein, 2090 aa, synthetic construct
MPAAKRVKLDGGDKKYSIGLDIGTNSVGWAVITDEYKVPSKKFKVLGNTDRHSIKKNLIGALLFDSGETAEATRLKRTARRRYTRRKNRICYLQEIFSNEMAKVDDSFFHRLEESFLVEEDKKHERHPIFGNIVDEVAYHEKYPTIYHLRKKLVDSTDKADLRLIYLALAHMIKFRGHFLIEGDLNPDNSDVDKLFIQLVQTYNQLFEENPINASGVDAKAILSARLSKSRRLENLIAQLPGEKKNGLFGNLIALSLGLTPNFKSNFDLAEDAKLQLSKDTYDDDLDNLLAQIGDQYADLFLAAKNLSDAILLSDILRVNTEITKAPLSASMIKRYDEHHQDLTLLKALVRQQLPEKYKEIFFDQSKNGYAGYIDGGASQEEFYKFIKPILEKMDGTEELLVKLNREDLLRKQRTFDNGSIPHQIHLGELHAILRRQEDFYPFLKDNREKIEKILTFRIPYYVGPLARGNSRFAWMTRKSEETITPWNFEEVVDKGASAQSFIERMTNFDKNLPNEKVLPKHSLLYEYFTVYNELTKVKYVTEGMRKPAFLSGEQKKAIVDLLFKTNRKVTVKQLKEDYFKKIECFDSVEISGVEDRFNASLGTYHDLLKIIKDKDFLDNEENEDILEDIVLTLTLFEDREMIEERLKTYAHLFDDKVMKQLKRRRYTGWGRLSRKLINGIRDKQSGKTILDFLKSDGFANRNFMQLIHDDSLTFKEDIQKAQVSGQGDSLHEHIANLAGSPAIKKGILQTVKVVDELVKVMGRHKPENIVIEMARENQTTQKGQKNSRERMKRIEEGIKELGSQILKEHPVENTQLQNEKLYLYYLQNGRDMYVDQELDINRLSDYDVDHIVPQSFLKDDSIDNKVLTRSDKARGKSDNVPSEEVVKKMKNYWRQLLNAKLITQRKFDNLTKAERGGLSELDKAGFIKRQLVETRQITKHVAQILDSRMNTKYDENDKLIREVKVITLKSKLVSDFRKDFQFYKVREINNYHHAHDAYLNAVVGTALIKKYPKLESEFVYGDYKVYDVRKMIAKSEQEIGKATAKYFFYSNIMNFFKTEITLANGEIRKRPLIETNGETGEIVWDKGRDFATVRKVLSMPQVNIVKKTEVQTGGFSKESILPKRNSDKLIARKKDWDPKKYGGFDSPTVAYSVLVVAKVEKGKSKKLKSVKELLGITIMERSSFEKNPIDFLEAKGYKEVKKDLIIKLPKYSLFELENGRKRMLASAGELQKGNELALPSKYVNFLYLASHYEKLKGSPEDNEQKQLFVEQHKHYLDEIIEQISEFSKRVILADANLDKVLSAYNKHRDKPIREQAENIIHLFTLTNLGAPAAFKYFDTTIDRKRYTSTKEVLDATLIHQSITGLYETRIDLSQLGGDGGGGSEAAAKGGGGGTLQLDDEYRLYSPLVKPDQNIQFWLEQFPQAWAETAGMGLAKQVPPQVIQLKASATPVSVRQYPLSKEAQEGIRPHVQRLIQQGILVPVQSPWNTPLLPVRKPGTNDYRPVQDLREVNKRVQDIHPTVPNPYNLLCALPPQRSWYTVLDLKDAFFCLRLHPTSQPLFAFEWRDPGTGRTGQLTWTRLPQGFKNSPTIFNEALHRDLANFRIQHPQVTLLQYVDDLLLAGATKQDCLEGTKALLLELSDLGYRASAKKAQICRREVTYLGYSLRDGQRWLTEARKKTVVQIPAPTTAKQVREFLGTAGFCRLWIPGFATLAAPLYPLTKPKGEFSWAPEHQKAFDAIKKALLSAPALALPDVTKPFTLYVDERKGVARGVLTQTLGPWRRPVAYLSKKLDPVASGWPVCLKAIAAVAILVKDADKLTLGQNITVIAPHALENIVRQPPDRWMTNARMTHYQSLLLTERVTFAPPAALNPATLLPEETDEPVTHDCHQLLIEETGVRKDLTDIPLTGEVLTWFTDGSSYVVEGKRMAGAAVVDGTRTIWASSLPEGTSAQKAELMALTQALRLAEGKSINIYTDSRYAFATAHVHGAIYKQRGWLTSAGREIKNKEEILSLLEALHLPKRLAIIHCPGHQKAKDPISRGNQMADRVAKQAAQGVNLLAGKRTADGSEFEKRTADGSEFESPKKKAKVE

SEQ ID NO: 353 - protein, 2085 aa, synthetic construct
MPAAKRVKLDGGDKKYSIGLDIGTNSVGWAVITDEYKVPSKKFKVLGNTDRHSIKKNLIGALLFDSGETAEATRLKRTARRRYTRRKNRICYLQEIFSNEMAKVDDSFFHRLEESFLVEEDKKHERHPIFGNIVDEVAYHEKYPTIYHLRKKLVDSTDKADLRLIYLALAHMIKFRGHFLIEGDLNPDNSDVDKLFIQLVQTYNQLFEENPINASGVDAKAILSARLSKSRRLENLIAQLPGEKKNGLFGNLIALSLGLTPNFKSNFDLAEDAKLQLSKDTYDDDLDNLLAQIGDQYADLFLAAKNLSDAILLSDILRVNTEITKAPLSASMIKRYDEHHQDLTLLKALVRQQLPEKYKEIFFDQSKNGYAGYIDGGASQEEFYKFIKPILEKMDGTEELLVKLNREDLLRKQRTFDNGSIPHQIHLGELHAILRRQEDFYPFLKDNREKIEKILTFRIPYYVGPLARGNSRFAWMTRKSEETITPWNFEEVVDKGASAQSFIERMTNFDKNLPNEKVLPKHSLLYEYFTVYNELTKVKYVTEGMRKPAFLSGEQKKAIVDLLFKTNRKVTVKQLKEDYFKKIECFDSVEISGVEDRFNASLGTYHDLLKIIKDKDFLDNEENEDILEDIVLTLTLFEDREMIEERLKTYAHLFDDKVMKQLKRRRYTGWGRLSRKLINGIRDKQSGKTILDFLKSDGFANRNFMQLIHDDSLTFKEDIQKAQVSGQGDSLHEHIANLAGSPAIKKGILQTVKVVDELVKVMGRHKPENIVIEMARENQTTQKGQKNSRERMKRIEEGIKELGSQILKEHPVENTQLQNEKLYLYYLQNGRDMYVDQELDINRLSDYDVDHIVPQSFLKDDSIDNKVLTRSDKARGKSDNVPSEEVVKKMKNYWRQLLNAKLITQRKFDNLTKAERGGLSELDKAGFIKRQLVETRQITKHVAQILDSRMNTKYDENDKLIREVKVITLKSKLVSDFRKDFQFYKVREINNYHHAHDAYLNAVVGTALIKKYPKLESEFVYGDYKVYDVRKMIAKSEQEIGKATAKYFFYSNIMNFFKTEITLANGEIRKRPLIETNGETGEIVWDKGRDFATVRKVLSMPQVNIVKKTEVQTGGFSKESILPKRNSDKLIARKKDWDPKKYGGFDSPTVAYSVLVVAKVEKGKSKKLKSVKELLGITIMERSSFEKNPIDFLEAKGYKEVKKDLIIKLPKYSLFELENGRKRMLASAGELQKGNELALPSKYVNFLYLASHYEKLKGSPEDNEQKQLFVEQHKHYLDEIIEQISEFSKRVILADANLDKVLSAYNKHRDKPIREQAENIIHLFTLTNLGAPAAFKYFDTTIDRKRYTSTKEVLDATLIHQSITGLYETRIDLSQLGGDGGGGGGGGGGTLQLDDEYRLYSPLVKPDQNIQFWLEQFPQAWAETAGMGLAKQVPPQVIQLKASATPVSVRQYPLSKEAQEGIRPHVQRLIQQGILVPVQSPWNTPLLPVRKPGTNDYRPVQDLREVNKRVQDIHPTVPNPYNLLCALPPQRSWYTVLDLKDAFFCLRLHPTSQPLFAFEWRDPGTGRTGQLTWTRLPQGFKNSPTIFNEALHRDLANFRIQHPQVTLLQYVDDLLLAGATKQDCLEGTKALLLELSDLGYRASAKKAQICRREVTYLGYSLRDGQRWLTEARKKTVVQIPAPTTAKQVREFLGTAGFCRLWIPGFATLAAPLYPLTKPKGEFSWAPEHQKAFDAIKKALLSAPALALPDVTKPFTLYVDERKGVARGVLTQTLGPWRRPVAYLSKKLDPVASGWPVCLKAIAAVAILVKDADKLTLGQNITVIAPHALENIVRQPPDRWMTNARMTHYQSLLLTERVTFAPPAALNPATLLPEETDEPVTHDCHQLLIEETGVRKDLTDIPLTGEVLTWFTDGSSYVVEGKRMAGAAVVDGTRTIWASSLPEGTSAQKAELMALTQALRLAEGKSINIYTDSRYAFATAHVHGAIYKQRGWLTSAGREIKNKEEILSLLEALHLPKRLAIIHCPGHQKAKDPISRGNQMADRVAKQAAQGVNLLAGKRTADGSEFEKRTADGSEFESPKKKAKVE

SEQ ID NO: 354 - protein, 2090 aa, synthetic construct
MPAAKRVKLDGGDKKYSIGLDIGTNSVGWAVITDEYKVPSKKFKVLGNTDRHSIKKNLIGALLFDSGETAEATRLKRTARRRYTRRKNRICYLQEIFSNEMAKVDDSFFHRLEESFLVEEDKKHERHPIFGNIVDEVAYHEKYPTIYHLRKKLVDSTDKADLRLIYLALAHMIKFRGHFLIEGDLNPDNSDVDKLFIQLVQTYNQLFEENPINASGVDAKAILSARLSKSRRLENLIAQLPGEKKNGLFGNLIALSLGLTPNFKSNFDLAEDAKLQLSKDTYDDDLDNLLAQIGDQYADLFLAAKNLSDAILLSDILRVNTEITKAPLSASMIKRYDEHHQDLTLLKALVRQQLPEKYKEIFFDQSKNGYAGYIDGGASQEEFYKFIKPILEKMDGTEELLVKLNREDLLRKQRTFDNGSIPHQIHLGELHAILRRQEDFYPFLKDNREKIEKILTFRIPYYVGPLARGNSRFAWMTRKSEETITPWNFEEVVDKGASAQSFIERMTNFDKNLPNEKVLPKHSLLYEYFTVYNELTKVKYVTEGMRKPAFLSGEQKKAIVDLLFKTNRKVTVKQLKEDYFKKIECFDSVEISGVEDRFNASLGTYHDLLKIIKDKDFLDNEENEDILEDIVLTLTLFEDREMIEERLKTYAHLFDDKVMKQLKRRRYTGWGRLSRKLINGIRDKQSGKTILDFLKSDGFANRNFMQLIHDDSLTFKEDIQKAQVSGQGDSLHEHIANLAGSPAIKKGILQTVKVVDELVKVMGRHKPENIVIEMARENQTTQKGQKNSRERMKRIEEGIKELGSQILKEHPVENTQLQNEKLYLYYLQNGRDMYVDQELDINRLSDYDVDHIVPQSFLKDDSIDNKVLTRSDKARGKSDNVPSEEVVKKMKNYWRQLLNAKLITQRKFDNLTKAERGGLSELDKAGFIKRQLVETRQITKHVAQILDSRMNTKYDENDKLIREVKVITLKSKLVSDFRKDFQFYKVREINNYHHAHDAYLNAVVGTALIKKYPKLESEFVYGDYKVYDVRKMIAKSEQEIGKATAKYFFYSNIMNFFKTEITLANGEIRKRPLIETNGETGEIVWDKGRDFATVRKVLSMPQVNIVKKTEVQTGGFSKESILPKRNSDKLIARKKDWDPKKYGGFDSPTVAYSVLVVAKVEKGKSKKLKSVKELLGITIMERSSFEKNPIDFLEAKGYKEVKKDLIIKLPKYSLFELENGRKRMLASAGELQKGNELALPSKYVNFLYLASHYEKLKGSPEDNEQKQLFVEQHKHYLDEIIEQISEFSKRVILADANLDKVLSAYNKHRDKPIREQAENIIHLFTLTNLGAPAAFKYFDTTIDRKRYTSTKEVLDATLIHQSITGLYETRIDLSQLGGDGGEAAAKGGGGGSGGTLQLDDEYRLYSPLVKPDQNIQFWLEQFPQAWAETAGMGLAKQVPPQVIQLKASATPVSVRQYPLSKEAQEGIRPHVQRLIQQGILVPVQSPWNTPLLPVRKPGTNDYRPVQDLREVNKRVQDIHPTVPNPYNLLCALPPQRSWYTVLDLKDAFFCLRLHPTSQPLFAFEWRDPGTGRTGQLTWTRLPQGFKNSPTIFNEALHRDLANFRIQHPQVTLLQYVDDLLLAGATKQDCLEGTKALLLELSDLGYRASAKKAQICRREVTYLGYSLRDGQRWLTEARKKTVVQIPAPTTAKQVREFLGTAGFCRLWIPGFATLAAPLYPLTKPKGEFSWAPEHQKAFDAIKKALLSAPALALPDVTKPFTLYVDERKGVARGVLTQTLGPWRRPVAYLSKKLDPVASGWPVCLKAIAAVAILVKDADKLTLGQNITVIAPHALENIVRQPPDRWMTNARMTHYQSLLLTERVTFAPPAALNPATLLPEETDEPVTHDCHQLLIEETGVRKDLTDIPLTGEVLTWFTDGSSYVVEGKRMAGAAVVDGTRTIWASSLPEGTSAQKAELMALTQALRLAEGKSINIYTDSRYAFATAHVHGAIYKQRGWLTSAGREIKNKEEILSLLEALHLPKRLAIIHCPGHQKAKDPISRGNQMADRVAKQAAQGVNLLAGKRTADGSEFEKRTADGSEFESPKKKAKVE

SEQ ID NO: 355 - protein, 2099 aa, synthetic construct
MPAAKRVKLDGGDKKYSIGLDIGTNSVGWAVITDEYKVPSKKFKVLGNTDRHSIKKNLIGALLFDSGETAEATRLKRTARRRYTRRKNRICYLQEIFSNEMAKVDDSFFHRLEESFLVEEDKKHERHPIFGNIVDEVAYHEKYPTIYHLRKKLVDSTDKADLRLIYLALAHMIKFRGHFLIEGDLNPDNSDVDKLFIQLVQTYNQLFEENPINASGVDAKAILSARLSKSRRLENLIAQLPGEKKNGLFGNLIALSLGLTPNFKSNFDLAEDAKLQLSKDTYDDDLDNLLAQIGDQYADLFLAAKNLSDAILLSDILRVNTEITKAPLSASMIKRYDEHHQDLTLLKALVRQQLPEKYKEIFFDQSKNGYAGYIDGGASQEEFYKFIKPILEKMDGTEELLVKLNREDLLRKQRTFDNGSIPHQIHLGELHAILRRQEDFYPFLKDNREKIEKILTFRIPYYVGPLARGNSRFAWMTRKSEETITPWNFEEVVDKGASAQSFIERMTNFDKNLPNEKVLPKHSLLYEYFTVYNELTKVKYVTEGMRKPAFLSGEQKKAIVDLLFKTNRKVTVKQLKEDYFKKIECFDSVEISGVEDRFNASLGTYHDLLKIIKDKDFLDNEENEDILEDIVLTLTLFEDREMIEERLKTYAHLFDDKVMKQLKRRRYTGWGRLSRKLINGIRDKQSGKTILDFLKSDGFANRNFMQLIHDDSLTFKEDIQKAQVSGQGDSLHEHIANLAGSPAIKKGILQTVKVVDELVKVMGRHKPENIVIEMARENQTTQKGQKNSRERMKRIEEGIKELGSQILKEHPVENTQLQNEKLYLYYLQNGRDMYVDQELDINRLSDYDVDHIVPQSFLKDDSIDNKVLTRSDKARGKSDNVPSEEVVKKMKNYWRQLLNAKLITQRKFDNLTKAERGGLSELDKAGFIKRQLVETRQITKHVAQILDSRMNTKYDENDKLIREVKVITLKSKLVSDFRKDFQFYKVREINNYHHAHDAYLNAVVGTALIKKYPKLESEFVYGDYKVYDVRKMIAKSEQEIGKATAKYFFYSNIMNFFKTEITLANGEIRKRPLIETNGETGEIVWDKGRDFATVRKVLSMPQVNIVKKTEVQTGGFSKESILPKRNSDKLIARKKDWDPKKYGGFDSPTVAYSVLVVAKVEKGKSKKLKSVKELLGITIMERSSFEKNPIDFLEAKGYKEVKKDLIIKLPKYSLFELENGRKRMLASAGELQKGNELALPSKYVNFLYLASHYEKLKGSPEDNEQKQLFVEQHKHYLDEIIEQISEFSKRVILADANLDKVLSAYNKHRDKPIREQAENIIHLFTLTNLGAPAAFKYFDTTIDRKRYTSTKEVLDATLIHQSITGLYETRIDLSQLGGDGGGGGGSGGGGSGGGGSGGGGSGGTLQLDDEYRLYSPLVKPDQNIQFWLEQFPQAWAETAGMGLAKQVPPQVIQLKASATPVSVRQYPLSKEAQEGIRPHVQRLIQQGILVPVQSPWNTPLLPVRKPGTNDYRPVQDLREVNKRVQDIHPTVPNPYNLLCALPPQRSWYTVLDLKDAFFCLRLHPTSQPLFAFEWRDPGTGRTGQLTWTRLPQGFKNSPTIFNEALHRDLANFRIQHPQVTLLQYVDDLLLAGATKQDCLEGTKALLLELSDLGYRASAKKAQICRREVTYLGYSLRDGQRWLTEARKKTVVQIPAPTTAKQVREFLGTAGFCRLWIPGFATLAAPLYPLTKPKGEFSWAPEHQKAFDAIKKALLSAPALALPDVTKPFTLYVDERKGVARGVLTQTLGPWRRPVAYLSKKLDPVASGWPVCLKAIAAVAILVKDADKLTLGQNITVIAPHALENIVRQPPDRWMTNARMTHYQSLLLTERVTFAPPAALNPATLLPEETDEPVTHDCHQLLIEETGVRKDLTDIPLTGEVLTWFTDGSSYVVEGKRMAGAAVVDGTRTIWASSLPEGTSAQKAELMALTQALRLAEGKSINIYTDSRYAFATAHVHGAIYKQRGWLTSAGREIKNKEEILSLLEALHLPKRLAIIHCPGHQKAKDPISRGNQMADRVAKQAAQGVNLLAGKRTADGSEFEKRTADGSEFESPKKKAKVE

SEQ ID NO: 356 - protein, 2085 aa, synthetic construct
MPAAKRVKLDGGDKKYSIGLDIGTNSVGWAVITDEYKVPSKKFKVLGNTDRHSIKKNLIGALLFDSGETAEATRLKRTARRRYTRRKNRICYLQEIFSNEMAKVDDSFFHRLEESFLVEEDKKHERHPIFGNIVDEVAYHEKYPTIYHLRKKLVDSTDKADLRLIYLALAHMIKFRGHFLIEGDLNPDNSDVDKLFIQLVQTYNQLFEENPINASGVDAKAILSARLSKSRRLENLIAQLPGEKKNGLFGNLIALSLGLTPNFKSNFDLAEDAKLQLSKDTYDDDLDNLLAQIGDQYADLFLAAKNLSDAILLSDILRVNTEITKAPLSASMIKRYDEHHQDLTLLKALVRQQLPEKYKEIFFDQSKNGYAGYIDGGASQEEFYKFIKPILEKMDGTEELLVKLNREDLLRKQRTFDNGSIPHQIHLGELHAILRRQEDFYPFLKDNREKIEKILTFRIPYYVGPLARGNSRFAWMTRKSEETITPWNFEEVVDKGASAQSFIERMTNFDKNLPNEKVLPKHSLLYEYFTVYNELTKVKYVTEGMRKPAFLSGEQKKAIVDLLFKTNRKVTVKQLKEDYFKKIECFDSVEISGVEDRFNASLGTYHDLLKIIKDKDFLDNEENEDILEDIVLTLTLFEDREMIEERLKTYAHLFDDKVMKQLKRRRYTGWGRLSRKLINGIRDKQSGKTILDFLKSDGFANRNFMQLIHDDSLTFKEDIQKAQVSGQGDSLHEHIANLAGSPAIKKGILQTVKVVDELVKVMGRHKPENIVIEMARENQTTQKGQKNSRERMKRIEEGIKELGSQILKEHPVENTQLQNEKLYLYYLQNGRDMYVDQELDINRLSDYDVDHIVPQSFLKDDSIDNKVLTRSDKARGKSDNVPSEEVVKKMKNYWRQLLNAKLITQRKFDNLTKAERGGLSELDKAGFIKRQLVETRQITKHVAQILDSRMNTKYDENDKLIREVKVITLKSKLVSDFRKDFQFYKVREINNYHHAHDAYLNAVVGTALIKKYPKLESEFVYGDYKVYDVRKMIAKSEQEIGKATAKYFFYSNIMNFFKTEITLANGEIRKRPLIETNGETGEIVWDKGRDFATVRKVLSMPQVNIVKKTEVQTGGFSKESILPKRNSDKLIARKKDWDPKKYGGFDSPTVAYSVLVVAKVEKGKSKKLKSVKELLGITIMERSSFEKNPIDFLEAKGYKEVKKDLIIKLPKYSLFELENGRKRMLASAGELQKGNELALPSKYVNFLYLASHYEKLKGSPEDNEQKQLFVEQHKHYLDEIIEQISEFSKRVILADANLDKVLSAYNKHRDKPIREQAENIIHLFTLTNLGAPAAFKYFDTTIDRKRYTSTKEVLDATLIHQSITGLYETRIDLSQLGGDGGPAPGGSGGTLQLDDEYRLYSPLVKPDQNIQFWLEQFPQAWAETAGMGLAKQVPPQVIQLKASATPVSVRQYPLSKEAQEGIRPHVQRLIQQGILVPVQSPWNTPLLPVRKPGTNDYRPVQDLREVNKRVQDIHPTVPNPYNLLCALPPQRSWYTVLDLKDAFFCLRLHPTSQPLFAFEWRDPGTGRTGQLTWTRLPQGFKNSPTIFNEALHRDLANFRIQHPQVTLLQYVDDLLLAGATKQDCLEGTKALLLELSDLGYRASAKKAQICRREVTYLGYSLRDGQRWLTEARKKTVVQIPAPTTAKQVREFLGTAGFCRLWIPGFATLAAPLYPLTKPKGEFSWAPEHQKAFDAIKKALLSAPALALPDVTKPFTLYVDERKGVARGVLTQTLGPWRRPVAYLSKKLDPVASGWPVCLKAIAAVAILVKDADKLTLGQNITVIAPHALENIVRQPPDRWMTNARMTHYQSLLLTERVTFAPPAALNPATLLPEETDEPVTHDCHQLLIEETGVRKDLTDIPLTGEVLTWFTDGSSYVVEGKRMAGAAVVDGTRTIWASSLPEGTSAQKAELMALTQALRLAEGKSINIYTDSRYAFATAHVHGAIYKQRGWLTSAGREIKNKEEILSLLEALHLPKRLAIIHCPGHQKAKDPISRGNQMADRVAKQAAQGVNLLAGKRTADGSEFEKRTADGSEFESPKKKAKVE

SEQ ID NO: 357 - protein, 2091 aa, synthetic construct
MPAAKRVKLDGGDKKYSIGLDIGTNSVGWAVITDEYKVPSKKFKVLGNTDRHSIKKNLIGALLFDSGETAEATRLKRTARRRYTRRKNRICYLQEIFSNEMAKVDDSFFHRLEESFLVEEDKKHERHPIFGNIVDEVAYHEKYPTIYHLRKKLVDSTDKADLRLIYLALAHMIKFRGHFLIEGDLNPDNSDVDKLFIQLVQTYNQLFEENPINASGVDAKAILSARLSKSRRLENLIAQLPGEKKNGLFGNLIALSLGLTPNFKSNFDLAEDAKLQLSKDTYDDDLDNLLAQIGDQYADLFLAAKNLSDAILLSDILRVNTEITKAPLSASMIKRYDEHHQDLTLLKALVRQQLPEKYKEIFFDQSKNGYAGYIDGGASQEEFYKFIKPILEKMDGTEELLVKLNREDLLRKQRTFDNGSIPHQIHLGELHAILRRQEDFYPFLKDNREKIEKILTFRIPYYVGPLARGNSRFAWMTRKSEETITPWNFEEVVDKGASAQSFIERMTNFDKNLPNEKVLPKHSLLYEYFTVYNELTKVKYVTEGMRKPAFLSGEQKKAIVDLLFKTNRKVTVKQLKEDYFKKIECFDSVEISGVEDRFNASLGTYHDLLKIIKDKDFLDNEENEDILEDIVLTLTLFEDREMIEERLKTYAHLFDDKVMKQLKRRRYTGWGRLSRKLINGIRDKQSGKTILDFLKSDGFANRNFMQLIHDDSLTFKEDIQKAQVSGQGDSLHEHIANLAGSPAIKKGILQTVKVVDELVKVMGRHKPENIVIEMARENQTTQKGQKNSRERMKRIEEGIKELGSQILKEHPVENTQLQNEKLYLYYLQNGRDMYVDQELDINRLSDYDVDHIVPQSFLKDDSIDNKVLTRSDKARGKSDNVPSEEVVKKMKNYWRQLLNAKLITQRKFDNLTKAERGGLSELDKAGFIKRQLVETRQITKHVAQILDSRMNTKYDENDKLIREVKVITLKSKLVSDFRKDFQFYKVREINNYHHAHDAYLNAVVGTALIKKYPKLESEFVYGDYKVYDVRKMIAKSEQEIGKATAKYFFYSNIMNFFKTEITLANGEIRKRPLIETNGETGEIVWDKGRDFATVRKVLSMPQVNIVKKTEVQTGGFSKESILPKRNSDKLIARKKDWDPKKYGGFDSPTVAYSVLVVAKVEKGKSKKLKSVKELLGITIMERSSFEKNPIDFLEAKGYKEVKKDLIIKLPKYSLFELENGRKRMLASAGELQKGNELALPSKYVNFLYLASHYEKLKGSPEDNEQKQLFVEQHKHYLDEIIEQISEFSKRVILADANLDKVLSAYNKHRDKPIREQAENIIHLFTLTNLGAPAAFKYFDTTIDRKRYTSTKEVLDATLIHQSITGLYETRIDLSQLGGDGGGSSGSSGSSGSSGGTLQLDDEYRLYSPLVKPDQNIQFWLEQFPQAWAETAGMGLAKQVPPQVIQLKASATPVSVRQYPLSKEAQEGIRPHVQRLIQQGILVPVQSPWNTPLLPVRKPGTNDYRPVQDLREVNKRVQDIHPTVPNPYNLLCALPPQRSWYTVLDLKDAFFCLRLHPTSQPLFAFEWRDPGTGRTGQLTWTRLPQGFKNSPTIFNEALHRDLANFRIQHPQVTLLQYVDDLLLAGATKQDCLEGTKALLLELSDLGYRASAKKAQICRREVTYLGYSLRDGQRWLTEARKKTVVQIPAPTTAKQVREFLGTAGFCRLWIPGFATLAAPLYPLTKPKGEFSWAPEHQKAFDAIKKALLSAPALALPDVTKPFTLYVDERKGVARGVLTQTLGPWRRPVAYLSKKLDPVASGWPVCLKAIAAVAILVKDADKLTLGQNITVIAPHALENIVRQPPDRWMTNARMTHYQSLLLTERVTFAPPAALNPATLLPEETDEPVTHDCHQLLIEETGVRKDLTDIPLTGEVLTWFTDGSSYVVEGKRMAGAAVVDGTRTIWASSLPEGTSAQKAELMALTQALRLAEGKSINIYTDSRYAFATAHVHGAIYKQRGWLTSAGREIKNKEEILSLLEALHLPKRLAIIHCPGHQKAKDPISRGNQMADRVAKQAAQGVNLLAGKRTADGSEFEKRTADGSEFESPKKKAKVE

SEQ ID NO: 358 - protein, 2090 aa, synthetic construct
MPAAKRVKLDGGDKKYSIGLDIGTNSVGWAVITDEYKVPSKKFKVLGNTDRHSIKKNLIGALLFDSGETAEATRLKRTARRRYTRRKNRICYLQEIFSNEMAKVDDSFFHRLEESFLVEEDKKHERHPIFGNIVDEVAYHEKYPTIYHLRKKLVDSTDKADLRLIYLALAHMIKFRGHFLIEGDLNPDNSDVDKLFIQLVQTYNQLFEENPINASGVDAKAILSARLSKSRRLENLIAQLPGEKKNGLFGNLIALSLGLTPNFKSNFDLAEDAKLQLSKDTYDDDLDNLLAQIGDQYADLFLAAKNLSDAILLSDILRVNTEITKAPLSASMIKRYDEHHQDLTLLKALVRQQLPEKYKEIFFDQSKNGYAGYIDGGASQEEFYKFIKPILEKMDGTEELLVKLNREDLLRKQRTFDNGSIPHQIHLGELHAILRRQEDFYPFLKDNREKIEKILTFRIPYYVGPLARGNSRFAWMTRKSEETITPWNFEEVVDKGASAQSFIERMTNFDKNLPNEKVLPKHSLLYEYFTVYNELTKVKYVTEGMRKPAFLSGEQKKAIVDLLFKTNRKVTVKQLKEDYFKKIECFDSVEISGVEDRFNASLGTYHDLLKIIKDKDFLDNEENEDILEDIVLTLTLFEDREMIEERLKTYAHLFDDKVMKQLKRRRYTGWGRLSRKLINGIRDKQSGKTILDFLKSDGFANRNFMQLIHDDSLTFKEDIQKAQVSGQGDSLHEHIANLAGSPAIKKGILQTVKVVDELVKVMGRHKPENIVIEMARENQTTQKGQKNSRERMKRIEEGIKELGSQILKEHPVENTQLQNEKLYLYYLQNGRDMYVDQELDINRLSDYDVDHIVPQSFLKDDSIDNKVLTRSDKARGKSDNVPSEEVVKKMKNYWRQLLNAKLITQRKFDNLTKAERGGLSELDKAGFIKRQLVETRQITKHVAQILDSRMNTKYDENDKLIREVKVITLKSKLVSDFRKDFQFYKVREINNYHHAHDAYLNAVVGTALIKKYPKLESEFVYGDYKVYDVRKMIAKSEQEIGKATAKYFFYSNIMNFFKTEITLANGEIRKRPLIETNGETGEIVWDKGRDFATVRKVLSMPQVNIVKKTEVQTGGFSKESILPKRNSDKLIARKKDWDPKKYGGFDSPTVAYSVLVVAKVEKGKSKKLKSVKELLGITIMERSSFEKNPIDFLEAKGYKEVKKDLIIKLPKYSLFELENGRKRMLASAGELQKGNELALPSKYVNFLYLASHYEKLKGSPEDNEQKQLFVEQHKHYLDEIIEQISEFSKRVILADANLDKVLSAYNKHRDKPIREQAENIIHLFTLTNLGAPAAFKYFDTTIDRKRYTSTKEVLDATLIHQSITGLYETRIDLSQLGGDGGEAAAKPAPGGGGGTLQLDDEYRLYSPLVKPDQNIQFWLEQFPQAWAETAGMGLAKQVPPQVIQLKASATPVSVRQYPLSKEAQEGIRPHVQRLIQQGILVPVQSPWNTPLLPVRKPGTNDYRPVQDLREVNKRVQDIHPTVPNPYNLLCALPPQRSWYTVLDLKDAFFCLRLHPTSQPLFAFEWRDPGTGRTGQLTWTRLPQGFKNSPTIFNEALHRDLANFRIQHPQVTLLQYVDDLLLAGATKQDCLEGTKALLLELSDLGYRASAKKAQICRREVTYLGYSLRDGQRWLTEARKKTVVQIPAPTTAKQVREFLGTAGFCRLWIPGFATLAAPLYPLTKPKGEFSWAPEHQKAFDAIKKALLSAPALALPDVTKPFTLYVDERKGVARGVLTQTLGPWRRPVAYLSKKLDPVASGWPVCLKAIAAVAILVKDADKLTLGQNITVIAPHALENIVRQPPDRWMTNARMTHYQSLLLTERVTFAPPAALNPATLLPEETDEPVTHDCHQLLIEETGVRKDLTDIPLTGEVLTWFTDGSSYVVEGKRMAGAAVVDGTRTIWASSLPEGTSAQKAELMALTQALRLAEGKSINIYTDSRYAFATAHVHGAIYKQRGWLTSAGREIKNKEEILSLLEALHLPKRLAIIHCPGHQKAKDPISRGNQMADRVAKQAAQGVNLLAGKRTADGSEFEKRTADGSEFESPKKKAKVE

SEQ ID NO: 359 - protein, 2088 aa, synthetic construct
MPAAKRVKLDGGDKKYSIGLDIGTNSVGWAVITDEYKVPSKKFKVLGNTDRHSIKKNLIGALLFDSGETAEATRLKRTARRRYTRRKNRICYLQEIFSNEMAKVDDSFFHRLEESFLVEEDKKHERHPIFGNIVDEVAYHEKYPTIYHLRKKLVDSTDKADLRLIYLALAHMIKFRGHFLIEGDLNPDNSDVDKLFIQLVQTYNQLFEENPINASGVDAKAILSARLSKSRRLENLIAQLPGEKKNGLFGNLIALSLGLTPNFKSNFDLAEDAKLQLSKDTYDDDLDNLLAQIGDQYADLFLAAKNLSDAILLSDILRVNTEITKAPLSASMIKRYDEHHQDLTLLKALVRQQLPEKYKEIFFDQSKNGYAGYIDGGASQEEFYKFIKPILEKMDGTEELLVKLNREDLLRKQRTFDNGSIPHQIHLGELHAILRRQEDFYPFLKDNREKIEKILTFRIPYYVGPLARGNSRFAWMTRKSEETITPWNFEEVVDKGASAQSFIERMTNFDKNLPNEKVLPKHSLLYEYFTVYNELTKVKYVTEGMRKPAFLSGEQKKAIVDLLFKTNRKVTVKQLKEDYFKKIECFDSVEISGVEDRFNASLGTYHDLLKIIKDKDFLDNEENEDILEDIVLTLTLFEDREMIEERLKTYAHLFDDKVMKQLKRRRYTGWGRLSRKLINGIRDKQSGKTILDFLKSDGFANRNFMQLIHDDSLTFKEDIQKAQVSGQGDSLHEHIANLAGSPAIKKGILQTVKVVDELVKVMGRHKPENIVIEMARENQTTQKGQKNSRERMKRIEEGIKELGSQILKEHPVENTQLQNEKLYLYYLQNGRDMYVDQELDINRLSDYDVDHIVPQSFLKDDSIDNKVLTRSDKARGKSDNVPSEEVVKKMKNYWRQLLNAKLITQRKFDNLTKAERGGLSELDKAGFIKRQLVETRQITKHVAQILDSRMNTKYDENDKLIREVKVITLKSKLVSDFRKDFQFYKVREINNYHHAHDAYLNAVVGTALIKKYPKLESEFVYGDYKVYDVRKMIAKSEQEIGKATAKYFFYSNIMNFFKTEITLANGEIRKRPLIETNGETGEIVWDKGRDFATVRKVLSMPQVNIVKKTEVQTGGFSKESILPKRNSDKLIARKKDWDPKKYGGFDSPTVAYSVLVVAKVEKGKSKKLKSVKELLGITIMERSSFEKNPIDFLEAKGYKEVKKDLIIKLPKYSLFELENGRKRMLASAGELQKGNELALPSKYVNFLYLASHYEKLKGSPEDNEQKQLFVEQHKHYLDEIIEQISEFSKRVILADANLDKVLSAYNKHRDKPIREQAENIIHLFTLTNLGAPAAFKYFDTTIDRKRYTSTKEVLDATLIHQSITGLYETRIDLSQLGGDGGGGSPAPGSSGGTLQLDDEYRLYSPLVKPDQNIQFWLEQFPQAWAETAGMGLAKQVPPQVIQLKASATPVSVRQYPLSKEAQEGIRPHVQRLIQQGILVPVQSPWNTPLLPVRKPGTNDYRPVQDLREVNKRVQDIHPTVPNPYNLLCALPPQRSWYTVLDLKDAFFCLRLHPTSQPLFAFEWRDPGTGRTGQLTWTRLPQGFKNSPTIFNEALHRDLANFRIQHPQVTLLQYVDDLLLAGATKQDCLEGTKALLLELSDLGYRASAKKAQICRREVTYLGYSLRDGQRWLTEARKKTVVQIPAPTTAKQVREFLGTAGFCRLWIPGFATLAAPLYPLTKPKGEFSWAPEHQKAFDAIKKALLSAPALALPDVTKPFTLYVDERKGVARGVLTQTLGPWRRPVAYLSKKLDPVASGWPVCLKAIAAVAILVKDADKLTLGQNITVIAPHALENIVRQPPDRWMTNARMTHYQSLLLTERVTFAPPAALNPATLLPEETDEPVTHDCHQLLIEETGVRKDLTDIPLTGEVLTWFTDGSSYVVEGKRMAGAAVVDGTRTIWASSLPEGTSAQKAELMALTQALRLAEGKSINIYTDSRYAFATAHVHGAIYKQRGWLTSAGREIKNKEEILSLLEALHLPKRLAIIHCPGHQKAKDPISRGNQMADRVAKQAAQGVNLLAGKRTADGSEFEKRTADGSEFESPKKKAKVE

SEQ ID NO: 360 - protein, 2087 aa, synthetic construct
MPAAKRVKLDGGDKKYSIGLDIGTNSVGWAVITDEYKVPSKKFKVLGNTDRHSIKKNLIGALLFDSGETAEATRLKRTARRRYTRRKNRICYLQEIFSNEMAKVDDSFFHRLEESFLVEEDKKHERHPIFGNIVDEVAYHEKYPTIYHLRKKLVDSTDKADLRLIYLALAHMIKFRGHFLIEGDLNPDNSDVDKLFIQLVQTYNQLFEENPINASGVDAKAILSARLSKSRRLENLIAQLPGEKKNGLFGNLIALSLGLTPNFKSNFDLAEDAKLQLSKDTYDDDLDNLLAQIGDQYADLFLAAKNLSDAILLSDILRVNTEITKAPLSASMIKRYDEHHQDLTLLKALVRQQLPEKYKEIFFDQSKNGYAGYIDGGASQEEFYKFIKPILEKMDGTEELLVKLNREDLLRKQRTFDNGSIPHQIHLGELHAILRRQEDFYPFLKDNREKIEKILTFRIPYYVGPLARGNSRFAWMTRKSEETITPWNFEEVVDKGASAQSFIERMTNFDKNLPNEKVLPKHSLLYEYFTVYNELTKVKYVTEGMRKPAFLSGEQKKAIVDLLFKTNRKVTVKQLKEDYFKKIECFDSVEISGVEDRFNASLGTYHDLLKIIKDKDFLDNEENEDILEDIVLTLTLFEDREMIEERLKTYAHLFDDKVMKQLKRRRYTGWGRLSRKLINGIRDKQSGKTILDFLKSDGFANRNFMQLIHDDSLTFKEDIQKAQVSGQGDSLHEHIANLAGSPAIKKGILQTVKVVDELVKVMGRHKPENIVIEMARENQTTQKGQKNSRERMKRIEEGIKELGSQILKEHPVENTQLQNEKLYLYYLQNGRDMYVDQELDINRLSDYDVDHIVPQSFLKDDSIDNKVLTRSDKARGKSDNVPSEEVVKKMKNYWRQLLNAKLITQRKFDNLTKAERGGLSELDKAGFIKRQLVETRQITKHVAQILDSRMNTKYDENDKLIREVKVITLKSKLVSDFRKDFQFYKVREINNYHHAHDAYLNAVVGTALIKKYPKLESEFVYGDYKVYDVRKMIAKSEQEIGKATAKYFFYSNIMNFFKTEITLANGEIRKRPLIETNGETGEIVWDKGRDFATVRKVLSMPQVNIVKKTEVQTGGFSKESILPKRNSDKLIARKKDWDPKKYGGFDSPTVAYSVLVVAKVEKGKSKKLKSVKELLGITIMERSSFEKNPIDFLEAKGYKEVKKDLIIKLPKYSLFELENGRKRMLASAGELQKGNELALPSKYVNFLYLASHYEKLKGSPEDNEQKQLFVEQHKHYLDEIIEQISEFSKRVILADANLDKVLSAYNKHRDKPIREQAENIIHLFTLTNLGAPAAFKYFDTTIDRKRYTSTKEVLDATLIHQSITGLYETRIDLSQLGGDGGEAAAKGSSGGTLQLDDEYRLYSPLVKPDQNIQFWLEQFPQAWAETAGMGLAKQVPPQVIQLKASATPVSVRQYPLSKEAQEGIRPHVQRLIQQGILVPVQSPWNTPLLPVRKPGTNDYRPVQDLREVNKRVQDIHPTVPNPYNLLCALPPQRSWYTVLDLKDAFFCLRLHPTSQPLFAFEWRDPGTGRTGQLTWTRLPQGFKNSPTIFNEALHRDLANFRIQHPQVTLLQYVDDLLLAGATKQDCLEGTKALLLELSDLGYRASAKKAQICRREVTYLGYSLRDGQRWLTEARKKTVVQIPAPTTAKQVREFLGTAGFCRLWIPGFATLAAPLYPLTKPKGEFSWAPEHQKAFDAIKKALLSAPALALPDVTKPFTLYVDERKGVARGVLTQTLGPWRRPVAYLSKKLDPVASGWPVCLKAIAAVAILVKDADKLTLGQNITVIAPHALENIVRQPPDRWMTNARMTHYQSLLLTERVTFAPPAALNPATLLPEETDEPVTHDCHQLLIEETGVRKDLTDIPLTGEVLTWFTDGSSYVVEGKRMAGAAVVDGTRTIWASSLPEGTSAQKAELMALTQALRLAEGKSINIYTDSRYAFATAHVHGAIYKQRGWLTSAGREIKNKEEILSLLEALHLPKRLAIIHCPGHQKAKDPISRGNQMADRVAKQAAQGVNLLAGKRTADGSEFEKRTADGSEFESPKKKAKVE

SEQ ID NO: 361 - protein, 2090 aa, synthetic construct
MPAAKRVKLDGGDKKYSIGLDIGTNSVGWAVITDEYKVPSKKFKVLGNTDRHSIKKNLIGALLFDSGETAEATRLKRTARRRYTRRKNRICYLQEIFSNEMAKVDDSFFHRLEESFLVEEDKKHERHPIFGNIVDEVAYHEKYPTIYHLRKKLVDSTDKADLRLIYLALAHMIKFRGHFLIEGDLNPDNSDVDKLFIQLVQTYNQLFEENPINASGVDAKAILSARLSKSRRLENLIAQLPGEKKNGLFGNLIALSLGLTPNFKSNFDLAEDAKLQLSKDTYDDDLDNLLAQIGDQYADLFLAAKNLSDAILLSDILRVNTEITKAPLSASMIKRYDEHHQDLTLLKALVRQQLPEKYKEIFFDQSKNGYAGYIDGGASQEEFYKFIKPILEKMDGTEELLVKLNREDLLRKQRTFDNGSIPHQIHLGELHAILRRQEDFYPFLKDNREKIEKILTFRIPYYVGPLARGNSRFAWMTRKSEETITPWNFEEVVDKGASAQSFIERMTNFDKNLPNEKVLPKHSLLYEYFTVYNELTKVKYVTEGMRKPAFLSGEQKKAIVDLLFKTNRKVTVKQLKEDYFKKIECFDSVEISGVEDRFNASLGTYHDLLKIIKDKDFLDNEENEDILEDIVLTLTLFEDREMIEERLKTYAHLFDDKVMKQLKRRRYTGWGRLSRKLINGIRDKQSGKTILDFLKSDGFANRNFMQLIHDDSLTFKEDIQKAQVSGQGDSLHEHIANLAGSPAIKKGILQTVKVVDELVKVMGRHKPENIVIEMARENQTTQKGQKNSRERMKRIEEGIKELGSQILKEHPVENTQLQNEKLYLYYLQNGRDMYVDQELDINRLSDYDVDHIVPQSFLKDDSIDNKVLTRSDKARGKSDNVPSEEVVKKMKNYWRQLLNAKLITQRKFDNLTKAERGGLSELDKAGFIKRQLVETRQITKHVAQILDSRMNTKYDENDKLIREVKVITLKSKLVSDFRKDFQFYKVREINNYHHAHDAYLNAVVGTALIKKYPKLESEFVYGDYKVYDVRKMIAKSEQEIGKATAKYFFYSNIMNFFKTEITLANGEIRKRPLIETNGETGEIVWDKGRDFATVRKVLSMPQVNIVKKTEVQTGGFSKESILPKRNSDKLIARKKDWDPKKYGGFDSPTVAYSVLVVAKVEKGKSKKLKSVKELLGITIMERSSFEKNPIDFLEAKGYKEVKKDLIIKLPKYSLFELENGRKRMLASAGELQKGNELALPSKYVNFLYLASHYEKLKGSPEDNEQKQLFVEQHKHYLDEIIEQISEFSKRVILADANLDKVLSAYNKHRDKPIREQAENIIHLFTLTNLGAPAAFKYFDTTIDRKRYTSTKEVLDATLIHQSITGLYETRIDLSQLGGDGGGSSEAAAKGGSGGTLQLDDEYRLYSPLVKPDQNIQFWLEQFPQAWAETAGMGLAKQVPPQVIQLKASATPVSVRQYPLSKEAQEGIRPHVQRLIQQGILVPVQSPWNTPLLPVRKPGTNDYRPVQDLREVNKRVQDIHPTVPNPYNLLCALPPQRSWYTVLDLKDAFFCLRLHPTSQPLFAFEWRDPGTGRTGQLTWTRLPQGFKNSPTIFNEALHRDLANFRIQHPQVTLLQYVDDLLLAGATKQDCLEGTKALLLELSDLGYRASAKKAQICRREVTYLGYSLRDGQRWLTEARKKTVVQIPAPTTAKQVREFLGTAGFCRLWIPGFATLAAPLYPLTKPKGEFSWAPEHQKAFDAIKKALLSAPALALPDVTKPFTLYVDERKGVARGVLTQTLGPWRRPVAYLSKKLDPVASGWPVCLKAIAAVAILVKDADKLTLGQNITVIAPHALENIVRQPPDRWMTNARMTHYQSLLLTERVTFAPPAALNPATLLPEETDEPVTHDCHQLLIEETGVRKDLTDIPLTGEVLTWFTDGSSYVVEGKRMAGAAVVDGTRTIWASSLPEGTSAQKAELMALTQALRLAEGKSINIYTDSRYAFATAHVHGAIYKQRGWLTSAGREIKNKEEILSLLEALHLPKRLAIIHCPGHQKAKDPISRGNQMADRVAKQAAQGVNLLAGKRTADGSEFEKRTADGSEFESPKKKAKVE

SEQ ID NO: 362 - protein, 2087 aa, synthetic construct
MPAAKRVKLDGGDKKYSIGLDIGTNSVGWAVITDEYKVPSKKFKVLGNTDRHSIKKNLIGALLFDSGETAEATRLKRTARRRYTRRKNRICYLQEIFSNEMAKVDDSFFHRLEESFLVEEDKKHERHPIFGNIVDEVAYHEKYPTIYHLRKKLVDSTDKADLRLIYLALAHMIKFRGHFLIEGDLNPDNSDVDKLFIQLVQTYNQLFEENPINASGVDAKAILSARLSKSRRLENLIAQLPGEKKNGLFGNLIALSLGLTPNFKSNFDLAEDAKLQLSKDTYDDDLDNLLAQIGDQYADLFLAAKNLSDAILLSDILRVNTEITKAPLSASMIKRYDEHHQDLTLLKALVRQQLPEKYKEIFFDQSKNGYAGYIDGGASQEEFYKFIKPILEKMDGTEELLVKLNREDLLRKQRTFDNGSIPHQIHLGELHAILRRQEDFYPFLKDNREKIEKILTFRIPYYVGPLARGNSRFAWMTRKSEETITPWNFEEVVDKGASAQSFIERMTNFDKNLPNEKVLPKHSLLYEYFTVYNELTKVKYVTEGMRKPAFLSGEQKKAIVDLLFKTNRKVTVKQLKEDYFKKIECFDSVEISGVEDRFNASLGTYHDLLKIIKDKDFLDNEENEDILEDIVLTLTLFEDREMIEERLKTYAHLFDDKVMKQLKRRRYTGWGRLSRKLINGIRDKQSGKTILDFLKSDGFANRNFMQLIHDDSLTFKEDIQKAQVSGQGDSLHEHIANLAGSPAIKKGILQTVKVVDELVKVMGRHKPENIVIEMARENQTTQKGQKNSRERMKRIEEGIKELGSQILKEHPVENTQLQNEKLYLYYLQNGRDMYVDQELDINRLSDYDVDHIVPQSFLKDDSIDNKVLTRSDKARGKSDNVPSEEVVKKMKNYWRQLLNAKLITQRKFDNLTKAERGGLSELDKAGFIKRQLVETRQITKHVAQILDSRMNTKYDENDKLIREVKVITLKSKLVSDFRKDFQFYKVREINNYHHAHDAYLNAVVGTALIKKYPKLESEFVYGDYKVYDVRKMIAKSEQEIGKATAKYFFYSNIMNFFKTEITLANGEIRKRPLIETNGETGEIVWDKGRDFATVRKVLSMPQVNIVKKTEVQTGGFSKESILPKRNSDKLIARKKDWDPKKYGGFDSPTVAYSVLVVAKVEKGKSKKLKSVKELLGITIMERSSFEKNPIDFLEAKGYKEVKKDLIIKLPKYSLFELENGRKRMLASAGELQKGNELALPSKYVNFLYLASHYEKLKGSPEDNEQKQLFVEQHKHYLDEIIEQISEFSKRVILADANLDKVLSAYNKHRDKPIREQAENIIHLFTLTNLGAPAAFKYFDTTIDRKRYTSTKEVLDATLIHQSITGLYETRIDLSQLGGDGGGGGGGGGGGGTLQLDDEYRLYSPLVKPDQNIQFWLEQFPQAWAETAGMGLAKQVPPQVIQLKASATPVSVRQYPLSKEAQEGIRPHVQRLIQQGILVPVQSPWNTPLLPVRKPGTNDYRPVQDLREVNKRVQDIHPTVPNPYNLLCALPPQRSWYTVLDLKDAFFCLRLHPTSQPLFAFEWRDPGTGRTGQLTWTRLPQGFKNSPTIFNEALHRDLANFRIQHPQVTLLQYVDDLLLAGATKQDCLEGTKALLLELSDLGYRASAKKAQICRREVTYLGYSLRDGQRWLTEARKKTVVQIPAPTTAKQVREFLGTAGFCRLWIPGFATLAAPLYPLTKPKGEFSWAPEHQKAFDAIKKALLSAPALALPDVTKPFTLYVDERKGVARGVLTQTLGPWRRPVAYLSKKLDPVASGWPVCLKAIAAVAILVKDADKLTLGQNITVIAPHALENIVRQPPDRWMTNARMTHYQSLLLTERVTFAPPAALNPATLLPEETDEPVTHDCHQLLIEETGVRKDLTDIPLTGEVLTWFTDGSSYVVEGKRMAGAAVVDGTRTIWASSLPEGTSAQKAELMALTQALRLAEGKSINIYTDSRYAFATAHVHGAIYKQRGWLTSAGREIKNKEEILSLLEALHLPKRLAIIHCPGHQKAKDPISRGNQMADRVAKQAAQGVNLLAGKRTADGSEFEKRTADGSEFESPKKKAKVE

SEQ ID NO: 363 - protein, 2090 aa, synthetic construct
MPAAKRVKLDGGDKKYSIGLDIGTNSVGWAVITDEYKVPSKKFKVLGNTDRHSIKKNLIGALLFDSGETAEATRLKRTARRRYTRRKNRICYLQEIFSNEMAKVDDSFFHRLEESFLVEEDKKHERHPIFGNIVDEVAYHEKYPTIYHLRKKLVDSTDKADLRLIYLALAHMIKFRGHFLIEGDLNPDNSDVDKLFIQLVQTYNQLFEENPINASGVDAKAILSARLSKSRRLENLIAQLPGEKKNGLFGNLIALSLGLTPNFKSNFDLAEDAKLQLSKDTYDDDLDNLLAQIGDQYADLFLAAKNLSDAILLSDILRVNTEITKAPLSASMIKRYDEHHQDLTLLKALVRQQLPEKYKEIFFDQSKNGYAGYIDGGASQEEFYKFIKPILEKMDGTEELLVKLNREDLLRKQRTFDNGSIPHQIHLGELHAILRRQEDFYPFLKDNREKIEKILTFRIPYYVGPLARGNSRFAWMTRKSEETITPWNFEEVVDKGASAQSFIERMTNFDKNLPNEKVLPKHSLLYEYFTVYNELTKVKYVTEGMRKPAFLSGEQKKAIVDLLFKTNRKVTVKQLKEDYFKKIECFDSVEISGVEDRFNASLGTYHDLLKIIKDKDFLDNEENEDILEDIVLTLTLFEDREMIEERLKTYAHLFDDKVMKQLKRRRYTGWGRLSRKLINGIRDKQSGKTILDFLKSDGFANRNFMQLIHDDSLTFKEDIQKAQVSGQGDSLHEHIANLAGSPAIKKGILQTVKVVDELVKVMGRHKPENIVIEMARENQTTQKGQKNSRERMKRIEEGIKELGSQILKEHPVENTQLQNEKLYLYYLQNGRDMYVDQELDINRLSDYDVDHIVPQSFLKDDSIDNKVLTRSDKARGKSDNVPSEEVVKKMKNYWRQLLNAKLITQRKFDNLTKAERGGLSELDKAGFIKRQLVETRQITKHVAQILDSRMNTKYDENDKLIREVKVITLKSKLVSDFRKDFQFYKVREINNYHHAHDAYLNAVVGTALIKKYPKLESEFVYGDYKVYDVRKMIAKSEQEIGKATAKYFFYSNIMNFFKTEITLANGEIRKRPLIETNGETGEIVWDKGRDFATVRKVLSMPQVNIVKKTEVQTGGFSKESILPKRNSDKLIARKKDWDPKKYGGFDSPTVAYSVLVVAKVEKGKSKKLKSVKELLGITIMERSSFEKNPIDFLEAKGYKEVKKDLIIKLPKYSLFELENGRKRMLASAGELQKGNELALPSKYVNFLYLASHYEKLKGSPEDNEQKQLFVEQHKHYLDEIIEQISEFSKRVILADANLDKVLSAYNKHRDKPIREQAENIIHLFTLTNLGAPAAFKYFDTTIDRKRYTSTKEVLDATLIHQSITGLYETRIDLSQLGGDGGGGSGSSEAAAKGGTLQLDDEYRLYSPLVKPDQNIQFWLEQFPQAWAETAGMGLAKQVPPQVIQLKASATPVSVRQYPLSKEAQEGIRPHVQRLIQQGILVPVQSPWNTPLLPVRKPGTNDYRPVQDLREVNKRVQDIHPTVPNPYNLLCALPPQRSWYTVLDLKDAFFCLRLHPTSQPLFAFEWRDPGTGRTGQLTWTRLPQGFKNSPTIFNEALHRDLANFRIQHPQVTLLQYVDDLLLAGATKQDCLEGTKALLLELSDLGYRASAKKAQICRREVTYLGYSLRDGQRWLTEARKKTVVQIPAPTTAKQVREFLGTAGFCRLWIPGFATLAAPLYPLTKPKGEFSWAPEHQKAFDAIKKALLSAPALALPDVTKPFTLYVDERKGVARGVLTQTLGPWRRPVAYLSKKLDPVASGWPVCLKAIAAVAILVKDADKLTLGQNITVIAPHALENIVRQPPDRWMTNARMTHYQSLLLTERVTFAPPAALNPATLLPEETDEPVTHDCHQLLIEETGVRKDLTDIPLTGEVLTWFTDGSSYVVEGKRMAGAAVVDGTRTIWASSLPEGTSAQKAELMALTQALRLAEGKSINIYTDSRYAFATAHVHGAIYKQRGWLTSAGREIKNKEEILSLLEALHLPKRLAIIHCPGHQKAKDPISRGNQMADRVAKQAAQGVNLLAGKRTADGSEFEKRTADGSEFESPKKKAKVE

SEQ ID NO: 364 - protein, 2088 aa, synthetic construct
MPAAKRVKLDGGDKKYSIGLDIGTNSVGWAVITDEYKVPSKKFKVLGNTDRHSIKKNLIGALLFDSGETAEATRLKRTARRRYTRRKNRICYLQEIFSNEMAKVDDSFFHRLEESFLVEEDKKHERHPIFGNIVDEVAYHEKYPTIYHLRKKLVDSTDKADLRLIYLALAHMIKFRGHFLIEGDLNPDNSDVDKLFIQLVQTYNQLFEENPINASGVDAKAILSARLSKSRRLENLIAQLPGEKKNGLFGNLIALSLGLTPNFKSNFDLAEDAKLQLSKDTYDDDLDNLLAQIGDQYADLFLAAKNLSDAILLSDILRVNTEITKAPLSASMIKRYDEHHQDLTLLKALVRQQLPEKYKEIFFDQSKNGYAGYIDGGASQEEFYKFIKPILEKMDGTEELLVKLNREDLLRKQRTFDNGSIPHQIHLGELHAILRRQEDFYPFLKDNREKIEKILTFRIPYYVGPLARGNSRFAWMTRKSEETITPWNFEEVVDKGASAQSFIERMTNFDKNLPNEKVLPKHSLLYEYFTVYNELTKVKYVTEGMRKPAFLSGEQKKAIVDLLFKTNRKVTVKQLKEDYFKKIECFDSVEISGVEDRFNASLGTYHDLLKIIKDKDFLDNEENEDILEDIVLTLTLFEDREMIEERLKTYAHLFDDKVMKQLKRRRYTGWGRLSRKLINGIRDKQSGKTILDFLKSDGFANRNFMQLIHDDSLTFKEDIQKAQVSGQGDSLHEHIANLAGSPAIKKGILQTVKVVDELVKVMGRHKPENIVIEMARENQTTQKGQKNSRERMKRIEEGIKELGSQILKEHPVENTQLQNEKLYLYYLQNGRDMYVDQELDINRLSDYDVDHIVPQSFLKDDSIDNKVLTRSDKARGKSDNVPSEEVVKKMKNYWRQLLNAKLITQRKFDNLTKAERGGLSELDKAGFIKRQLVETRQITKHVAQILDSRMNTKYDENDKLIREVKVITLKSKLVSDFRKDFQFYKVREINNYHHAHDAYLNAVVGTALIKKYPKLESEFVYGDYKVYDVRKMIAKSEQEIGKATAKYFFYSNIMNFFKTEITLANGEIRKRPLIETNGETGEIVWDKGRDFATVRKVLSMPQVNIVKKTEVQTGGFSKESILPKRNSDKLIARKKDWDPKKYGGFDSPTVAYSVLVVAKVEKGKSKKLKSVKELLGITIMERSSFEKNPIDFLEAKGYKEVKKDLIIKLPKYSLFELENGRKRMLASAGELQKGNELALPSKYVNFLYLASHYEKLKGSPEDNEQKQLFVEQHKHYLDEIIEQISEFSKRVILADANLDKVLSAYNKHRDKPIREQAENIIHLFTLTNLGAPAAFKYFDTTIDRKRYTSTKEVLDATLIHQSITGLYETRIDLSQLGGDGGGSSGSSGSSGGTLQLDDEYRLYSPLVKPDQNIQFWLEQFPQAWAETAGMGLAKQVPPQVIQLKASATPVSVRQYPLSKEAQEGIRPHVQRLIQQGILVPVQSPWNTPLLPVRKPGTNDYRPVQDLREVNKRVQDIHPTVPNPYNLLCALPPQRSWYTVLDLKDAFFCLRLHPTSQPLFAFEWRDPGTGRTGQLTWTRLPQGFKNSPTIFNEALHRDLANFRIQHPQVTLLQYVDDLLLAGATKQDCLEGTKALLLELSDLGYRASAKKAQICRREVTYLGYSLRDGQRWLTEARKKTVVQIPAPTTAKQVREFLGTAGFCRLWIPGFATLAAPLYPLTKPKGEFSWAPEHQKAFDAIKKALLSAPALALPDVTKPFTLYVDERKGVARGVLTQTLGPWRRPVAYLSKKLDPVASGWPVCLKAIAAVAILVKDADKLTLGQNITVIAPHALENIVRQPPDRWMTNARMTHYQSLLLTERVTFAPPAALNPATLLPEETDEPVTHDCHQLLIEETGVRKDLTDIPLTGEVLTWFTDGSSYVVEGKRMAGAAVVDGTRTIWASSLPEGTSAQKAELMALTQALRLAEGKSINIYTDSRYAFATAHVHGAIYKQRGWLTSAGREIKNKEEILSLLEALHLPKRLAIIHCPGHQKAKDPISRGNQMADRVAKQAAQGVNLLAGKRTADGSEFEKRTADGSEFESPKKKAKVE

SEQ ID NO: 365 - protein, 2090 aa, synthetic construct
MPAAKRVKLDGGDKKYSIGLDIGTNSVGWAVITDEYKVPSKKFKVLGNTDRHSIKKNLIGALLFDSGETAEATRLKRTARRRYTRRKNRICYLQEIFSNEMAKVDDSFFHRLEESFLVEEDKKHERHPIFGNIVDEVAYHEKYPTIYHLRKKLVDSTDKADLRLIYLALAHMIKFRGHFLIEGDLNPDNSDVDKLFIQLVQTYNQLFEENPINASGVDAKAILSARLSKSRRLENLIAQLPGEKKNGLFGNLIALSLGLTPNFKSNFDLAEDAKLQLSKDTYDDDLDNLLAQIGDQYADLFLAAKNLSDAILLSDILRVNTEITKAPLSASMIKRYDEHHQDLTLLKALVRQQLPEKYKEIFFDQSKNGYAGYIDGGASQEEFYKFIKPILEKMDGTEELLVKLNREDLLRKQRTFDNGSIPHQIHLGELHAILRRQEDFYPFLKDNREKIEKILTFRIPYYVGPLARGNSRFAWMTRKSEETITPWNFEEVVDKGASAQSFIERMTNFDKNLPNEKVLPKHSLLYEYFTVYNELTKVKYVTEGMRKPAFLSGEQKKAIVDLLFKTNRKVTVKQLKEDYFKKIECFDSVEISGVEDRFNASLGTYHDLLKIIKDKDFLDNEENEDILEDIVLTLTLFEDREMIEERLKTYAHLFDDKVMKQLKRRRYTGWGRLSRKLINGIRDKQSGKTILDFLKSDGFANRNFMQLIHDDSLTFKEDIQKAQVSGQGDSLHEHIANLAGSPAIKKGILQTVKVVDELVKVMGRHKPENIVIEMARENQTTQKGQKNSRERMKRIEEGIKELGSQILKEHPVENTQLQNEKLYLYYLQNGRDMYVDQELDINRLSDYDVDHIVPQSFLKDDSIDNKVLTRSDKARGKSDNVPSEEVVKKMKNYWRQLLNAKLITQRKFDNLTKAERGGLSELDKAGFIKRQLVETRQITKHVAQILDSRMNTKYDENDKLIREVKVITLKSKLVSDFRKDFQFYKVREINNYHHAHDAYLNAVVGTALIKKYPKLESEFVYGDYKVYDVRKMIAKSEQEIGKATAKYFFYSNIMNFFKTEITLANGEIRKRPLIETNGETGEIVWDKGRDFATVRKVLSMPQVNIVKKTEVQTGGFSKESILPKRNSDKLIARKKDWDPKKYGGFDSPTVAYSVLVVAKVEKGKSKKLKSVKELLGITIMERSSFEKNPIDFLEAKGYKEVKKDLIIKLPKYSLFELENGRKRMLASAGELQKGNELALPSKYVNFLYLASHYEKLKGSPEDNEQKQLFVEQHKHYLDEIIEQISEFSKRVILADANLDKVLSAYNKHRDKPIREQAENIIHLFTLTNLGAPAAFKYFDTTIDRKRYTSTKEVLDATLIHQSITGLYETRIDLSQLGGDGGGSSEAAAKGGGGGTLQLDDEYRLYSPLVKPDQNIQFWLEQFPQAWAETAGMGLAKQVPPQVIQLKASATPVSVRQYPLSKEAQEGIRPHVQRLIQQGILVPVQSPWNTPLLPVRKPGTNDYRPVQDLREVNKRVQDIHPTVPNPYNLLCALPPQRSWYTVLDLKDAFFCLRLHPTSQPLFAFEWRDPGTGRTGQLTWTRLPQGFKNSPTIFNEALHRDLANFRIQHPQVTLLQYVDDLLLAGATKQDCLEGTKALLLELSDLGYRASAKKAQICRREVTYLGYSLRDGQRWLTEARKKTVVQIPAPTTAKQVREFLGTAGFCRLWIPGFATLAAPLYPLTKPKGEFSWAPEHQKAFDAIKKALLSAPALALPDVTKPFTLYVDERKGVARGVLTQTLGPWRRPVAYLSKKLDPVASGWPVCLKAIAAVAILVKDADKLTLGQNITVIAPHALENIVRQPPDRWMTNARMTHYQSLLLTERVTFAPPAALNPATLLPEETDEPVTHDCHQLLIEETGVRKDLTDIPLTGEVLTWFTDGSSYVVEGKRMAGAAVVDGTRTIWASSLPEGTSAQKAELMALTQALRLAEGKSINIYTDSRYAFATAHVHGAIYKQRGWLTSAGREIKNKEEILSLLEALHLPKRLAIIHCPGHQKAKDPISRGNQMADRVAKQAAQGVNLLAGKRTADGSEFEKRTADGSEFESPKKKAKVE

SEQ ID NO: 366 - protein, 2084 aa, synthetic construct
MPAAKRVKLDGGDKKYSIGLDIGTNSVGWAVITDEYKVPSKKFKVLGNTDRHSIKKNLIGALLFDSGETAEATRLKRTARRRYTRRKNRICYLQEIFSNEMAKVDDSFFHRLEESFLVEEDKKHERHPIFGNIVDEVAYHEKYPTIYHLRKKLVDSTDKADLRLIYLALAHMIKFRGHFLIEGDLNPDNSDVDKLFIQLVQTYNQLFEENPINASGVDAKAILSARLSKSRRLENLIAQLPGEKKNGLFGNLIALSLGLTPNFKSNFDLAEDAKLQLSKDTYDDDLDNLLAQIGDQYADLFLAAKNLSDAILLSDILRVNTEITKAPLSASMIKRYDEHHQDLTLLKALVRQQLPEKYKEIFFDQSKNGYAGYIDGGASQEEFYKFIKPILEKMDGTEELLVKLNREDLLRKQRTFDNGSIPHQIHLGELHAILRRQEDFYPFLKDNREKIEKILTFRIPYYVGPLARGNSRFAWMTRKSEETITPWNFEEVVDKGASAQSFIERMTNFDKNLPNEKVLPKHSLLYEYFTVYNELTKVKYVTEGMRKPAFLSGEQKKAIVDLLFKTNRKVTVKQLKEDYFKKIECFDSVEISGVEDRFNASLGTYHDLLKIIKDKDFLDNEENEDILEDIVLTLTLFEDREMIEERLKTYAHLFDDKVMKQLKRRRYTGWGRLSRKLINGIRDKQSGKTILDFLKSDGFANRNFMQLIHDDSLTFKEDIQKAQVSGQGDSLHEHIANLAGSPAIKKGILQTVKVVDELVKVMGRHKPENIVIEMARENQTTQKGQKNSRERMKRIEEGIKELGSQILKEHPVENTQLQNEKLYLYYLQNGRDMYVDQELDINRLSDYDVDHIVPQSFLKDDSIDNKVLTRSDKARGKSDNVPSEEVVKKMKNYWRQLLNAKLITQRKFDNLTKAERGGLSELDKAGFIKRQLVETRQITKHVAQILDSRMNTKYDENDKLIREVKVITLKSKLVSDFRKDFQFYKVREINNYHHAHDAYLNAVVGTALIKKYPKLESEFVYGDYKVYDVRKMIAKSEQEIGKATAKYFFYSNIMNFFKTEITLANGEIRKRPLIETNGETGEIVWDKGRDFATVRKVLSMPQVNIVKKTEVQTGGFSKESILPKRNSDKLIARKKDWDPKKYGGFDSPTVAYSVLVVAKVEKGKSKKLKSVKELLGITIMERSSFEKNPIDFLEAKGYKEVKKDLIIKLPKYSLFELENGRKRMLASAGELQKGNELALPSKYVNFLYLASHYEKLKGSPEDNEQKQLFVEQHKHYLDEIIEQISEFSKRVILADANLDKVLSAYNKHRDKPIREQAENIIHLFTLTNLGAPAAFKYFDTTIDRKRYTSTKEVLDATLIHQSITGLYETRIDLSQLGGDGGPAPAPGGTLQLDDEYRLYSPLVKPDQNIQFWLEQFPQAWAETAGMGLAKQVPPQVIQLKASATPVSVRQYPLSKEAQEGIRPHVQRLIQQGILVPVQSPWNTPLLPVRKPGTNDYRPVQDLREVNKRVQDIHPTVPNPYNLLCALPPQRSWYTVLDLKDAFFCLRLHPTSQPLFAFEWRDPGTGRTGQLTWTRLPQGFKNSPTIFNEALHRDLANFRIQHPQVTLLQYVDDLLLAGATKQDCLEGTKALLLELSDLGYRASAKKAQICRREVTYLGYSLRDGQRWLTEARKKTVVQIPAPTTAKQVREFLGTAGFCRLWIPGFATLAAPLYPLTKPKGEFSWAPEHQKAFDAIKKALLSAPALALPDVTKPFTLYVDERKGVARGVLTQTLGPWRRPVAYLSKKLDPVASGWPVCLKAIAAVAILVKDADKLTLGQNITVIAPHALENIVRQPPDRWMTNARMTHYQSLLLTERVTFAPPAALNPATLLPEETDEPVTHDCHQLLIEETGVRKDLTDIPLTGEVLTWFTDGSSYVVEGKRMAGAAVVDGTRTIWASSLPEGTSAQKAELMALTQALRLAEGKSINIYTDSRYAFATAHVHGAIYKQRGWLTSAGREIKNKEEILSLLEALHLPKRLAIIHCPGHQKAKDPISRGNQMADRVAKQAAQGVNLLAGKRTADGSEFEKRTADGSEFESPKKKAKVE

SEQ ID NO: 367 - protein, 2084 aa, synthetic construct
MPAAKRVKLDGGDKKYSIGLDIGTNSVGWAVITDEYKVPSKKFKVLGNTDRHSIKKNLIGALLFDSGETAEATRLKRTARRRYTRRKNRICYLQEIFSNEMAKVDDSFFHRLEESFLVEEDKKHERHPIFGNIVDEVAYHEKYPTIYHLRKKLVDSTDKADLRLIYLALAHMIKFRGHFLIEGDLNPDNSDVDKLFIQLVQTYNQLFEENPINASGVDAKAILSARLSKSRRLENLIAQLPGEKKNGLFGNLIALSLGLTPNFKSNFDLAEDAKLQLSKDTYDDDLDNLLAQIGDQYADLFLAAKNLSDAILLSDILRVNTEITKAPLSASMIKRYDEHHQDLTLLKALVRQQLPEKYKEIFFDQSKNGYAGYIDGGASQEEFYKFIKPILEKMDGTEELLVKLNREDLLRKQRTFDNGSIPHQIHLGELHAILRRQEDFYPFLKDNREKIEKILTFRIPYYVGPLARGNSRFAWMTRKSEETITPWNFEEVVDKGASAQSFIERMTNFDKNLPNEKVLPKHSLLYEYFTVYNELTKVKYVTEGMRKPAFLSGEQKKAIVDLLFKTNRKVTVKQLKEDYFKKIECFDSVEISGVEDRFNASLGTYHDLLKIIKDKDFLDNEENEDILEDIVLTLTLFEDREMIEERLKTYAHLFDDKVMKQLKRRRYTGWGRLSRKLINGIRDKQSGKTILDFLKSDGFANRNFMQLIHDDSLTFKEDIQKAQVSGQGDSLHEHIANLAGSPAIKKGILQTVKVVDELVKVMGRHKPENIVIEMARENQTTQKGQKNSRERMKRIEEGIKELGSQILKEHPVENTQLQNEKLYLYYLQNGRDMYVDQELDINRLSDYDVDHIVPQSFLKDDSIDNKVLTRSDKARGKSDNVPSEEVVKKMKNYWRQLLNAKLITQRKFDNLTKAERGGLSELDKAGFIKRQLVETRQITKHVAQILDSRMNTKYDENDKLIREVKVITLKSKLVSDFRKDFQFYKVREINNYHHAHDAYLNAVVGTALIKKYPKLESEFVYGDYKVYDVRKMIAKSEQEIGKATAKYFFYSNIMNFFKTEITLANGEIRKRPLIETNGETGEIVWDKGRDFATVRKVLSMPQVNIVKKTEVQTGGFSKESILPKRNSDKLIARKKDWDPKKYGGFDSPTVAYSVLVVAKVEKGKSKKLKSVKELLGITIMERSSFEKNPIDFLEAKGYKEVKKDLIIKLPKYSLFELENGRKRMLASAGELQKGNELALPSKYVNFLYLASHYEKLKGSPEDNEQKQLFVEQHKHYLDEIIEQISEFSKRVILADANLDKVLSAYNKHRDKPIREQAENIIHLFTLTNLGAPAAFKYFDTTIDRKRYTSTKEVLDATLIHQSITGLYETRIDLSQLGGDGGGGGGGGGTLQLDDEYRLYSPLVKPDQNIQFWLEQFPQAWAETAGMGLAKQVPPQVIQLKASATPVSVRQYPLSKEAQEGIRPHVQRLIQQGILVPVQSPWNTPLLPVRKPGTNDYRPVQDLREVNKRVQDIHPTVPNPYNLLCALPPQRSWYTVLDLKDAFFCLRLHPTSQPLFAFEWRDPGTGRTGQLTWTRLPQGFKNSPTIFNEALHRDLANFRIQHPQVTLLQYVDDLLLAGATKQDCLEGTKALLLELSDLGYRASAKKAQICRREVTYLGYSLRDGQRWLTEARKKTVVQIPAPTTAKQVREFLGTAGFCRLWIPGFATLAAPLYPLTKPKGEFSWAPEHQKAFDAIKKALLSAPALALPDVTKPFTLYVDERKGVARGVLTQTLGPWRRPVAYLSKKLDPVASGWPVCLKAIAAVAILVKDADKLTLGQNITVIAPHALENIVRQPPDRWMTNARMTHYQSLLLTERVTFAPPAALNPATLLPEETDEPVTHDCHQLLIEETGVRKDLTDIPLTGEVLTWFTDGSSYVVEGKRMAGAAVVDGTRTIWASSLPEGTSAQKAELMALTQALRLAEGKSINIYTDSRYAFATAHVHGAIYKQRGWLTSAGREIKNKEEILSLLEALHLPKRLAIIHCPGHQKAKDPISRGNQMADRVAKQAAQGVNLLAGKRTADGSEFEKRTADGSEFESPKKKAKVE

SEQ ID NO: 368 - protein, 2090 aa, synthetic construct
MPAAKRVKLDGGDKKYSIGLDIGTNSVGWAVITDEYKVPSKKFKVLGNTDRHSIKKNLIGALLFDSGETAEATRLKRTARRRYTRRKNRICYLQEIFSNEMAKVDDSFFHRLEESFLVEEDKKHERHPIFGNIVDEVAYHEKYPTIYHLRKKLVDSTDKADLRLIYLALAHMIKFRGHFLIEGDLNPDNSDVDKLFIQLVQTYNQLFEENPINASGVDAKAILSARLSKSRRLENLIAQLPGEKKNGLFGNLIALSLGLTPNFKSNFDLAEDAKLQLSKDTYDDDLDNLLAQIGDQYADLFLAAKNLSDAILLSDILRVNTEITKAPLSASMIKRYDEHHQDLTLLKALVRQQLPEKYKEIFFDQSKNGYAGYIDGGASQEEFYKFIKPILEKMDGTEELLVKLNREDLLRKQRTFDNGSIPHQIHLGELHAILRRQEDFYPFLKDNREKIEKILTFRIPYYVGPLARGNSRFAWMTRKSEETITPWNFEEVVDKGASAQSFIERMTNFDKNLPNEKVLPKHSLLYEYFTVYNELTKVKYVTEGMRKPAFLSGEQKKAIVDLLFKTNRKVTVKQLKEDYFKKIECFDSVEISGVEDRFNASLGTYHDLLKIIKDKDFLDNEENEDILEDIVLTLTLFEDREMIEERLKTYAHLFDDKVMKQLKRRRYTGWGRLSRKLINGIRDKQSGKTILDFLKSDGFANRNFMQLIHDDSLTFKEDIQKAQVSGQGDSLHEHIANLAGSPAIKKGILQTVKVVDELVKVMGRHKPENIVIEMARENQTTQKGQKNSRERMKRIEEGIKELGSQILKEHPVENTQLQNEKLYLYYLQNGRDMYVDQELDINRLSDYDVDHIVPQSFLKDDSIDNKVLTRSDKARGKSDNVPSEEVVKKMKNYWRQLLNAKLITQRKFDNLTKAERGGLSELDKAGFIKRQLVETRQITKHVAQILDSRMNTKYDENDKLIREVKVITLKSKLVSDFRKDFQFYKVREINNYHHAHDAYLNAVVGTALIKKYPKLESEFVYGDYKVYDVRKMIAKSEQEIGKATAKYFFYSNIMNFFKTEITLANGEIRKRPLIETNGETGEIVWDKGRDFATVRKVLSMPQVNIVKKTEVQTGGFSKESILPKRNSDKLIARKKDWDPKKYGGFDSPTVAYSVLVVAKVEKGKSKKLKSVKELLGITIMERSSFEKNPIDFLEAKGYKEVKKDLIIKLPKYSLFELENGRKRMLASAGELQKGNELALPSKYVNFLYLASHYEKLKGSPEDNEQKQLFVEQHKHYLDEIIEQISEFSKRVILADANLDKVLSAYNKHRDKPIREQAENIIHLFTLTNLGAPAAFKYFDTTIDRKRYTSTKEVLDATLIHQSITGLYETRIDLSQLGGDGGGSSGGSEAAAKGGTLQLDDEYRLYSPLVKPDQNIQFWLEQFPQAWAETAGMGLAKQVPPQVIQLKASATPVSVRQYPLSKEAQEGIRPHVQRLIQQGILVPVQSPWNTPLLPVRKPGTNDYRPVQDLREVNKRVQDIHPTVPNPYNLLCALPPQRSWYTVLDLKDAFFCLRLHPTSQPLFAFEWRDPGTGRTGQLTWTRLPQGFKNSPTIFNEALHRDLANFRIQHPQVTLLQYVDDLLLAGATKQDCLEGTKALLLELSDLGYRASAKKAQICRREVTYLGYSLRDGQRWLTEARKKTVVQIPAPTTAKQVREFLGTAGFCRLWIPGFATLAAPLYPLTKPKGEFSWAPEHQKAFDAIKKALLSAPALALPDVTKPFTLYVDERKGVARGVLTQTLGPWRRPVAYLSKKLDPVASGWPVCLKAIAAVAILVKDADKLTLGQNITVIAPHALENIVRQPPDRWMTNARMTHYQSLLLTERVTFAPPAALNPATLLPEETDEPVTHDCHQLLIEETGVRKDLTDIPLTGEVLTWFTDGSSYVVEGKRMAGAAVVDGTRTIWASSLPEGTSAQKAELMALTQALRLAEGKSINIYTDSRYAFATAHVHGAIYKQRGWLTSAGREIKNKEEILSLLEALHLPKRLAIIHCPGHQKAKDPISRGNQMADRVAKQAAQGVNLLAGKRTADGSEFEKRTADGSEFESPKKKAKVE

SEQ ID NO: 369 - protein, 2085 aa, synthetic construct
MPAAKRVKLDGGDKKYSIGLDIGTNSVGWAVITDEYKVPSKKFKVLGNTDRHSIKKNLIGALLFDSGETAEATRLKRTARRRYTRRKNRICYLQEIFSNEMAKVDDSFFHRLEESFLVEEDKKHERHPIFGNIVDEVAYHEKYPTIYHLRKKLVDSTDKADLRLIYLALAHMIKFRGHFLIEGDLNPDNSDVDKLFIQLVQTYNQLFEENPINASGVDAKAILSARLSKSRRLENLIAQLPGEKKNGLFGNLIALSLGLTPNFKSNFDLAEDAKLQLSKDTYDDDLDNLLAQIGDQYADLFLAAKNLSDAILLSDILRVNTEITKAPLSASMIKRYDEHHQDLTLLKALVRQQLPEKYKEIFFDQSKNGYAGYIDGGASQEEFYKFIKPILEKMDGTEELLVKLNREDLLRKQRTFDNGSIPHQIHLGELHAILRRQEDFYPFLKDNREKIEKILTFRIPYYVGPLARGNSRFAWMTRKSEETITPWNFEEVVDKGASAQSFIERMTNFDKNLPNEKVLPKHSLLYEYFTVYNELTKVKYVTEGMRKPAFLSGEQKKAIVDLLFKTNRKVTVKQLKEDYFKKIECFDSVEISGVEDRFNASLGTYHDLLKIIKDKDFLDNEENEDILEDIVLTLTLFEDREMIEERLKTYAHLFDDKVMKQLKRRRYTGWGRLSRKLINGIRDKQSGKTILDFLKSDGFANRNFMQLIHDDSLTFKEDIQKAQVSGQGDSLHEHIANLAGSPAIKKGILQTVKVVDELVKVMGRHKPENIVIEMARENQTTQKGQKNSRERMKRIEEGIKELGSQILKEHPVENTQLQNEKLYLYYLQNGRDMYVDQELDINRLSDYDVDHIVPQSFLKDDSIDNKVLTRSDKARGKSDNVPSEEVVKKMKNYWRQLLNAKLITQRKFDNLTKAERGGLSELDKAGFIKRQLVETRQITKHVAQILDSRMNTKYDENDKLIREVKVITLKSKLVSDFRKDFQFYKVREINNYHHAHDAYLNAVVGTALIKKYPKLESEFVYGDYKVYDVRKMIAKSEQEIGKATAKYFFYSNIMNFFKTEITLANGEIRKRPLIETNGETGEIVWDKGRDFATVRKVLSMPQVNIVKKTEVQTGGFSKESILPKRNSDKLIARKKDWDPKKYGGFDSPTVAYSVLVVAKVEKGKSKKLKSVKELLGITIMERSSFEKNPIDFLEAKGYKEVKKDLIIKLPKYSLFELENGRKRMLASAGELQKGNELALPSKYVNFLYLASHYEKLKGSPEDNEQKQLFVEQHKHYLDEIIEQISEFSKRVILADANLDKVLSAYNKHRDKPIREQAENIIHLFTLTNLGAPAAFKYFDTTIDRKRYTSTKEVLDATLIHQSITGLYETRIDLSQLGGDGGGSSGGSGGTLQLDDEYRLYSPLVKPDQNIQFWLEQFPQAWAETAGMGLAKQVPPQVIQLKASATPVSVRQYPLSKEAQEGIRPHVQRLIQQGILVPVQSPWNTPLLPVRKPGTNDYRPVQDLREVNKRVQDIHPTVPNPYNLLCALPPQRSWYTVLDLKDAFFCLRLHPTSQPLFAFEWRDPGTGRTGQLTWTRLPQGFKNSPTIFNEALHRDLANFRIQHPQVTLLQYVDDLLLAGATKQDCLEGTKALLLELSDLGYRASAKKAQICRREVTYLGYSLRDGQRWLTEARKKTVVQIPAPTTAKQVREFLGTAGFCRLWIPGFATLAAPLYPLTKPKGEFSWAPEHQKAFDAIKKALLSAPALALPDVTKPFTLYVDERKGVARGVLTQTLGPWRRPVAYLSKKLDPVASGWPVCLKAIAAVAILVKDADKLTLGQNITVIAPHALENIVRQPPDRWMTNARMTHYQSLLLTERVTFAPPAALNPATLLPEETDEPVTHDCHQLLIEETGVRKDLTDIPLTGEVLTWFTDGSSYVVEGKRMAGAAVVDGTRTIWASSLPEGTSAQKAELMALTQALRLAEGKSINIYTDSRYAFATAHVHGAIYKQRGWLTSAGREIKNKEEILSLLEALHLPKRLAIIHCPGHQKAKDPISRGNQMADRVAKQAAQGVNLLAGKRTADGSEFEKRTADGSEFESPKKKAKVE

SEQ ID NO: 370 - protein, 2091 aa, synthetic construct
MPAAKRVKLDGGDKKYSIGLDIGTNSVGWAVITDEYKVPSKKFKVLGNTDRHSIKKNLIGALLFDSGETAEATRLKRTARRRYTRRKNRICYLQEIFSNEMAKVDDSFFHRLEESFLVEEDKKHERHPIFGNIVDEVAYHEKYPTIYHLRKKLVDSTDKADLRLIYLALAHMIKFRGHFLIEGDLNPDNSDVDKLFIQLVQTYNQLFEENPINASGVDAKAILSARLSKSRRLENLIAQLPGEKKNGLFGNLIALSLGLTPNFKSNFDLAEDAKLQLSKDTYDDDLDNLLAQIGDQYADLFLAAKNLSDAILLSDILRVNTEITKAPLSASMIKRYDEHHQDLTLLKALVRQQLPEKYKEIFFDQSKNGYAGYIDGGASQEEFYKFIKPILEKMDGTEELLVKLNREDLLRKQRTFDNGSIPHQIHLGELHAILRRQEDFYPFLKDNREKIEKILTFRIPYYVGPLARGNSRFAWMTRKSEETITPWNFEEVVDKGASAQSFIERMTNFDKNLPNEKVLPKHSLLYEYFTVYNELTKVKYVTEGMRKPAFLSGEQKKAIVDLLFKTNRKVTVKQLKEDYFKKIECFDSVEISGVEDRFNASLGTYHDLLKIIKDKDFLDNEENEDILEDIVLTLTLFEDREMIEERLKTYAHLFDDKVMKQLKRRRYTGWGRLSRKLINGIRDKQSGKTILDFLKSDGFANRNFMQLIHDDSLTFKEDIQKAQVSGQGDSLHEHIANLAGSPAIKKGILQTVKVVDELVKVMGRHKPENIVIEMARENQTTQKGQKNSRERMKRIEEGIKELGSQILKEHPVENTQLQNEKLYLYYLQNGRDMYVDQELDINRLSDYDVDHIVPQSFLKDDSIDNKVLTRSDKARGKSDNVPSEEVVKKMKNYWRQLLNAKLITQRKFDNLTKAERGGLSELDKAGFIKRQLVETRQITKHVAQILDSRMNTKYDENDKLIREVKVITLKSKLVSDFRKDFQFYKVREINNYHHAHDAYLNAVVGTALIKKYPKLESEFVYGDYKVYDVRKMIAKSEQEIGKATAKYFFYSNIMNFFKTEITLANGEIRKRPLIETNGETGEIVWDKGRDFATVRKVLSMPQVNIVKKTEVQTGGFSKESILPKRNSDKLIARKKDWDPKKYGGFDSPTVAYSVLVVAKVEKGKSKKLKSVKELLGITIMERSSFEKNPIDFLEAKGYKEVKKDLIIKLPKYSLFELENGRKRMLASAGELQKGNELALPSKYVNFLYLASHYEKLKGSPEDNEQKQLFVEQHKHYLDEIIEQISEFSKRVILADANLDKVLSAYNKHRDKPIREQAENIIHLFTLTNLGAPAAFKYFDTTIDRKRYTSTKEVLDATLIHQSITGLYETRIDLSQLGGDGGGSAGSAAGSGEFGGTLQLDDEYRLYSPLVKPDQNIQFWLEQFPQAWAETAGMGLAKQVPPQVIQLKASATPVSVRQYPLSKEAQEGIRPHVQRLIQQGILVPVQSPWNTPLLPVRKPGTNDYRPVQDLREVNKRVQDIHPTVPNPYNLLCALPPQRSWYTVLDLKDAFFCLRLHPTSQPLFAFEWRDPGTGRTGQLTWTRLPQGFKNSPTIFNEALHRDLANFRIQHPQVTLLQYVDDLLLAGATKQDCLEGTKALLLELSDLGYRASAKKAQICRREVTYLGYSLRDGQRWLTEARKKTVVQIPAPTTAKQVREFLGTAGFCRLWIPGFATLAAPLYPLTKPKGEFSWAPEHQKAFDAIKKALLSAPALALPDVTKPFTLYVDERKGVARGVLTQTLGPWRRPVAYLSKKLDPVASGWPVCLKAIAAVAILVKDADKLTLGQNITVIAPHALENIVRQPPDRWMTNARMTHYQSLLLTERVTFAPPAALNPATLLPEETDEPVTHDCHQLLIEETGVRKDLTDIPLTGEVLTWFTDGSSYVVEGKRMAGAAVVDGTRTIWASSLPEGTSAQKAELMALTQALRLAEGKSINIYTDSRYAFATAHVHGAIYKQRGWLTSAGREIKNKEEILSLLEALHLPKRLAIIHCPGHQKAKDPISRGNQMADRVAKQAAQGVNLLAGKRTADGSEFEKRTADGSEFESPKKKAKVE

SEQ ID NO: 371 - protein, 2088 aa, synthetic construct
MPAAKRVKLDGGDKKYSIGLDIGTNSVGWAVITDEYKVPSKKFKVLGNTDRHSIKKNLIGALLFDSGETAEATRLKRTARRRYTRRKNRICYLQEIFSNEMAKVDDSFFHRLEESFLVEEDKKHERHPIFGNIVDEVAYHEKYPTIYHLRKKLVDSTDKADLRLIYLALAHMIKFRGHFLIEGDLNPDNSDVDKLFIQLVQTYNQLFEENPINASGVDAKAILSARLSKSRRLENLIAQLPGEKKNGLFGNLIALSLGLTPNFKSNFDLAEDAKLQLSKDTYDDDLDNLLAQIGDQYADLFLAAKNLSDAILLSDILRVNTEITKAPLSASMIKRYDEHHQDLTLLKALVRQQLPEKYKEIFFDQSKNGYAGYIDGGASQEEFYKFIKPILEKMDGTEELLVKLNREDLLRKQRTFDNGSIPHQIHLGELHAILRRQEDFYPFLKDNREKIEKILTFRIPYYVGPLARGNSRFAWMTRKSEETITPWNFEEVVDKGASAQSFIERMTNFDKNLPNEKVLPKHSLLYEYFTVYNELTKVKYVTEGMRKPAFLSGEQKKAIVDLLFKTNRKVTVKQLKEDYFKKIECFDSVEISGVEDRFNASLGTYHDLLKIIKDKDFLDNEENEDILEDIVLTLTLFEDREMIEERLKTYAHLFDDKVMKQLKRRRYTGWGRLSRKLINGIRDKQSGKTILDFLKSDGFANRNFMQLIHDDSLTFKEDIQKAQVSGQGDSLHEHIANLAGSPAIKKGILQTVKVVDELVKVMGRHKPENIVIEMARENQTTQKGQKNSRERMKRIEEGIKELGSQILKEHPVENTQLQNEKLYLYYLQNGRDMYVDQELDINRLSDYDVDHIVPQSFLKDDSIDNKVLTRSDKARGKSDNVPSEEVVKKMKNYWRQLLNAKLITQRKFDNLTKAERGGLSELDKAGFIKRQLVETRQITKHVAQILDSRMNTKYDENDKLIREVKVITLKSKLVSDFRKDFQFYKVREINNYHHAHDAYLNAVVGTALIKKYPKLESEFVYGDYKVYDVRKMIAKSEQEIGKATAKYFFYSNIMNFFKTEITLANGEIRKRPLIETNGETGEIVWDKGRDFATVRKVLSMPQVNIVKKTEVQTGGFSKESILPKRNSDKLIARKKDWDPKKYGGFDSPTVAYSVLVVAKVEKGKSKKLKSVKELLGITIMERSSFEKNPIDFLEAKGYKEVKKDLIIKLPKYSLFELENGRKRMLASAGELQKGNELALPSKYVNFLYLASHYEKLKGSPEDNEQKQLFVEQHKHYLDEIIEQISEFSKRVILADANLDKVLSAYNKHRDKPIREQAENIIHLFTLTNLGAPAAFKYFDTTIDRKRYTSTKEVLDATLIHQSITGLYETRIDLSQLGGDGGPAPGGGGSSGGTLQLDDEYRLYSPLVKPDQNIQFWLEQFPQAWAETAGMGLAKQVPPQVIQLKASATPVSVRQYPLSKEAQEGIRPHVQRLIQQGILVPVQSPWNTPLLPVRKPGTNDYRPVQDLREVNKRVQDIHPTVPNPYNLLCALPPQRSWYTVLDLKDAFFCLRLHPTSQPLFAFEWRDPGTGRTGQLTWTRLPQGFKNSPTIFNEALHRDLANFRIQHPQVTLLQYVDDLLLAGATKQDCLEGTKALLLELSDLGYRASAKKAQICRREVTYLGYSLRDGQRWLTEARKKTVVQIPAPTTAKQVREFLGTAGFCRLWIPGFATLAAPLYPLTKPKGEFSWAPEHQKAFDAIKKALLSAPALALPDVTKPFTLYVDERKGVARGVLTQTLGPWRRPVAYLSKKLDPVASGWPVCLKAIAAVAILVKDADKLTLGQNITVIAPHALENIVRQPPDRWMTNARMTHYQSLLLTERVTFAPPAALNPATLLPEETDEPVTHDCHQLLIEETGVRKDLTDIPLTGEVLTWFTDGSSYVVEGKRMAGAAVVDGTRTIWASSLPEGTSAQKAELMALTQALRLAEGKSINIYTDSRYAFATAHVHGAIYKQRGWLTSAGREIKNKEEILSLLEALHLPKRLAIIHCPGHQKAKDPISRGNQMADRVAKQAAQGVNLLAGKRTADGSEFEKRTADGSEFESPKKKAKVE

SEQ ID NO: 372 - protein, 2090 aa, synthetic construct
MPAAKRVKLDGGDKKYSIGLDIGTNSVGWAVITDEYKVPSKKFKVLGNTDRHSIKKNLIGALLFDSGETAEATRLKRTARRRYTRRKNRICYLQEIFSNEMAKVDDSFFHRLEESFLVEEDKKHERHPIFGNIVDEVAYHEKYPTIYHLRKKLVDSTDKADLRLIYLALAHMIKFRGHFLIEGDLNPDNSDVDKLFIQLVQTYNQLFEENPINASGVDAKAILSARLSKSRRLENLIAQLPGEKKNGLFGNLIALSLGLTPNFKSNFDLAEDAKLQLSKDTYDDDLDNLLAQIGDQYADLFLAAKNLSDAILLSDILRVNTEITKAPLSASMIKRYDEHHQDLTLLKALVRQQLPEKYKEIFFDQSKNGYAGYIDGGASQEEFYKFIKPILEKMDGTEELLVKLNREDLLRKQRTFDNGSIPHQIHLGELHAILRRQEDFYPFLKDNREKIEKILTFRIPYYVGPLARGNSRFAWMTRKSEETITPWNFEEVVDKGASAQSFIERMTNFDKNLPNEKVLPKHSLLYEYFTVYNELTKVKYVTEGMRKPAFLSGEQKKAIVDLLFKTNRKVTVKQLKEDYFKKIECFDSVEISGVEDRFNASLGTYHDLLKIIKDKDFLDNEENEDILEDIVLTLTLFEDREMIEERLKTYAHLFDDKVMKQLKRRRYTGWGRLSRKLINGIRDKQSGKTILDFLKSDGFANRNFMQLIHDDSLTFKEDIQKAQVSGQGDSLHEHIANLAGSPAIKKGILQTVKVVDELVKVMGRHKPENIVIEMARENQTTQKGQKNSRERMKRIEEGIKELGSQILKEHPVENTQLQNEKLYLYYLQNGRDMYVDQELDINRLSDYDVDHIVPQSFLKDDSIDNKVLTRSDKARGKSDNVPSEEVVKKMKNYWRQLLNAKLITQRKFDNLTKAERGGLSELDKAGFIKRQLVETRQITKHVAQILDSRMNTKYDENDKLIREVKVITLKSKLVSDFRKDFQFYKVREINNYHHAHDAYLNAVVGTALIKKYPKLESEFVYGDYKVYDVRKMIAKSEQEIGKATAKYFFYSNIMNFFKTEITLANGEIRKRPLIETNGETGEIVWDKGRDFATVRKVLSMPQVNIVKKTEVQTGGFSKESILPKRNSDKLIARKKDWDPKKYGGFDSPTVAYSVLVVAKVEKGKSKKLKSVKELLGITIMERSSFEKNPIDFLEAKGYKEVKKDLIIKLPKYSLFELENGRKRMLASAGELQKGNELALPSKYVNFLYLASHYEKLKGSPEDNEQKQLFVEQHKHYLDEIIEQISEFSKRVILADANLDKVLSAYNKHRDKPIREQAENIIHLFTLTNLGAPAAFKYFDTTIDRKRYTSTKEVLDATLIHQSITGLYETRIDLSQLGGDGGGGSGGGEAAAKGGTLQLDDEYRLYSPLVKPDQNIQFWLEQFPQAWAETAGMGLAKQVPPQVIQLKASATPVSVRQYPLSKEAQEGIRPHVQRLIQQGILVPVQSPWNTPLLPVRKPGTNDYRPVQDLREVNKRVQDIHPTVPNPYNLLCALPPQRSWYTVLDLKDAFFCLRLHPTSQPLFAFEWRDPGTGRTGQLTWTRLPQGFKNSPTIFNEALHRDLANFRIQHPQVTLLQYVDDLLLAGATKQDCLEGTKALLLELSDLGYRASAKKAQICRREVTYLGYSLRDGQRWLTEARKKTVVQIPAPTTAKQVREFLGTAGFCRLWIPGFATLAAPLYPLTKPKGEFSWAPEHQKAFDAIKKALLSAPALALPDVTKPFTLYVDERKGVARGVLTQTLGPWRRPVAYLSKKLDPVASGWPVCLKAIAAVAILVKDADKLTLGQNITVIAPHALENIVRQPPDRWMTNARMTHYQSLLLTERVTFAPPAALNPATLLPEETDEPVTHDCHQLLIEETGVRKDLTDIPLTGEVLTWFTDGSSYVVEGKRMAGAAVVDGTRTIWASSLPEGTSAQKAELMALTQALRLAEGKSINIYTDSRYAFATAHVHGAIYKQRGWLTSAGREIKNKEEILSLLEALHLPKRLAIIHCPGHQKAKDPISRGNQMADRVAKQAAQGVNLLAGKRTADGSEFEKRTADGSEFESPKKKAKVE

SEQ ID NO: 373 - protein, 2088 aa, synthetic construct
MPAAKRVKLDGGDKKYSIGLDIGTNSVGWAVITDEYKVPSKKFKVLGNTDRHSIKKNLIGALLFDSGETAEATRLKRTARRRYTRRKNRICYLQEIFSNEMAKVDDSFFHRLEESFLVEEDKKHERHPIFGNIVDEVAYHEKYPTIYHLRKKLVDSTDKADLRLIYLALAHMIKFRGHFLIEGDLNPDNSDVDKLFIQLVQTYNQLFEENPINASGVDAKAILSARLSKSRRLENLIAQLPGEKKNGLFGNLIALSLGLTPNFKSNFDLAEDAKLQLSKDTYDDDLDNLLAQIGDQYADLFLAAKNLSDAILLSDILRVNTEITKAPLSASMIKRYDEHHQDLTLLKALVRQQLPEKYKEIFFDQSKNGYAGYIDGGASQEEFYKFIKPILEKMDGTEELLVKLNREDLLRKQRTFDNGSIPHQIHLGELHAILRRQEDFYPFLKDNREKIEKILTFRIPYYVGPLARGNSRFAWMTRKSEETITPWNFEEVVDKGASAQSFIERMTNFDKNLPNEKVLPKHSLLYEYFTVYNELTKVKYVTEGMRKPAFLSGEQKKAIVDLLFKTNRKVTVKQLKEDYFKKIECFDSVEISGVEDRFNASLGTYHDLLKIIKDKDFLDNEENEDILEDIVLTLTLFEDREMIEERLKTYAHLFDDKVMKQLKRRRYTGWGRLSRKLINGIRDKQSGKTILDFLKSDGFANRNFMQLIHDDSLTFKEDIQKAQVSGQGDSLHEHIANLAGSPAIKKGILQTVKVVDELVKVMGRHKPENIVIEMARENQTTQKGQKNSRERMKRIEEGIKELGSQILKEHPVENTQLQNEKLYLYYLQNGRDMYVDQELDINRLSDYDVDHIVPQSFLKDDSIDNKVLTRSDKARGKSDNVPSEEVVKKMKNYWRQLLNAKLITQRKFDNLTKAERGGLSELDKAGFIKRQLVETRQITKHVAQILDSRMNTKYDENDKLIREVKVITLKSKLVSDFRKDFQFYKVREINNYHHAHDAYLNAVVGTALIKKYPKLESEFVYGDYKVYDVRKMIAKSEQEIGKATAKYFFYSNIMNFFKTEITLANGEIRKRPLIETNGETGEIVWDKGRDFATVRKVLSMPQVNIVKKTEVQTGGFSKESILPKRNSDKLIARKKDWDPKKYGGFDSPTVAYSVLVVAKVEKGKSKKLKSVKELLGITIMERSSFEKNPIDFLEAKGYKEVKKDLIIKLPKYSLFELENGRKRMLASAGELQKGNELALPSKYVNFLYLASHYEKLKGSPEDNEQKQLFVEQHKHYLDEIIEQISEFSKRVILADANLDKVLSAYNKHRDKPIREQAENIIHLFTLTNLGAPAAFKYFDTTIDRKRYTSTKEVLDATLIHQSITGLYETRIDLSQLGGDGGGGSGGGPAPGGTLQLDDEYRLYSPLVKPDQNIQFWLEQFPQAWAETAGMGLAKQVPPQVIQLKASATPVSVRQYPLSKEAQEGIRPHVQRLIQQGILVPVQSPWNTPLLPVRKPGTNDYRPVQDLREVNKRVQDIHPTVPNPYNLLCALPPQRSWYTVLDLKDAFFCLRLHPTSQPLFAFEWRDPGTGRTGQLTWTRLPQGFKNSPTIFNEALHRDLANFRIQHPQVTLLQYVDDLLLAGATKQDCLEGTKALLLELSDLGYRASAKKAQICRREVTYLGYSLRDGQRWLTEARKKTVVQIPAPTTAKQVREFLGTAGFCRLWIPGFATLAAPLYPLTKPKGEFSWAPEHQKAFDAIKKALLSAPALALPDVTKPFTLYVDERKGVARGVLTQTLGPWRRPVAYLSKKLDPVASGWPVCLKAIAAVAILVKDADKLTLGQNITVIAPHALENIVRQPPDRWMTNARMTHYQSLLLTERVTFAPPAALNPATLLPEETDEPVTHDCHQLLIEETGVRKDLTDIPLTGEVLTWFTDGSSYVVEGKRMAGAAVVDGTRTIWASSLPEGTSAQKAELMALTQALRLAEGKSINIYTDSRYAFATAHVHGAIYKQRGWLTSAGREIKNKEEILSLLEALHLPKRLAIIHCPGHQKAKDPISRGNQMADRVAKQAAQGVNLLAGKRTADGSEFEKRTADGSEFESPKKKAKVE

SEQ ID NO: 374 - protein, 2094 aa, synthetic construct
MPAAKRVKLDGGDKKYSIGLDIGTNSVGWAVITDEYKVPSKKFKVLGNTDRHSIKKNLIGALLFDSGETAEATRLKRTARRRYTRRKNRICYLQEIFSNEMAKVDDSFFHRLEESFLVEEDKKHERHPIFGNIVDEVAYHEKYPTIYHLRKKLVDSTDKADLRLIYLALAHMIKFRGHFLIEGDLNPDNSDVDKLFIQLVQTYNQLFEENPINASGVDAKAILSARLSKSRRLENLIAQLPGEKKNGLFGNLIALSLGLTPNFKSNFDLAEDAKLQLSKDTYDDDLDNLLAQIGDQYADLFLAAKNLSDAILLSDILRVNTEITKAPLSASMIKRYDEHHQDLTLLKALVRQQLPEKYKEIFFDQSKNGYAGYIDGGASQEEFYKFIKPILEKMDGTEELLVKLNREDLLRKQRTFDNGSIPHQIHLGELHAILRRQEDFYPFLKDNREKIEKILTFRIPYYVGPLARGNSRFAWMTRKSEETITPWNFEEVVDKGASAQSFIERMTNFDKNLPNEKVLPKHSLLYEYFTVYNELTKVKYVTEGMRKPAFLSGEQKKAIVDLLFKTNRKVTVKQLKEDYFKKIECFDSVEISGVEDRFNASLGTYHDLLKIIKDKDFLDNEENEDILEDIVLTLTLFEDREMIEERLKTYAHLFDDKVMKQLKRRRYTGWGRLSRKLINGIRDKQSGKTILDFLKSDGFANRNFMQLIHDDSLTFKEDIQKAQVSGQGDSLHEHIANLAGSPAIKKGILQTVKVVDELVKVMGRHKPENIVIEMARENQTTQKGQKNSRERMKRIEEGIKELGSQILKEHPVENTQLQNEKLYLYYLQNGRDMYVDQELDINRLSDYDVDHIVPQSFLKDDSIDNKVLTRSDKARGKSDNVPSEEVVKKMKNYWRQLLNAKLITQRKFDNLTKAERGGLSELDKAGFIKRQLVETRQITKHVAQILDSRMNTKYDENDKLIREVKVITLKSKLVSDFRKDFQFYKVREINNYHHAHDAYLNAVVGTALIKKYPKLESEFVYGDYKVYDVRKMIAKSEQEIGKATAKYFFYSNIMNFFKTEITLANGEIRKRPLIETNGETGEIVWDKGRDFATVRKVLSMPQVNIVKKTEVQTGGFSKESILPKRNSDKLIARKKDWDPKKYGGFDSPTVAYSVLVVAKVEKGKSKKLKSVKELLGITIMERSSFEKNPIDFLEAKGYKEVKKDLIIKLPKYSLFELENGRKRMLASAGELQKGNELALPSKYVNFLYLASHYEKLKGSPEDNEQKQLFVEQHKHYLDEIIEQISEFSKRVILADANLDKVLSAYNKHRDKPIREQAENIIHLFTLTNLGAPAAFKYFDTTIDRKRYTSTKEVLDATLIHQSITGLYETRIDLSQLGGDGGGSSGSSGSSGSSGSSGGTLQLDDEYRLYSPLVKPDQNIQFWLEQFPQAWAETAGMGLAKQVPPQVIQLKASATPVSVRQYPLSKEAQEGIRPHVQRLIQQGILVPVQSPWNTPLLPVRKPGTNDYRPVQDLREVNKRVQDIHPTVPNPYNLLCALPPQRSWYTVLDLKDAFFCLRLHPTSQPLFAFEWRDPGTGRTGQLTWTRLPQGFKNSPTIFNEALHRDLANFRIQHPQVTLLQYVDDLLLAGATKQDCLEGTKALLLELSDLGYRASAKKAQICRREVTYLGYSLRDGQRWLTEARKKTVVQIPAPTTAKQVREFLGTAGFCRLWIPGFATLAAPLYPLTKPKGEFSWAPEHQKAFDAIKKALLSAPALALPDVTKPFTLYVDERKGVARGVLTQTLGPWRRPVAYLSKKLDPVASGWPVCLKAIAAVAILVKDADKLTLGQNITVIAPHALENIVRQPPDRWMTNARMTHYQSLLLTERVTFAPPAALNPATLLPEETDEPVTHDCHQLLIEETGVRKDLTDIPLTGEVLTWFTDGSSYVVEGKRMAGAAVVDGTRTIWASSLPEGTSAQKAELMALTQALRLAEGKSINIYTDSRYAFATAHVHGAIYKQRGWLTSAGREIKNKEEILSLLEALHLPKRLAIIHCPGHQKAKDPISRGNQMADRVAKQAAQGVNLLAGKRTADGSEFEKRTADGSEFESPKKKAKVE

SEQ ID NO: 375 - protein, 2087 aa, synthetic construct
MPAAKRVKLDGGDKKYSIGLDIGTNSVGWAVITDEYKVPSKKFKVLGNTDRHSIKKNLIGALLFDSGETAEATRLKRTARRRYTRRKNRICYLQEIFSNEMAKVDDSFFHRLEESFLVEEDKKHERHPIFGNIVDEVAYHEKYPTIYHLRKKLVDSTDKADLRLIYLALAHMIKFRGHFLIEGDLNPDNSDVDKLFIQLVQTYNQLFEENPINASGVDAKAILSARLSKSRRLENLIAQLPGEKKNGLFGNLIALSLGLTPNFKSNFDLAEDAKLQLSKDTYDDDLDNLLAQIGDQYADLFLAAKNLSDAILLSDILRVNTEITKAPLSASMIKRYDEHHQDLTLLKALVRQQLPEKYKEIFFDQSKNGYAGYIDGGASQEEFYKFIKPILEKMDGTEELLVKLNREDLLRKQRTFDNGSIPHQIHLGELHAILRRQEDFYPFLKDNREKIEKILTFRIPYYVGPLARGNSRFAWMTRKSEETITPWNFEEVVDKGASAQSFIERMTNFDKNLPNEKVLPKHSLLYEYFTVYNELTKVKYVTEGMRKPAFLSGEQKKAIVDLLFKTNRKVTVKQLKEDYFKKIECFDSVEISGVEDRFNASLGTYHDLLKIIKDKDFLDNEENEDILEDIVLTLTLFEDREMIEERLKTYAHLFDDKVMKQLKRRRYTGWGRLSRKLINGIRDKQSGKTILDFLKSDGFANRNFMQLIHDDSLTFKEDIQKAQVSGQGDSLHEHIANLAGSPAIKKGILQTVKVVDELVKVMGRHKPENIVIEMARENQTTQKGQKNSRERMKRIEEGIKELGSQILKEHPVENTQLQNEKLYLYYLQNGRDMYVDQELDINRLSDYDVDHIVPQSFLKDDSIDNKVLTRSDKARGKSDNVPSEEVVKKMKNYWRQLLNAKLITQRKFDNLTKAERGGLSELDKAGFIKRQLVETRQITKHVAQILDSRMNTKYDENDKLIREVKVITLKSKLVSDFRKDFQFYKVREINNYHHAHDAYLNAVVGTALIKKYPKLESEFVYGDYKVYDVRKMIAKSEQEIGKATAKYFFYSNIMNFFKTEITLANGEIRKRPLIETNGETGEIVWDKGRDFATVRKVLSMPQVNIVKKTEVQTGGFSKESILPKRNSDKLIARKKDWDPKKYGGFDSPTVAYSVLVVAKVEKGKSKKLKSVKELLGITIMERSSFEKNPIDFLEAKGYKEVKKDLIIKLPKYSLFELENGRKRMLASAGELQKGNELALPSKYVNFLYLASHYEKLKGSPEDNEQKQLFVEQHKHYLDEIIEQISEFSKRVILADANLDKVLSAYNKHRDKPIREQAENIIHLFTLTNLGAPAAFKYFDTTIDRKRYTSTKEVLDATLIHQSITGLYETRIDLSQLGGDGGPAPEAAAKGGTLQLDDEYRLYSPLVKPDQNIQFWLEQFPQAWAETAGMGLAKQVPPQVIQLKASATPVSVRQYPLSKEAQEGIRPHVQRLIQQGILVPVQSPWNTPLLPVRKPGTNDYRPVQDLREVNKRVQDIHPTVPNPYNLLCALPPQRSWYTVLDLKDAFFCLRLHPTSQPLFAFEWRDPGTGRTGQLTWTRLPQGFKNSPTIFNEALHRDLANFRIQHPQVTLLQYVDDLLLAGATKQDCLEGTKALLLELSDLGYRASAKKAQICRREVTYLGYSLRDGQRWLTEARKKTVVQIPAPTTAKQVREFLGTAGFCRLWIPGFATLAAPLYPLTKPKGEFSWAPEHQKAFDAIKKALLSAPALALPDVTKPFTLYVDERKGVARGVLTQTLGPWRRPVAYLSKKLDPVASGWPVCLKAIAAVAILVKDADKLTLGQNITVIAPHALENIVRQPPDRWMTNARMTHYQSLLLTERVTFAPPAALNPATLLPEETDEPVTHDCHQLLIEETGVRKDLTDIPLTGEVLTWFTDGSSYVVEGKRMAGAAVVDGTRTIWASSLPEGTSAQKAELMALTQALRLAEGKSINIYTDSRYAFATAHVHGAIYKQRGWLTSAGREIKNKEEILSLLEALHLPKRLAIIHCPGHQKAKDPISRGNQMADRVAKQAAQGVNLLAGKRTADGSEFEKRTADGSEFESPKKKAKVE

SEQ ID NO: 376 - protein, 2090 aa, synthetic construct
MPAAKRVKLDGGDKKYSIGLDIGTNSVGWAVITDEYKVPSKKFKVLGNTDRHSIKKNLIGALLFDSGETAEATRLKRTARRRYTRRKNRICYLQEIFSNEMAKVDDSFFHRLEESFLVEEDKKHERHPIFGNIVDEVAYHEKYPTIYHLRKKLVDSTDKADLRLIYLALAHMIKFRGHFLIEGDLNPDNSDVDKLFIQLVQTYNQLFEENPINASGVDAKAILSARLSKSRRLENLIAQLPGEKKNGLFGNLIALSLGLTPNFKSNFDLAEDAKLQLSKDTYDDDLDNLLAQIGDQYADLFLAAKNLSDAILLSDILRVNTEITKAPLSASMIKRYDEHHQDLTLLKALVRQQLPEKYKEIFFDQSKNGYAGYIDGGASQEEFYKFIKPILEKMDGTEELLVKLNREDLLRKQRTFDNGSIPHQIHLGELHAILRRQEDFYPFLKDNREKIEKILTFRIPYYVGPLARGNSRFAWMTRKSEETITPWNFEEVVDKGASAQSFIERMTNFDKNLPNEKVLPKHSLLYEYFTVYNELTKVKYVTEGMRKPAFLSGEQKKAIVDLLFKTNRKVTVKQLKEDYFKKIECFDSVEISGVEDRFNASLGTYHDLLKIIKDKDFLDNEENEDILEDIVLTLTLFEDREMIEERLKTYAHLFDDKVMKQLKRRRYTGWGRLSRKLINGIRDKQSGKTILDFLKSDGFANRNFMQLIHDDSLTFKEDIQKAQVSGQGDSLHEHIANLAGSPAIKKGILQTVKVVDELVKVMGRHKPENIVIEMARENQTTQKGQKNSRERMKRIEEGIKELGSQILKEHPVENTQLQNEKLYLYYLQNGRDMYVDQELDINRLSDYDVDHIVPQSFLKDDSIDNKVLTRSDKARGKSDNVPSEEVVKKMKNYWRQLLNAKLITQRKFDNLTKAERGGLSELDKAGFIKRQLVETRQITKHVAQILDSRMNTKYDENDKLIREVKVITLKSKLVSDFRKDFQFYKVREINNYHHAHDAYLNAVVGTALIKKYPKLESEFVYGDYKVYDVRKMIAKSEQEIGKATAKYFFYSNIMNFFKTEITLANGEIRKRPLIETNGETGEIVWDKGRDFATVRKVLSMPQVNIVKKTEVQTGGFSKESILPKRNSDKLIARKKDWDPKKYGGFDSPTVAYSVLVVAKVEKGKSKKLKSVKELLGITIMERSSFEKNPIDFLEAKGYKEVKKDLIIKLPKYSLFELENGRKRMLASAGELQKGNELALPSKYVNFLYLASHYEKLKGSPEDNEQKQLFVEQHKHYLDEIIEQISEFSKRVILADANLDKVLSAYNKHRDKPIREQAENIIHLFTLTNLGAPAAFKYFDTTIDRKRYTSTKEVLDATLIHQSITGLYETRIDLSQLGGDGGGGSEAAAKPAPGGTLQLDDEYRLYSPLVKPDQNIQFWLEQFPQAWAETAGMGLAKQVPPQVIQLKASATPVSVRQYPLSKEAQEGIRPHVQRLIQQGILVPVQSPWNTPLLPVRKPGTNDYRPVQDLREVNKRVQDIHPTVPNPYNLLCALPPQRSWYTVLDLKDAFFCLRLHPTSQPLFAFEWRDPGTGRTGQLTWTRLPQGFKNSPTIFNEALHRDLANFRIQHPQVTLLQYVDDLLLAGATKQDCLEGTKALLLELSDLGYRASAKKAQICRREVTYLGYSLRDGQRWLTEARKKTVVQIPAPTTAKQVREFLGTAGFCRLWIPGFATLAAPLYPLTKPKGEFSWAPEHQKAFDAIKKALLSAPALALPDVTKPFTLYVDERKGVARGVLTQTLGPWRRPVAYLSKKLDPVASGWPVCLKAIAAVAILVKDADKLTLGQNITVIAPHALENIVRQPPDRWMTNARMTHYQSLLLTERVTFAPPAALNPATLLPEETDEPVTHDCHQLLIEETGVRKDLTDIPLTGEVLTWFTDGSSYVVEGKRMAGAAVVDGTRTIWASSLPEGTSAQKAELMALTQALRLAEGKSINIYTDSRYAFATAHVHGAIYKQRGWLTSAGREIKNKEEILSLLEALHLPKRLAIIHCPGHQKAKDPISRGNQMADRVAKQAAQGVNLLAGKRTADGSEFEKRTADGSEFESPKKKAKVE

SEQ ID NO: 377 - protein, 2091 aa, synthetic construct
MPAAKRVKLDGGDKKYSIGLDIGTNSVGWAVITDEYKVPSKKFKVLGNTDRHSIKKNLIGALLFDSGETAEATRLKRTARRRYTRRKNRICYLQEIFSNEMAKVDDSFFHRLEESFLVEEDKKHERHPIFGNIVDEVAYHEKYPTIYHLRKKLVDSTDKADLRLIYLALAHMIKFRGHFLIEGDLNPDNSDVDKLFIQLVQTYNQLFEENPINASGVDAKAILSARLSKSRRLENLIAQLPGEKKNGLFGNLIALSLGLTPNFKSNFDLAEDAKLQLSKDTYDDDLDNLLAQIGDQYADLFLAAKNLSDAILLSDILRVNTEITKAPLSASMIKRYDEHHQDLTLLKALVRQQLPEKYKEIFFDQSKNGYAGYIDGGASQEEFYKFIKPILEKMDGTEELLVKLNREDLLRKQRTFDNGSIPHQIHLGELHAILRRQEDFYPFLKDNREKIEKILTFRIPYYVGPLARGNSRFAWMTRKSEETITPWNFEEVVDKGASAQSFIERMTNFDKNLPNEKVLPKHSLLYEYFTVYNELTKVKYVTEGMRKPAFLSGEQKKAIVDLLFKTNRKVTVKQLKEDYFKKIECFDSVEISGVEDRFNASLGTYHDLLKIIKDKDFLDNEENEDILEDIVLTLTLFEDREMIEERLKTYAHLFDDKVMKQLKRRRYTGWGRLSRKLINGIRDKQSGKTILDFLKSDGFANRNFMQLIHDDSLTFKEDIQKAQVSGQGDSLHEHIANLAGSPAIKKGILQTVKVVDELVKVMGRHKPENIVIEMARENQTTQKGQKNSRERMKRIEEGIKELGSQILKEHPVENTQLQNEKLYLYYLQNGRDMYVDQELDINRLSDYDVDHIVPQSFLKDDSIDNKVLTRSDKARGKSDNVPSEEVVKKMKNYWRQLLNAKLITQRKFDNLTKAERGGLSELDKAGFIKRQLVETRQITKHVAQILDSRMNTKYDENDKLIREVKVITLKSKLVSDFRKDFQFYKVREINNYHHAHDAYLNAVVGTALIKKYPKLESEFVYGDYKVYDVRKMIAKSEQEIGKATAKYFFYSNIMNFFKTEITLANGEIRKRPLIETNGETGEIVWDKGRDFATVRKVLSMPQVNIVKKTEVQTGGFSKESILPKRNSDKLIARKKDWDPKKYGGFDSPTVAYSVLVVAKVEKGKSKKLKSVKELLGITIMERSSFEKNPIDFLEAKGYKEVKKDLIIKLPKYSLFELENGRKRMLASAGELQKGNELALPSKYVNFLYLASHYEKLKGSPEDNEQKQLFVEQHKHYLDEIIEQISEFSKRVILADANLDKVLSAYNKHRDKPIREQAENIIHLFTLTNLGAPAAFKYFDTTIDRKRYTSTKEVLDATLIHQSITGLYETRIDLSQLGGDGGGGSGGSGGSGGSGGTLQLDDEYRLYSPLVKPDQNIQFWLEQFPQAWAETAGMGLAKQVPPQVIQLKASATPVSVRQYPLSKEAQEGIRPHVQRLIQQGILVPVQSPWNTPLLPVRKPGTNDYRPVQDLREVNKRVQDIHPTVPNPYNLLCALPPQRSWYTVLDLKDAFFCLRLHPTSQPLFAFEWRDPGTGRTGQLTWTRLPQGFKNSPTIFNEALHRDLANFRIQHPQVTLLQYVDDLLLAGATKQDCLEGTKALLLELSDLGYRASAKKAQICRREVTYLGYSLRDGQRWLTEARKKTVVQIPAPTTAKQVREFLGTAGFCRLWIPGFATLAAPLYPLTKPKGEFSWAPEHQKAFDAIKKALLSAPALALPDVTKPFTLYVDERKGVARGVLTQTLGPWRRPVAYLSKKLDPVASGWPVCLKAIAAVAILVKDADKLTLGQNITVIAPHALENIVRQPPDRWMTNARMTHYQSLLLTERVTFAPPAALNPATLLPEETDEPVTHDCHQLLIEETGVRKDLTDIPLTGEVLTWFTDGSSYVVEGKRMAGAAVVDGTRTIWASSLPEGTSAQKAELMALTQALRLAEGKSINIYTDSRYAFATAHVHGAIYKQRGWLTSAGREIKNKEEILSLLEALHLPKRLAIIHCPGHQKAKDPISRGNQMADRVAKQAAQGVNLLAGKRTADGSEFEKRTADGSEFESPKKKAKVE

SEQ ID NO: 378 - protein, 2089 aa, synthetic construct
MPAAKRVKLDGGDKKYSIGLDIGTNSVGWAVITDEYKVPSKKFKVLGNTDRHSIKKNLIGALLFDSGETAEATRLKRTARRRYTRRKNRICYLQEIFSNEMAKVDDSFFHRLEESFLVEEDKKHERHPIFGNIVDEVAYHEKYPTIYHLRKKLVDSTDKADLRLIYLALAHMIKFRGHFLIEGDLNPDNSDVDKLFIQLVQTYNQLFEENPINASGVDAKAILSARLSKSRRLENLIAQLPGEKKNGLFGNLIALSLGLTPNFKSNFDLAEDAKLQLSKDTYDDDLDNLLAQIGDQYADLFLAAKNLSDAILLSDILRVNTEITKAPLSASMIKRYDEHHQDLTLLKALVRQQLPEKYKEIFFDQSKNGYAGYIDGGASQEEFYKFIKPILEKMDGTEELLVKLNREDLLRKQRTFDNGSIPHQIHLGELHAILRRQEDFYPFLKDNREKIEKILTFRIPYYVGPLARGNSRFAWMTRKSEETITPWNFEEVVDKGASAQSFIERMTNFDKNLPNEKVLPKHSLLYEYFTVYNELTKVKYVTEGMRKPAFLSGEQKKAIVDLLFKTNRKVTVKQLKEDYFKKIECFDSVEISGVEDRFNASLGTYHDLLKIIKDKDFLDNEENEDILEDIVLTLTLFEDREMIEERLKTYAHLFDDKVMKQLKRRRYTGWGRLSRKLINGIRDKQSGKTILDFLKSDGFANRNFMQLIHDDSLTFKEDIQKAQVSGQGDSLHEHIANLAGSPAIKKGILQTVKVVDELVKVMGRHKPENIVIEMARENQTTQKGQKNSRERMKRIEEGIKELGSQILKEHPVENTQLQNEKLYLYYLQNGRDMYVDQELDINRLSDYDVDHIVPQSFLKDDSIDNKVLTRSDKARGKSDNVPSEEVVKKMKNYWRQLLNAKLITQRKFDNLTKAERGGLSELDKAGFIKRQLVETRQITKHVAQILDSRMNTKYDENDKLIREVKVITLKSKLVSDFRKDFQFYKVREINNYHHAHDAYLNAVVGTALIKKYPKLESEFVYGDYKVYDVRKMIAKSEQEIGKATAKYFFYSNIMNFFKTEITLANGEIRKRPLIETNGETGEIVWDKGRDFATVRKVLSMPQVNIVKKTEVQTGGFSKESILPKRNSDKLIARKKDWDPKKYGGFDSPTVAYSVLVVAKVEKGKSKKLKSVKELLGITIMERSSFEKNPIDFLEAKGYKEVKKDLIIKLPKYSLFELENGRKRMLASAGELQKGNELALPSKYVNFLYLASHYEKLKGSPEDNEQKQLFVEQHKHYLDEIIEQISEFSKRVILADANLDKVLSAYNKHRDKPIREQAENIIHLFTLTNLGAPAAFKYFDTTIDRKRYTSTKEVLDATLIHQSITGLYETRIDLSQLGGDGGGGGGSGGGGSGGTLQLDDEYRLYSPLVKPDQNIQFWLEQFPQAWAETAGMGLAKQVPPQVIQLKASATPVSVRQYPLSKEAQEGIRPHVQRLIQQGILVPVQSPWNTPLLPVRKPGTNDYRPVQDLREVNKRVQDIHPTVPNPYNLLCALPPQRSWYTVLDLKDAFFCLRLHPTSQPLFAFEWRDPGTGRTGQLTWTRLPQGFKNSPTIFNEALHRDLANFRIQHPQVTLLQYVDDLLLAGATKQDCLEGTKALLLELSDLGYRASAKKAQICRREVTYLGYSLRDGQRWLTEARKKTVVQIPAPTTAKQVREFLGTAGFCRLWIPGFATLAAPLYPLTKPKGEFSWAPEHQKAFDAIKKALLSAPALALPDVTKPFTLYVDERKGVARGVLTQTLGPWRRPVAYLSKKLDPVASGWPVCLKAIAAVAILVKDADKLTLGQNITVIAPHALENIVRQPPDRWMTNARMTHYQSLLLTERVTFAPPAALNPATLLPEETDEPVTHDCHQLLIEETGVRKDLTDIPLTGEVLTWFTDGSSYVVEGKRMAGAAVVDGTRTIWASSLPEGTSAQKAELMALTQALRLAEGKSINIYTDSRYAFATAHVHGAIYKQRGWLTSAGREIKNKEEILSLLEALHLPKRLAIIHCPGHQKAKDPISRGNQMADRVAKQAAQGVNLLAGKRTADGSEFEKRTADGSEFESPKKKAKVE

SEQ ID NO: 379 - protein, 2088 aa, synthetic construct
MPAAKRVKLDGGDKKYSIGLDIGTNSVGWAVITDEYKVPSKKFKVLGNTDRHSIKKNLIGALLFDSGETAEATRLKRTARRRYTRRKNRICYLQEIFSNEMAKVDDSFFHRLEESFLVEEDKKHERHPIFGNIVDEVAYHEKYPTIYHLRKKLVDSTDKADLRLIYLALAHMIKFRGHFLIEGDLNPDNSDVDKLFIQLVQTYNQLFEENPINASGVDAKAILSARLSKSRRLENLIAQLPGEKKNGLFGNLIALSLGLTPNFKSNFDLAEDAKLQLSKDTYDDDLDNLLAQIGDQYADLFLAAKNLSDAILLSDILRVNTEITKAPLSASMIKRYDEHHQDLTLLKALVRQQLPEKYKEIFFDQSKNGYAGYIDGGASQEEFYKFIKPILEKMDGTEELLVKLNREDLLRKQRTFDNGSIPHQIHLGELHAILRRQEDFYPFLKDNREKIEKILTFRIPYYVGPLARGNSRFAWMTRKSEETITPWNFEEVVDKGASAQSFIERMTNFDKNLPNEKVLPKHSLLYEYFTVYNELTKVKYVTEGMRKPAFLSGEQKKAIVDLLFKTNRKVTVKQLKEDYFKKIECFDSVEISGVEDRFNASLGTYHDLLKIIKDKDFLDNEENEDILEDIVLTLTLFEDREMIEERLKTYAHLFDDKVMKQLKRRRYTGWGRLSRKLINGIRDKQSGKTILDFLKSDGFANRNFMQLIHDDSLTFKEDIQKAQVSGQGDSLHEHIANLAGSPAIKKGILQTVKVVDELVKVMGRHKPENIVIEMARENQTTQKGQKNSRERMKRIEEGIKELGSQILKEHPVENTQLQNEKLYLYYLQNGRDMYVDQELDINRLSDYDVDHIVPQSFLKDDSIDNKVLTRSDKARGKSDNVPSEEVVKKMKNYWRQLLNAKLITQRKFDNLTKAERGGLSELDKAGFIKRQLVETRQITKHVAQILDSRMNTKYDENDKLIREVKVITLKSKLVSDFRKDFQFYKVREINNYHHAHDAYLNAVVGTALIKKYPKLESEFVYGDYKVYDVRKMIAKSEQEIGKATAKYFFYSNIMNFFKTEITLANGEIRKRPLIETNGETGEIVWDKGRDFATVRKVLSMPQVNIVKKTEVQTGGFSKESILPKRNSDKLIARKKDWDPKKYGGFDSPTVAYSVLVVAKVEKGKSKKLKSVKELLGITIMERSSFEKNPIDFLEAKGYKEVKKDLIIKLPKYSLFELENGRKRMLASAGELQKGNELALPSKYVNFLYLASHYEKLKGSPEDNEQKQLFVEQHKHYLDEIIEQISEFSKRVILADANLDKVLSAYNKHRDKPIREQAENIIHLFTLTNLGAPAAFKYFDTTIDRKRYTSTKEVLDATLIHQSITGLYETRIDLSQLGGDGGGSSPAPGGGGGTLQLDDEYRLYSPLVKPDQNIQFWLEQFPQAWAETAGMGLAKQVPPQVIQLKASATPVSVRQYPLSKEAQEGIRPHVQRLIQQGILVPVQSPWNTPLLPVRKPGTNDYRPVQDLREVNKRVQDIHPTVPNPYNLLCALPPQRSWYTVLDLKDAFFCLRLHPTSQPLFAFEWRDPGTGRTGQLTWTRLPQGFKNSPTIFNEALHRDLANFRIQHPQVTLLQYVDDLLLAGATKQDCLEGTKALLLELSDLGYRASAKKAQICRREVTYLGYSLRDGQRWLTEARKKTVVQIPAPTTAKQVREFLGTAGFCRLWIPGFATLAAPLYPLTKPKGEFSWAPEHQKAFDAIKKALLSAPALALPDVTKPFTLYVDERKGVARGVLTQTLGPWRRPVAYLSKKLDPVASGWPVCLKAIAAVAILVKDADKLTLGQNITVIAPHALENIVRQPPDRWMTNARMTHYQSLLLTERVTFAPPAALNPATLLPEETDEPVTHDCHQLLIEETGVRKDLTDIPLTGEVLTWFTDGSSYVVEGKRMAGAAVVDGTRTIWASSLPEGTSAQKAELMALTQALRLAEGKSINIYTDSRYAFATAHVHGAIYKQRGWLTSAGREIKNKEEILSLLEALHLPKRLAIIHCPGHQKAKDPISRGNQMADRVAKQAAQGVNLLAGKRTADGSEFEKRTADGSEFESPKKKAKVE

SEQ ID NO: 380 - protein, 2087 aa, synthetic construct
MPAAKRVKLDGGDKKYSIGLDIGTNSVGWAVITDEYKVPSKKFKVLGNTDRHSIKKNLIGALLFDSGETAEATRLKRTARRRYTRRKNRICYLQEIFSNEMAKVDDSFFHRLEESFLVEEDKKHERHPIFGNIVDEVAYHEKYPTIYHLRKKLVDSTDKADLRLIYLALAHMIKFRGHFLIEGDLNPDNSDVDKLFIQLVQTYNQLFEENPINASGVDAKAILSARLSKSRRLENLIAQLPGEKKNGLFGNLIALSLGLTPNFKSNFDLAEDAKLQLSKDTYDDDLDNLLAQIGDQYADLFLAAKNLSDAILLSDILRVNTEITKAPLSASMIKRYDEHHQDLTLLKALVRQQLPEKYKEIFFDQSKNGYAGYIDGGASQEEFYKFIKPILEKMDGTEELLVKLNREDLLRKQRTFDNGSIPHQIHLGELHAILRRQEDFYPFLKDNREKIEKILTFRIPYYVGPLARGNSRFAWMTRKSEETITPWNFEEVVDKGASAQSFIERMTNFDKNLPNEKVLPKHSLLYEYFTVYNELTKVKYVTEGMRKPAFLSGEQKKAIVDLLFKTNRKVTVKQLKEDYFKKIECFDSVEISGVEDRFNASLGTYHDLLKIIKDKDFLDNEENEDILEDIVLTLTLFEDREMIEERLKTYAHLFDDKVMKQLKRRRYTGWGRLSRKLINGIRDKQSGKTILDFLKSDGFANRNFMQLIHDDSLTFKEDIQKAQVSGQGDSLHEHIANLAGSPAIKKGILQTVKVVDELVKVMGRHKPENIVIEMARENQTTQKGQKNSRERMKRIEEGIKELGSQILKEHPVENTQLQNEKLYLYYLQNGRDMYVDQELDINRLSDYDVDHIVPQSFLKDDSIDNKVLTRSDKARGKSDNVPSEEVVKKMKNYWRQLLNAKLITQRKFDNLTKAERGGLSELDKAGFIKRQLVETRQITKHVAQILDSRMNTKYDENDKLIREVKVITLKSKLVSDFRKDFQFYKVREINNYHHAHDAYLNAVVGTALIKKYPKLESEFVYGDYKVYDVRKMIAKSEQEIGKATAKYFFYSNIMNFFKTEITLANGEIRKRPLIETNGETGEIVWDKGRDFATVRKVLSMPQVNIVKKTEVQTGGFSKESILPKRNSDKLIARKKDWDPKKYGGFDSPTVAYSVLVVAKVEKGKSKKLKSVKELLGITIMERSSFEKNPIDFLEAKGYKEVKKDLIIKLPKYSLFELENGRKRMLASAGELQKGNELALPSKYVNFLYLASHYEKLKGSPEDNEQKQLFVEQHKHYLDEIIEQISEFSKRVILADANLDKVLSAYNKHRDKPIREQAENIIHLFTLTNLGAPAAFKYFDTTIDRKRYTSTKEVLDATLIHQSITGLYETRIDLSQLGGDGGGGGEAAAKGGTLQLDDEYRLYSPLVKPDQNIQFWLEQFPQAWAETAGMGLAKQVPPQVIQLKASATPVSVRQYPLSKEAQEGIRPHVQRLIQQGILVPVQSPWNTPLLPVRKPGTNDYRPVQDLREVNKRVQDIHPTVPNPYNLLCALPPQRSWYTVLDLKDAFFCLRLHPTSQPLFAFEWRDPGTGRTGQLTWTRLPQGFKNSPTIFNEALHRDLANFRIQHPQVTLLQYVDDLLLAGATKQDCLEGTKALLLELSDLGYRASAKKAQICRREVTYLGYSLRDGQRWLTEARKKTVVQIPAPTTAKQVREFLGTAGFCRLWIPGFATLAAPLYPLTKPKGEFSWAPEHQKAFDAIKKALLSAPALALPDVTKPFTLYVDERKGVARGVLTQTLGPWRRPVAYLSKKLDPVASGWPVCLKAIAAVAILVKDADKLTLGQNITVIAPHALENIVRQPPDRWMTNARMTHYQSLLLTERVTFAPPAALNPATLLPEETDEPVTHDCHQLLIEETGVRKDLTDIPLTGEVLTWFTDGSSYVVEGKRMAGAAVVDGTRTIWASSLPEGTSAQKAELMALTQALRLAEGKSINIYTDSRYAFATAHVHGAIYKQRGWLTSAGREIKNKEEILSLLEALHLPKRLAIIHCPGHQKAKDPISRGNQMADRVAKQAAQGVNLLAGKRTADGSEFEKRTADGSEFESPKKKAKVE

SEQ ID NO: 381 - protein, 2086 aa, synthetic construct
MPAAKRVKLDGGDKKYSIGLDIGTNSVGWAVITDEYKVPSKKFKVLGNTDRHSIKKNLIGALLFDSGETAEATRLKRTARRRYTRRKNRICYLQEIFSNEMAKVDDSFFHRLEESFLVEEDKKHERHPIFGNIVDEVAYHEKYPTIYHLRKKLVDSTDKADLRLIYLALAHMIKFRGHFLIEGDLNPDNSDVDKLFIQLVQTYNQLFEENPINASGVDAKAILSARLSKSRRLENLIAQLPGEKKNGLFGNLIALSLGLTPNFKSNFDLAEDAKLQLSKDTYDDDLDNLLAQIGDQYADLFLAAKNLSDAILLSDILRVNTEITKAPLSASMIKRYDEHHQDLTLLKALVRQQLPEKYKEIFFDQSKNGYAGYIDGGASQEEFYKFIKPILEKMDGTEELLVKLNREDLLRKQRTFDNGSIPHQIHLGELHAILRRQEDFYPFLKDNREKIEKILTFRIPYYVGPLARGNSRFAWMTRKSEETITPWNFEEVVDKGASAQSFIERMTNFDKNLPNEKVLPKHSLLYEYFTVYNELTKVKYVTEGMRKPAFLSGEQKKAIVDLLFKTNRKVTVKQLKEDYFKKIECFDSVEISGVEDRFNASLGTYHDLLKIIKDKDFLDNEENEDILEDIVLTLTLFEDREMIEERLKTYAHLFDDKVMKQLKRRRYTGWGRLSRKLINGIRDKQSGKTILDFLKSDGFANRNFMQLIHDDSLTFKEDIQKAQVSGQGDSLHEHIANLAGSPAIKKGILQTVKVVDELVKVMGRHKPENIVIEMARENQTTQKGQKNSRERMKRIEEGIKELGSQILKEHPVENTQLQNEKLYLYYLQNGRDMYVDQELDINRLSDYDVDHIVPQSFLKDDSIDNKVLTRSDKARGKSDNVPSEEVVKKMKNYWRQLLNAKLITQRKFDNLTKAERGGLSELDKAGFIKRQLVETRQITKHVAQILDSRMNTKYDENDKLIREVKVITLKSKLVSDFRKDFQFYKVREINNYHHAHDAYLNAVVGTALIKKYPKLESEFVYGDYKVYDVRKMIAKSEQEIGKATAKYFFYSNIMNFFKTEITLANGEIRKRPLIETNGETGEIVWDKGRDFATVRKVLSMPQVNIVKKTEVQTGGFSKESILPKRNSDKLIARKKDWDPKKYGGFDSPTVAYSVLVVAKVEKGKSKKLKSVKELLGITIMERSSFEKNPIDFLEAKGYKEVKKDLIIKLPKYSLFELENGRKRMLASAGELQKGNELALPSKYVNFLYLASHYEKLKGSPEDNEQKQLFVEQHKHYLDEIIEQISEFSKRVILADANLDKVLSAYNKHRDKPIREQAENIIHLFTLTNLGAPAAFKYFDTTIDRKRYTSTKEVLDATLIHQSITGLYETRIDLSQLGGDGGGGGGGGGGGTLQLDDEYRLYSPLVKPDQNIQFWLEQFPQAWAETAGMGLAKQVPPQVIQLKASATPVSVRQYPLSKEAQEGIRPHVQRLIQQGILVPVQSPWNTPLLPVRKPGTNDYRPVQDLREVNKRVQDIHPTVPNPYNLLCALPPQRSWYTVLDLKDAFFCLRLHPTSQPLFAFEWRDPGTGRTGQLTWTRLPQGFKNSPTIFNEALHRDLANFRIQHPQVTLLQYVDDLLLAGATKQDCLEGTKALLLELSDLGYRASAKKAQICRREVTYLGYSLRDGQRWLTEARKKTVVQIPAPTTAKQVREFLGTAGFCRLWIPGFATLAAPLYPLTKPKGEFSWAPEHQKAFDAIKKALLSAPALALPDVTKPFTLYVDERKGVARGVLTQTLGPWRRPVAYLSKKLDPVASGWPVCLKAIAAVAILVKDADKLTLGQNITVIAPHALENIVRQPPDRWMTNARMTHYQSLLLTERVTFAPPAALNPATLLPEETDEPVTHDCHQLLIEETGVRKDLTDIPLTGEVLTWFTDGSSYVVEGKRMAGAAVVDGTRTIWASSLPEGTSAQKAELMALTQALRLAEGKSINIYTDSRYAFATAHVHGAIYKQRGWLTSAGREIKNKEEILSLLEALHLPKRLAIIHCPGHQKAKDPISRGNQMADRVAKQAAQGVNLLAGKRTADGSEFEKRTADGSEFESPKKKAKVE

SEQ ID NO: 382 - protein, 2088 aa, synthetic construct
MPAAKRVKLDGGDKKYSIGLDIGTNSVGWAVITDEYKVPSKKFKVLGNTDRHSIKKNLIGALLFDSGETAEATRLKRTARRRYTRRKNRICYLQEIFSNEMAKVDDSFFHRLEESFLVEEDKKHERHPIFGNIVDEVAYHEKYPTIYHLRKKLVDSTDKADLRLIYLALAHMIKFRGHFLIEGDLNPDNSDVDKLFIQLVQTYNQLFEENPINASGVDAKAILSARLSKSRRLENLIAQLPGEKKNGLFGNLIALSLGLTPNFKSNFDLAEDAKLQLSKDTYDDDLDNLLAQIGDQYADLFLAAKNLSDAILLSDILRVNTEITKAPLSASMIKRYDEHHQDLTLLKALVRQQLPEKYKEIFFDQSKNGYAGYIDGGASQEEFYKFIKPILEKMDGTEELLVKLNREDLLRKQRTFDNGSIPHQIHLGELHAILRRQEDFYPFLKDNREKIEKILTFRIPYYVGPLARGNSRFAWMTRKSEETITPWNFEEVVDKGASAQSFIERMTNFDKNLPNEKVLPKHSLLYEYFTVYNELTKVKYVTEGMRKPAFLSGEQKKAIVDLLFKTNRKVTVKQLKEDYFKKIECFDSVEISGVEDRFNASLGTYHDLLKIIKDKDFLDNEENEDILEDIVLTLTLFEDREMIEERLKTYAHLFDDKVMKQLKRRRYTGWGRLSRKLINGIRDKQSGKTILDFLKSDGFANRNFMQLIHDDSLTFKEDIQKAQVSGQGDSLHEHIANLAGSPAIKKGILQTVKVVDELVKVMGRHKPENIVIEMARENQTTQKGQKNSRERMKRIEEGIKELGSQILKEHPVENTQLQNEKLYLYYLQNGRDMYVDQELDINRLSDYDVDHIVPQSFLKDDSIDNKVLTRSDKARGKSDNVPSEEVVKKMKNYWRQLLNAKLITQRKFDNLTKAERGGLSELDKAGFIKRQLVETRQITKHVAQILDSRMNTKYDENDKLIREVKVITLKSKLVSDFRKDFQFYKVREINNYHHAHDAYLNAVVGTALIKKYPKLESEFVYGDYKVYDVRKMIAKSEQEIGKATAKYFFYSNIMNFFKTEITLANGEIRKRPLIETNGETGEIVWDKGRDFATVRKVLSMPQVNIVKKTEVQTGGFSKESILPKRNSDKLIARKKDWDPKKYGGFDSPTVAYSVLVVAKVEKGKSKKLKSVKELLGITIMERSSFEKNPIDFLEAKGYKEVKKDLIIKLPKYSLFELENGRKRMLASAGELQKGNELALPSKYVNFLYLASHYEKLKGSPEDNEQKQLFVEQHKHYLDEIIEQISEFSKRVILADANLDKVLSAYNKHRDKPIREQAENIIHLFTLTNLGAPAAFKYFDTTIDRKRYTSTKEVLDATLIHQSITGLYETRIDLSQLGGDGGPAPAPAPAPGGTLQLDDEYRLYSPLVKPDQNIQFWLEQFPQAWAETAGMGLAKQVPPQVIQLKASATPVSVRQYPLSKEAQEGIRPHVQRLIQQGILVPVQSPWNTPLLPVRKPGTNDYRPVQDLREVNKRVQDIHPTVPNPYNLLCALPPQRSWYTVLDLKDAFFCLRLHPTSQPLFAFEWRDPGTGRTGQLTWTRLPQGFKNSPTIFNEALHRDLANFRIQHPQVTLLQYVDDLLLAGATKQDCLEGTKALLLELSDLGYRASAKKAQICRREVTYLGYSLRDGQRWLTEARKKTVVQIPAPTTAKQVREFLGTAGFCRLWIPGFATLAAPLYPLTKPKGEFSWAPEHQKAFDAIKKALLSAPALALPDVTKPFTLYVDERKGVARGVLTQTLGPWRRPVAYLSKKLDPVASGWPVCLKAIAAVAILVKDADKLTLGQNITVIAPHALENIVRQPPDRWMTNARMTHYQSLLLTERVTFAPPAALNPATLLPEETDEPVTHDCHQLLIEETGVRKDLTDIPLTGEVLTWFTDGSSYVVEGKRMAGAAVVDGTRTIWASSLPEGTSAQKAELMALTQALRLAEGKSINIYTDSRYAFATAHVHGAIYKQRGWLTSAGREIKNKEEILSLLEALHLPKRLAIIHCPGHQKAKDPISRGNQMADRVAKQAAQGVNLLAGKRTADGSEFEKRTADGSEFESPKKKAKVE

SEQ ID NO: 383 - protein, 2085 aa, synthetic construct
MPAAKRVKLDGGDKKYSIGLDIGTNSVGWAVITDEYKVPSKKFKVLGNTDRHSIKKNLIGALLFDSGETAEATRLKRTARRRYTRRKNRICYLQEIFSNEMAKVDDSFFHRLEESFLVEEDKKHERHPIFGNIVDEVAYHEKYPTIYHLRKKLVDSTDKADLRLIYLALAHMIKFRGHFLIEGDLNPDNSDVDKLFIQLVQTYNQLFEENPINASGVDAKAILSARLSKSRRLENLIAQLPGEKKNGLFGNLIALSLGLTPNFKSNFDLAEDAKLQLSKDTYDDDLDNLLAQIGDQYADLFLAAKNLSDAILLSDILRVNTEITKAPLSASMIKRYDEHHQDLTLLKALVRQQLPEKYKEIFFDQSKNGYAGYIDGGASQEEFYKFIKPILEKMDGTEELLVKLNREDLLRKQRTFDNGSIPHQIHLGELHAILRRQEDFYPFLKDNREKIEKILTFRIPYYVGPLARGNSRFAWMTRKSEETITPWNFEEVVDKGASAQSFIERMTNFDKNLPNEKVLPKHSLLYEYFTVYNELTKVKYVTEGMRKPAFLSGEQKKAIVDLLFKTNRKVTVKQLKEDYFKKIECFDSVEISGVEDRFNASLGTYHDLLKIIKDKDFLDNEENEDILEDIVLTLTLFEDREMIEERLKTYAHLFDDKVMKQLKRRRYTGWGRLSRKLINGIRDKQSGKTILDFLKSDGFANRNFMQLIHDDSLTFKEDIQKAQVSGQGDSLHEHIANLAGSPAIKKGILQTVKVVDELVKVMGRHKPENIVIEMARENQTTQKGQKNSRERMKRIEEGIKELGSQILKEHPVENTQLQNEKLYLYYLQNGRDMYVDQELDINRLSDYDVDHIVPQSFLKDDSIDNKVLTRSDKARGKSDNVPSEEVVKKMKNYWRQLLNAKLITQRKFDNLTKAERGGLSELDKAGFIKRQLVETRQITKHVAQILDSRMNTKYDENDKLIREVKVITLKSKLVSDFRKDFQFYKVREINNYHHAHDAYLNAVVGTALIKKYPKLESEFVYGDYKVYDVRKMIAKSEQEIGKATAKYFFYSNIMNFFKTEITLANGEIRKRPLIETNGETGEIVWDKGRDFATVRKVLSMPQVNIVKKTEVQTGGFSKESILPKRNSDKLIARKKDWDPKKYGGFDSPTVAYSVLVVAKVEKGKSKKLKSVKELLGITIMERSSFEKNPIDFLEAKGYKEVKKDLIIKLPKYSLFELENGRKRMLASAGELQKGNELALPSKYVNFLYLASHYEKLKGSPEDNEQKQLFVEQHKHYLDEIIEQISEFSKRVILADANLDKVLSAYNKHRDKPIREQAENIIHLFTLTNLGAPAAFKYFDTTIDRKRYTSTKEVLDATLIHQSITGLYETRIDLSQLGGDGGGSSGSSGGTLQLDDEYRLYSPLVKPDQNIQFWLEQFPQAWAETAGMGLAKQVPPQVIQLKASATPVSVRQYPLSKEAQEGIRPHVQRLIQQGILVPVQSPWNTPLLPVRKPGTNDYRPVQDLREVNKRVQDIHPTVPNPYNLLCALPPQRSWYTVLDLKDAFFCLRLHPTSQPLFAFEWRDPGTGRTGQLTWTRLPQGFKNSPTIFNEALHRDLANFRIQHPQVTLLQYVDDLLLAGATKQDCLEGTKALLLELSDLGYRASAKKAQICRREVTYLGYSLRDGQRWLTEARKKTVVQIPAPTTAKQVREFLGTAGFCRLWIPGFATLAAPLYPLTKPKGEFSWAPEHQKAFDAIKKALLSAPALALPDVTKPFTLYVDERKGVARGVLTQTLGPWRRPVAYLSKKLDPVASGWPVCLKAIAAVAILVKDADKLTLGQNITVIAPHALENIVRQPPDRWMTNARMTHYQSLLLTERVTFAPPAALNPATLLPEETDEPVTHDCHQLLIEETGVRKDLTDIPLTGEVLTWFTDGSSYVVEGKRMAGAAVVDGTRTIWASSLPEGTSAQKAELMALTQALRLAEGKSINIYTDSRYAFATAHVHGAIYKQRGWLTSAGREIKNKEEILSLLEALHLPKRLAIIHCPGHQKAKDPISRGNQMADRVAKQAAQGVNLLAGKRTADGSEFEKRTADGSEFESPKKKAKVE

SEQ ID NO: 384 - protein, 2088 aa, synthetic construct
MPAAKRVKLDGGDKKYSIGLDIGTNSVGWAVITDEYKVPSKKFKVLGNTDRHSIKKNLIGALLFDSGETAEATRLKRTARRRYTRRKNRICYLQEIFSNEMAKVDDSFFHRLEESFLVEEDKKHERHPIFGNIVDEVAYHEKYPTIYHLRKKLVDSTDKADLRLIYLALAHMIKFRGHFLIEGDLNPDNSDVDKLFIQLVQTYNQLFEENPINASGVDAKAILSARLSKSRRLENLIAQLPGEKKNGLFGNLIALSLGLTPNFKSNFDLAEDAKLQLSKDTYDDDLDNLLAQIGDQYADLFLAAKNLSDAILLSDILRVNTEITKAPLSASMIKRYDEHHQDLTLLKALVRQQLPEKYKEIFFDQSKNGYAGYIDGGASQEEFYKFIKPILEKMDGTEELLVKLNREDLLRKQRTFDNGSIPHQIHLGELHAILRRQEDFYPFLKDNREKIEKILTFRIPYYVGPLARGNSRFAWMTRKSEETITPWNFEEVVDKGASAQSFIERMTNFDKNLPNEKVLPKHSLLYEYFTVYNELTKVKYVTEGMRKPAFLSGEQKKAIVDLLFKTNRKVTVKQLKEDYFKKIECFDSVEISGVEDRFNASLGTYHDLLKIIKDKDFLDNEENEDILEDIVLTLTLFEDREMIEERLKTYAHLFDDKVMKQLKRRRYTGWGRLSRKLINGIRDKQSGKTILDFLKSDGFANRNFMQLIHDDSLTFKEDIQKAQVSGQGDSLHEHIANLAGSPAIKKGILQTVKVVDELVKVMGRHKPENIVIEMARENQTTQKGQKNSRERMKRIEEGIKELGSQILKEHPVENTQLQNEKLYLYYLQNGRDMYVDQELDINRLSDYDVDHIVPQSFLKDDSIDNKVLTRSDKARGKSDNVPSEEVVKKMKNYWRQLLNAKLITQRKFDNLTKAERGGLSELDKAGFIKRQLVETRQITKHVAQILDSRMNTKYDENDKLIREVKVITLKSKLVSDFRKDFQFYKVREINNYHHAHDAYLNAVVGTALIKKYPKLESEFVYGDYKVYDVRKMIAKSEQEIGKATAKYFFYSNIMNFFKTEITLANGEIRKRPLIETNGETGEIVWDKGRDFATVRKVLSMPQVNIVKKTEVQTGGFSKESILPKRNSDKLIARKKDWDPKKYGGFDSPTVAYSVLVVAKVEKGKSKKLKSVKELLGITIMERSSFEKNPIDFLEAKGYKEVKKDLIIKLPKYSLFELENGRKRMLASAGELQKGNELALPSKYVNFLYLASHYEKLKGSPEDNEQKQLFVEQHKHYLDEIIEQISEFSKRVILADANLDKVLSAYNKHRDKPIREQAENIIHLFTLTNLGAPAAFKYFDTTIDRKRYTSTKEVLDATLIHQSITGLYETRIDLSQLGGDGGGGSGSSGGGGGTLQLDDEYRLYSPLVKPDQNIQFWLEQFPQAWAETAGMGLAKQVPPQVIQLKASATPVSVRQYPLSKEAQEGIRPHVQRLIQQGILVPVQSPWNTPLLPVRKPGTNDYRPVQDLREVNKRVQDIHPTVPNPYNLLCALPPQRSWYTVLDLKDAFFCLRLHPTSQPLFAFEWRDPGTGRTGQLTWTRLPQGFKNSPTIFNEALHRDLANFRIQHPQVTLLQYVDDLLLAGATKQDCLEGTKALLLELSDLGYRASAKKAQICRREVTYLGYSLRDGQRWLTEARKKTVVQIPAPTTAKQVREFLGTAGFCRLWIPGFATLAAPLYPLTKPKGEFSWAPEHQKAFDAIKKALLSAPALALPDVTKPFTLYVDERKGVARGVLTQTLGPWRRPVAYLSKKLDPVASGWPVCLKAIAAVAILVKDADKLTLGQNITVIAPHALENIVRQPPDRWMTNARMTHYQSLLLTERVTFAPPAALNPATLLPEETDEPVTHDCHQLLIEETGVRKDLTDIPLTGEVLTWFTDGSSYVVEGKRMAGAAVVDGTRTIWASSLPEGTSAQKAELMALTQALRLAEGKSINIYTDSRYAFATAHVHGAIYKQRGWLTSAGREIKNKEEILSLLEALHLPKRLAIIHCPGHQKAKDPISRGNQMADRVAKQAAQGVNLLAGKRTADGSEFEKRTADGSEFESPKKKAKVE

SEQ ID NO: 385 - protein, 2090 aa, synthetic construct
MPAAKRVKLDGGDKKYSIGLDIGTNSVGWAVITDEYKVPSKKFKVLGNTDRHSIKKNLIGALLFDSGETAEATRLKRTARRRYTRRKNRICYLQEIFSNEMAKVDDSFFHRLEESFLVEEDKKHERHPIFGNIVDEVAYHEKYPTIYHLRKKLVDSTDKADLRLIYLALAHMIKFRGHFLIEGDLNPDNSDVDKLFIQLVQTYNQLFEENPINASGVDAKAILSARLSKSRRLENLIAQLPGEKKNGLFGNLIALSLGLTPNFKSNFDLAEDAKLQLSKDTYDDDLDNLLAQIGDQYADLFLAAKNLSDAILLSDILRVNTEITKAPLSASMIKRYDEHHQDLTLLKALVRQQLPEKYKEIFFDQSKNGYAGYIDGGASQEEFYKFIKPILEKMDGTEELLVKLNREDLLRKQRTFDNGSIPHQIHLGELHAILRRQEDFYPFLKDNREKIEKILTFRIPYYVGPLARGNSRFAWMTRKSEETITPWNFEEVVDKGASAQSFIERMTNFDKNLPNEKVLPKHSLLYEYFTVYNELTKVKYVTEGMRKPAFLSGEQKKAIVDLLFKTNRKVTVKQLKEDYFKKIECFDSVEISGVEDRFNASLGTYHDLLKIIKDKDFLDNEENEDILEDIVLTLTLFEDREMIEERLKTYAHLFDDKVMKQLKRRRYTGWGRLSRKLINGIRDKQSGKTILDFLKSDGFANRNFMQLIHDDSLTFKEDIQKAQVSGQGDSLHEHIANLAGSPAIKKGILQTVKVVDELVKVMGRHKPENIVIEMARENQTTQKGQKNSRERMKRIEEGIKELGSQILKEHPVENTQLQNEKLYLYYLQNGRDMYVDQELDINRLSDYDVDHIVPQSFLKDDSIDNKVLTRSDKARGKSDNVPSEEVVKKMKNYWRQLLNAKLITQRKFDNLTKAERGGLSELDKAGFIKRQLVETRQITKHVAQILDSRMNTKYDENDKLIREVKVITLKSKLVSDFRKDFQFYKVREINNYHHAHDAYLNAVVGTALIKKYPKLESEFVYGDYKVYDVRKMIAKSEQEIGKATAKYFFYSNIMNFFKTEITLANGEIRKRPLIETNGETGEIVWDKGRDFATVRKVLSMPQVNIVKKTEVQTGGFSKESILPKRNSDKLIARKKDWDPKKYGGFDSPTVAYSVLVVAKVEKGKSKKLKSVKELLGITIMERSSFEKNPIDFLEAKGYKEVKKDLIIKLPKYSLFELENGRKRMLASAGELQKGNELALPSKYVNFLYLASHYEKLKGSPEDNEQKQLFVEQHKHYLDEIIEQISEFSKRVILADANLDKVLSAYNKHRDKPIREQAENIIHLFTLTNLGAPAAFKYFDTTIDRKRYTSTKEVLDATLIHQSITGLYETRIDLSQLGGDGGPAPGSSEAAAKGGTLQLDDEYRLYSPLVKPDQNIQFWLEQFPQAWAETAGMGLAKQVPPQVIQLKASATPVSVRQYPLSKEAQEGIRPHVQRLIQQGILVPVQSPWNTPLLPVRKPGTNDYRPVQDLREVNKRVQDIHPTVPNPYNLLCALPPQRSWYTVLDLKDAFFCLRLHPTSQPLFAFEWRDPGTGRTGQLTWTRLPQGFKNSPTIFNEALHRDLANFRIQHPQVTLLQYVDDLLLAGATKQDCLEGTKALLLELSDLGYRASAKKAQICRREVTYLGYSLRDGQRWLTEARKKTVVQIPAPTTAKQVREFLGTAGFCRLWIPGFATLAAPLYPLTKPKGEFSWAPEHQKAFDAIKKALLSAPALALPDVTKPFTLYVDERKGVARGVLTQTLGPWRRPVAYLSKKLDPVASGWPVCLKAIAAVAILVKDADKLTLGQNITVIAPHALENIVRQPPDRWMTNARMTHYQSLLLTERVTFAPPAALNPATLLPEETDEPVTHDCHQLLIEETGVRKDLTDIPLTGEVLTWFTDGSSYVVEGKRMAGAAVVDGTRTIWASSLPEGTSAQKAELMALTQALRLAEGKSINIYTDSRYAFATAHVHGAIYKQRGWLTSAGREIKNKEEILSLLEALHLPKRLAIIHCPGHQKAKDPISRGNQMADRVAKQAAQGVNLLAGKRTADGSEFEKRTADGSEFESPKKKAKVE

SEQ ID NO: 386 - protein, 2085 aa, synthetic construct
MPAAKRVKLDGGDKKYSIGLDIGTNSVGWAVITDEYKVPSKKFKVLGNTDRHSIKKNLIGALLFDSGETAEATRLKRTARRRYTRRKNRICYLQEIFSNEMAKVDDSFFHRLEESFLVEEDKKHERHPIFGNIVDEVAYHEKYPTIYHLRKKLVDSTDKADLRLIYLALAHMIKFRGHFLIEGDLNPDNSDVDKLFIQLVQTYNQLFEENPINASGVDAKAILSARLSKSRRLENLIAQLPGEKKNGLFGNLIALSLGLTPNFKSNFDLAEDAKLQLSKDTYDDDLDNLLAQIGDQYADLFLAAKNLSDAILLSDILRVNTEITKAPLSASMIKRYDEHHQDLTLLKALVRQQLPEKYKEIFFDQSKNGYAGYIDGGASQEEFYKFIKPILEKMDGTEELLVKLNREDLLRKQRTFDNGSIPHQIHLGELHAILRRQEDFYPFLKDNREKIEKILTFRIPYYVGPLARGNSRFAWMTRKSEETITPWNFEEVVDKGASAQSFIERMTNFDKNLPNEKVLPKHSLLYEYFTVYNELTKVKYVTEGMRKPAFLSGEQKKAIVDLLFKTNRKVTVKQLKEDYFKKIECFDSVEISGVEDRFNASLGTYHDLLKIIKDKDFLDNEENEDILEDIVLTLTLFEDREMIEERLKTYAHLFDDKVMKQLKRRRYTGWGRLSRKLINGIRDKQSGKTILDFLKSDGFANRNFMQLIHDDSLTFKEDIQKAQVSGQGDSLHEHIANLAGSPAIKKGILQTVKVVDELVKVMGRHKPENIVIEMARENQTTQKGQKNSRERMKRIEEGIKELGSQILKEHPVENTQLQNEKLYLYYLQNGRDMYVDQELDINRLSDYDVDHIVPQSFLKDDSIDNKVLTRSDKARGKSDNVPSEEVVKKMKNYWRQLLNAKLITQRKFDNLTKAERGGLSELDKAGFIKRQLVETRQITKHVAQILDSRMNTKYDENDKLIREVKVITLKSKLVSDFRKDFQFYKVREINNYHHAHDAYLNAVVGTALIKKYPKLESEFVYGDYKVYDVRKMIAKSEQEIGKATAKYFFYSNIMNFFKTEITLANGEIRKRPLIETNGETGEIVWDKGRDFATVRKVLSMPQVNIVKKTEVQTGGFSKESILPKRNSDKLIARKKDWDPKKYGGFDSPTVAYSVLVVAKVEKGKSKKLKSVKELLGITIMERSSFEKNPIDFLEAKGYKEVKKDLIIKLPKYSLFELENGRKRMLASAGELQKGNELALPSKYVNFLYLASHYEKLKGSPEDNEQKQLFVEQHKHYLDEIIEQISEFSKRVILADANLDKVLSAYNKHRDKPIREQAENIIHLFTLTNLGAPAAFKYFDTTIDRKRYTSTKEVLDATLIHQSITGLYETRIDLSQLGGDGGPAPGSSGGTLQLDDEYRLYSPLVKPDQNIQFWLEQFPQAWAETAGMGLAKQVPPQVIQLKASATPVSVRQYPLSKEAQEGIRPHVQRLIQQGILVPVQSPWNTPLLPVRKPGTNDYRPVQDLREVNKRVQDIHPTVPNPYNLLCALPPQRSWYTVLDLKDAFFCLRLHPTSQPLFAFEWRDPGTGRTGQLTWTRLPQGFKNSPTIFNEALHRDLANFRIQHPQVTLLQYVDDLLLAGATKQDCLEGTKALLLELSDLGYRASAKKAQICRREVTYLGYSLRDGQRWLTEARKKTVVQIPAPTTAKQVREFLGTAGFCRLWIPGFATLAAPLYPLTKPKGEFSWAPEHQKAFDAIKKALLSAPALALPDVTKPFTLYVDERKGVARGVLTQTLGPWRRPVAYLSKKLDPVASGWPVCLKAIAAVAILVKDADKLTLGQNITVIAPHALENIVRQPPDRWMTNARMTHYQSLLLTERVTFAPPAALNPATLLPEETDEPVTHDCHQLLIEETGVRKDLTDIPLTGEVLTWFTDGSSYVVEGKRMAGAAVVDGTRTIWASSLPEGTSAQKAELMALTQALRLAEGKSINIYTDSRYAFATAHVHGAIYKQRGWLTSAGREIKNKEEILSLLEALHLPKRLAIIHCPGHQKAKDPISRGNQMADRVAKQAAQGVNLLAGKRTADGSEFEKRTADGSEFESPKKKAKVE

SEQ ID NO: 387 - protein, 2088 aa, synthetic construct
MPAAKRVKLDGGDKKYSIGLDIGTNSVGWAVITDEYKVPSKKFKVLGNTDRHSIKKNLIGALLFDSGETAEATRLKRTARRRYTRRKNRICYLQEIFSNEMAKVDDSFFHRLEESFLVEEDKKHERHPIFGNIVDEVAYHEKYPTIYHLRKKLVDSTDKADLRLIYLALAHMIKFRGHFLIEGDLNPDNSDVDKLFIQLVQTYNQLFEENPINASGVDAKAILSARLSKSRRLENLIAQLPGEKKNGLFGNLIALSLGLTPNFKSNFDLAEDAKLQLSKDTYDDDLDNLLAQIGDQYADLFLAAKNLSDAILLSDILRVNTEITKAPLSASMIKRYDEHHQDLTLLKALVRQQLPEKYKEIFFDQSKNGYAGYIDGGASQEEFYKFIKPILEKMDGTEELLVKLNREDLLRKQRTFDNGSIPHQIHLGELHAILRRQEDFYPFLKDNREKIEKILTFRIPYYVGPLARGNSRFAWMTRKSEETITPWNFEEVVDKGASAQSFIERMTNFDKNLPNEKVLPKHSLLYEYFTVYNELTKVKYVTEGMRKPAFLSGEQKKAIVDLLFKTNRKVTVKQLKEDYFKKIECFDSVEISGVEDRFNASLGTYHDLLKIIKDKDFLDNEENEDILEDIVLTLTLFEDREMIEERLKTYAHLFDDKVMKQLKRRRYTGWGRLSRKLINGIRDKQSGKTILDFLKSDGFANRNFMQLIHDDSLTFKEDIQKAQVSGQGDSLHEHIANLAGSPAIKKGILQTVKVVDELVKVMGRHKPENIVIEMARENQTTQKGQKNSRERMKRIEEGIKELGSQILKEHPVENTQLQNEKLYLYYLQNGRDMYVDQELDINRLSDYDVDHIVPQSFLKDDSIDNKVLTRSDKARGKSDNVPSEEVVKKMKNYWRQLLNAKLITQRKFDNLTKAERGGLSELDKAGFIKRQLVETRQITKHVAQILDSRMNTKYDENDKLIREVKVITLKSKLVSDFRKDFQFYKVREINNYHHAHDAYLNAVVGTALIKKYPKLESEFVYGDYKVYDVRKMIAKSEQEIGKATAKYFFYSNIMNFFKTEITLANGEIRKRPLIETNGETGEIVWDKGRDFATVRKVLSMPQVNIVKKTEVQTGGFSKESILPKRNSDKLIARKKDWDPKKYGGFDSPTVAYSVLVVAKVEKGKSKKLKSVKELLGITIMERSSFEKNPIDFLEAKGYKEVKKDLIIKLPKYSLFELENGRKRMLASAGELQKGNELALPSKYVNFLYLASHYEKLKGSPEDNEQKQLFVEQHKHYLDEIIEQISEFSKRVILADANLDKVLSAYNKHRDKPIREQAENIIHLFTLTNLGAPAAFKYFDTTIDRKRYTSTKEVLDATLIHQSITGLYETRIDLSQLGGDGGGGSGSSPAPGGTLQLDDEYRLYSPLVKPDQNIQFWLEQFPQAWAETAGMGLAKQVPPQVIQLKASATPVSVRQYPLSKEAQEGIRPHVQRLIQQGILVPVQSPWNTPLLPVRKPGTNDYRPVQDLREVNKRVQDIHPTVPNPYNLLCALPPQRSWYTVLDLKDAFFCLRLHPTSQPLFAFEWRDPGTGRTGQLTWTRLPQGFKNSPTIFNEALHRDLANFRIQHPQVTLLQYVDDLLLAGATKQDCLEGTKALLLELSDLGYRASAKKAQICRREVTYLGYSLRDGQRWLTEARKKTVVQIPAPTTAKQVREFLGTAGFCRLWIPGFATLAAPLYPLTKPKGEFSWAPEHQKAFDAIKKALLSAPALALPDVTKPFTLYVDERKGVARGVLTQTLGPWRRPVAYLSKKLDPVASGWPVCLKAIAAVAILVKDADKLTLGQNITVIAPHALENIVRQPPDRWMTNARMTHYQSLLLTERVTFAPPAALNPATLLPEETDEPVTHDCHQLLIEETGVRKDLTDIPLTGEVLTWFTDGSSYVVEGKRMAGAAVVDGTRTIWASSLPEGTSAQKAELMALTQALRLAEGKSINIYTDSRYAFATAHVHGAIYKQRGWLTSAGREIKNKEEILSLLEALHLPKRLAIIHCPGHQKAKDPISRGNQMADRVAKQAAQGVNLLAGKRTADGSEFEKRTADGSEFESPKKKAKVE

SEQ ID NO: 388 - protein, 2088 aa, synthetic construct
MPAAKRVKLDGGDKKYSIGLDIGTNSVGWAVITDEYKVPSKKFKVLGNTDRHSIKKNLIGALLFDSGETAEATRLKRTARRRYTRRKNRICYLQEIFSNEMAKVDDSFFHRLEESFLVEEDKKHERHPIFGNIVDEVAYHEKYPTIYHLRKKLVDSTDKADLRLIYLALAHMIKFRGHFLIEGDLNPDNSDVDKLFIQLVQTYNQLFEENPINASGVDAKAILSARLSKSRRLENLIAQLPGEKKNGLFGNLIALSLGLTPNFKSNFDLAEDAKLQLSKDTYDDDLDNLLAQIGDQYADLFLAAKNLSDAILLSDILRVNTEITKAPLSASMIKRYDEHHQDLTLLKALVRQQLPEKYKEIFFDQSKNGYAGYIDGGASQEEFYKFIKPILEKMDGTEELLVKLNREDLLRKQRTFDNGSIPHQIHLGELHAILRRQEDFYPFLKDNREKIEKILTFRIPYYVGPLARGNSRFAWMTRKSEETITPWNFEEVVDKGASAQSFIERMTNFDKNLPNEKVLPKHSLLYEYFTVYNELTKVKYVTEGMRKPAFLSGEQKKAIVDLLFKTNRKVTVKQLKEDYFKKIECFDSVEISGVEDRFNASLGTYHDLLKIIKDKDFLDNEENEDILEDIVLTLTLFEDREMIEERLKTYAHLFDDKVMKQLKRRRYTGWGRLSRKLINGIRDKQSGKTILDFLKSDGFANRNFMQLIHDDSLTFKEDIQKAQVSGQGDSLHEHIANLAGSPAIKKGILQTVKVVDELVKVMGRHKPENIVIEMARENQTTQKGQKNSRERMKRIEEGIKELGSQILKEHPVENTQLQNEKLYLYYLQNGRDMYVDQELDINRLSDYDVDHIVPQSFLKDDSIDNKVLTRSDKARGKSDNVPSEEVVKKMKNYWRQLLNAKLITQRKFDNLTKAERGGLSELDKAGFIKRQLVETRQITKHVAQILDSRMNTKYDENDKLIREVKVITLKSKLVSDFRKDFQFYKVREINNYHHAHDAYLNAVVGTALIKKYPKLESEFVYGDYKVYDVRKMIAKSEQEIGKATAKYFFYSNIMNFFKTEITLANGEIRKRPLIETNGETGEIVWDKGRDFATVRKVLSMPQVNIVKKTEVQTGGFSKESILPKRNSDKLIARKKDWDPKKYGGFDSPTVAYSVLVVAKVEKGKSKKLKSVKELLGITIMERSSFEKNPIDFLEAKGYKEVKKDLIIKLPKYSLFELENGRKRMLASAGELQKGNELALPSKYVNFLYLASHYEKLKGSPEDNEQKQLFVEQHKHYLDEIIEQISEFSKRVILADANLDKVLSAYNKHRDKPIREQAENIIHLFTLTNLGAPAAFKYFDTTIDRKRYTSTKEVLDATLIHQSITGLYETRIDLSQLGGDGGPAPGSSGGSGGTLQLDDEYRLYSPLVKPDQNIQFWLEQFPQAWAETAGMGLAKQVPPQVIQLKASATPVSVRQYPLSKEAQEGIRPHVQRLIQQGILVPVQSPWNTPLLPVRKPGTNDYRPVQDLREVNKRVQDIHPTVPNPYNLLCALPPQRSWYTVLDLKDAFFCLRLHPTSQPLFAFEWRDPGTGRTGQLTWTRLPQGFKNSPTIFNEALHRDLANFRIQHPQVTLLQYVDDLLLAGATKQDCLEGTKALLLELSDLGYRASAKKAQICRREVTYLGYSLRDGQRWLTEARKKTVVQIPAPTTAKQVREFLGTAGFCRLWIPGFATLAAPLYPLTKPKGEFSWAPEHQKAFDAIKKALLSAPALALPDVTKPFTLYVDERKGVARGVLTQTLGPWRRPVAYLSKKLDPVASGWPVCLKAIAAVAILVKDADKLTLGQNITVIAPHALENIVRQPPDRWMTNARMTHYQSLLLTERVTFAPPAALNPATLLPEETDEPVTHDCHQLLIEETGVRKDLTDIPLTGEVLTWFTDGSSYVVEGKRMAGAAVVDGTRTIWASSLPEGTSAQKAELMALTQALRLAEGKSINIYTDSRYAFATAHVHGAIYKQRGWLTSAGREIKNKEEILSLLEALHLPKRLAIIHCPGHQKAKDPISRGNQMADRVAKQAAQGVNLLAGKRTADGSEFEKRTADGSEFESPKKKAKVE

SEQ ID NO: 389 - protein, 2088 aa, synthetic construct
MPAAKRVKLDGGDKKYSIGLDIGTNSVGWAVITDEYKVPSKKFKVLGNTDRHSIKKNLIGALLFDSGETAEATRLKRTARRRYTRRKNRICYLQEIFSNEMAKVDDSFFHRLEESFLVEEDKKHERHPIFGNIVDEVAYHEKYPTIYHLRKKLVDSTDKADLRLIYLALAHMIKFRGHFLIEGDLNPDNSDVDKLFIQLVQTYNQLFEENPINASGVDAKAILSARLSKSRRLENLIAQLPGEKKNGLFGNLIALSLGLTPNFKSNFDLAEDAKLQLSKDTYDDDLDNLLAQIGDQYADLFLAAKNLSDAILLSDILRVNTEITKAPLSASMIKRYDEHHQDLTLLKALVRQQLPEKYKEIFFDQSKNGYAGYIDGGASQEEFYKFIKPILEKMDGTEELLVKLNREDLLRKQRTFDNGSIPHQIHLGELHAILRRQEDFYPFLKDNREKIEKILTFRIPYYVGPLARGNSRFAWMTRKSEETITPWNFEEVVDKGASAQSFIERMTNFDKNLPNEKVLPKHSLLYEYFTVYNELTKVKYVTEGMRKPAFLSGEQKKAIVDLLFKTNRKVTVKQLKEDYFKKIECFDSVEISGVEDRFNASLGTYHDLLKIIKDKDFLDNEENEDILEDIVLTLTLFEDREMIEERLKTYAHLFDDKVMKQLKRRRYTGWGRLSRKLINGIRDKQSGKTILDFLKSDGFANRNFMQLIHDDSLTFKEDIQKAQVSGQGDSLHEHIANLAGSPAIKKGILQTVKVVDELVKVMGRHKPENIVIEMARENQTTQKGQKNSRERMKRIEEGIKELGSQILKEHPVENTQLQNEKLYLYYLQNGRDMYVDQELDINRLSDYDVDHIVPQSFLKDDSIDNKVLTRSDKARGKSDNVPSEEVVKKMKNYWRQLLNAKLITQRKFDNLTKAERGGLSELDKAGFIKRQLVETRQITKHVAQILDSRMNTKYDENDKLIREVKVITLKSKLVSDFRKDFQFYKVREINNYHHAHDAYLNAVVGTALIKKYPKLESEFVYGDYKVYDVRKMIAKSEQEIGKATAKYFFYSNIMNFFKTEITLANGEIRKRPLIETNGETGEIVWDKGRDFATVRKVLSMPQVNIVKKTEVQTGGFSKESILPKRNSDKLIARKKDWDPKKYGGFDSPTVAYSVLVVAKVEKGKSKKLKSVKELLGITIMERSSFEKNPIDFLEAKGYKEVKKDLIIKLPKYSLFELENGRKRMLASAGELQKGNELALPSKYVNFLYLASHYEKLKGSPEDNEQKQLFVEQHKHYLDEIIEQISEFSKRVILADANLDKVLSAYNKHRDKPIREQAENIIHLFTLTNLGAPAAFKYFDTTIDRKRYTSTKEVLDATLIHQSITGLYETRIDLSQLGGDGGGSSPAPGGSGGTLQLDDEYRLYSPLVKPDQNIQFWLEQFPQAWAETAGMGLAKQVPPQVIQLKASATPVSVRQYPLSKEAQEGIRPHVQRLIQQGILVPVQSPWNTPLLPVRKPGTNDYRPVQDLREVNKRVQDIHPTVPNPYNLLCALPPQRSWYTVLDLKDAFFCLRLHPTSQPLFAFEWRDPGTGRTGQLTWTRLPQGFKNSPTIFNEALHRDLANFRIQHPQVTLLQYVDDLLLAGATKQDCLEGTKALLLELSDLGYRASAKKAQICRREVTYLGYSLRDGQRWLTEARKKTVVQIPAPTTAKQVREFLGTAGFCRLWIPGFATLAAPLYPLTKPKGEFSWAPEHQKAFDAIKKALLSAPALALPDVTKPFTLYVDERKGVARGVLTQTLGPWRRPVAYLSKKLDPVASGWPVCLKAIAAVAILVKDADKLTLGQNITVIAPHALENIVRQPPDRWMTNARMTHYQSLLLTERVTFAPPAALNPATLLPEETDEPVTHDCHQLLIEETGVRKDLTDIPLTGEVLTWFTDGSSYVVEGKRMAGAAVVDGTRTIWASSLPEGTSAQKAELMALTQALRLAEGKSINIYTDSRYAFATAHVHGAIYKQRGWLTSAGREIKNKEEILSLLEALHLPKRLAIIHCPGHQKAKDPISRGNQMADRVAKQAAQGVNLLAGKRTADGSEFEKRTADGSEFESPKKKAKVE

SEQ ID NO: 390 - protein, 2090 aa, synthetic construct
MPAAKRVKLDGGDKKYSIGLDIGTNSVGWAVITDEYKVPSKKFKVLGNTDRHSIKKNLIGALLFDSGETAEATRLKRTARRRYTRRKNRICYLQEIFSNEMAKVDDSFFHRLEESFLVEEDKKHERHPIFGNIVDEVAYHEKYPTIYHLRKKLVDSTDKADLRLIYLALAHMIKFRGHFLIEGDLNPDNSDVDKLFIQLVQTYNQLFEENPINASGVDAKAILSARLSKSRRLENLIAQLPGEKKNGLFGNLIALSLGLTPNFKSNFDLAEDAKLQLSKDTYDDDLDNLLAQIGDQYADLFLAAKNLSDAILLSDILRVNTEITKAPLSASMIKRYDEHHQDLTLLKALVRQQLPEKYKEIFFDQSKNGYAGYIDGGASQEEFYKFIKPILEKMDGTEELLVKLNREDLLRKQRTFDNGSIPHQIHLGELHAILRRQEDFYPFLKDNREKIEKILTFRIPYYVGPLARGNSRFAWMTRKSEETITPWNFEEVVDKGASAQSFIERMTNFDKNLPNEKVLPKHSLLYEYFTVYNELTKVKYVTEGMRKPAFLSGEQKKAIVDLLFKTNRKVTVKQLKEDYFKKIECFDSVEISGVEDRFNASLGTYHDLLKIIKDKDFLDNEENEDILEDIVLTLTLFEDREMIEERLKTYAHLFDDKVMKQLKRRRYTGWGRLSRKLINGIRDKQSGKTILDFLKSDGFANRNFMQLIHDDSLTFKEDIQKAQVSGQGDSLHEHIANLAGSPAIKKGILQTVKVVDELVKVMGRHKPENIVIEMARENQTTQKGQKNSRERMKRIEEGIKELGSQILKEHPVENTQLQNEKLYLYYLQNGRDMYVDQELDINRLSDYDVDHIVPQSFLKDDSIDNKVLTRSDKARGKSDNVPSEEVVKKMKNYWRQLLNAKLITQRKFDNLTKAERGGLSELDKAGFIKRQLVETRQITKHVAQILDSRMNTKYDENDKLIREVKVITLKSKLVSDFRKDFQFYKVREINNYHHAHDAYLNAVVGTALIKKYPKLESEFVYGDYKVYDVRKMIAKSEQEIGKATAKYFFYSNIMNFFKTEITLANGEIRKRPLIETNGETGEIVWDKGRDFATVRKVLSMPQVNIVKKTEVQTGGFSKESILPKRNSDKLIARKKDWDPKKYGGFDSPTVAYSVLVVAKVEKGKSKKLKSVKELLGITIMERSSFEKNPIDFLEAKGYKEVKKDLIIKLPKYSLFELENGRKRMLASAGELQKGNELALPSKYVNFLYLASHYEKLKGSPEDNEQKQLFVEQHKHYLDEIIEQISEFSKRVILADANLDKVLSAYNKHRDKPIREQAENIIHLFTLTNLGAPAAFKYFDTTIDRKRYTSTKEVLDATLIHQSITGLYETRIDLSQLGGDGGEAAAKGSSPAPGGTLQLDDEYRLYSPLVKPDQNIQFWLEQFPQAWAETAGMGLAKQVPPQVIQLKASATPVSVRQYPLSKEAQEGIRPHVQRLIQQGILVPVQSPWNTPLLPVRKPGTNDYRPVQDLREVNKRVQDIHPTVPNPYNLLCALPPQRSWYTVLDLKDAFFCLRLHPTSQPLFAFEWRDPGTGRTGQLTWTRLPQGFKNSPTIFNEALHRDLANFRIQHPQVTLLQYVDDLLLAGATKQDCLEGTKALLLELSDLGYRASAKKAQICRREVTYLGYSLRDGQRWLTEARKKTVVQIPAPTTAKQVREFLGTAGFCRLWIPGFATLAAPLYPLTKPKGEFSWAPEHQKAFDAIKKALLSAPALALPDVTKPFTLYVDERKGVARGVLTQTLGPWRRPVAYLSKKLDPVASGWPVCLKAIAAVAILVKDADKLTLGQNITVIAPHALENIVRQPPDRWMTNARMTHYQSLLLTERVTFAPPAALNPATLLPEETDEPVTHDCHQLLIEETGVRKDLTDIPLTGEVLTWFTDGSSYVVEGKRMAGAAVVDGTRTIWASSLPEGTSAQKAELMALTQALRLAEGKSINIYTDSRYAFATAHVHGAIYKQRGWLTSAGREIKNKEEILSLLEALHLPKRLAIIHCPGHQKAKDPISRGNQMADRVAKQAAQGVNLLAGKRTADGSEFEKRTADGSEFESPKKKAKVE

SEQ ID NO: 391 - protein, 2094 aa, synthetic construct
MPAAKRVKLDGGDKKYSIGLDIGTNSVGWAVITDEYKVPSKKFKVLGNTDRHSIKKNLIGALLFDSGETAEATRLKRTARRRYTRRKNRICYLQEIFSNEMAKVDDSFFHRLEESFLVEEDKKHERHPIFGNIVDEVAYHEKYPTIYHLRKKLVDSTDKADLRLIYLALAHMIKFRGHFLIEGDLNPDNSDVDKLFIQLVQTYNQLFEENPINASGVDAKAILSARLSKSRRLENLIAQLPGEKKNGLFGNLIALSLGLTPNFKSNFDLAEDAKLQLSKDTYDDDLDNLLAQIGDQYADLFLAAKNLSDAILLSDILRVNTEITKAPLSASMIKRYDEHHQDLTLLKALVRQQLPEKYKEIFFDQSKNGYAGYIDGGASQEEFYKFIKPILEKMDGTEELLVKLNREDLLRKQRTFDNGSIPHQIHLGELHAILRRQEDFYPFLKDNREKIEKILTFRIPYYVGPLARGNSRFAWMTRKSEETITPWNFEEVVDKGASAQSFIERMTNFDKNLPNEKVLPKHSLLYEYFTVYNELTKVKYVTEGMRKPAFLSGEQKKAIVDLLFKTNRKVTVKQLKEDYFKKIECFDSVEISGVEDRFNASLGTYHDLLKIIKDKDFLDNEENEDILEDIVLTLTLFEDREMIEERLKTYAHLFDDKVMKQLKRRRYTGWGRLSRKLINGIRDKQSGKTILDFLKSDGFANRNFMQLIHDDSLTFKEDIQKAQVSGQGDSLHEHIANLAGSPAIKKGILQTVKVVDELVKVMGRHKPENIVIEMARENQTTQKGQKNSRERMKRIEEGIKELGSQILKEHPVENTQLQNEKLYLYYLQNGRDMYVDQELDINRLSDYDVDHIVPQSFLKDDSIDNKVLTRSDKARGKSDNVPSEEVVKKMKNYWRQLLNAKLITQRKFDNLTKAERGGLSELDKAGFIKRQLVETRQITKHVAQILDSRMNTKYDENDKLIREVKVITLKSKLVSDFRKDFQFYKVREINNYHHAHDAYLNAVVGTALIKKYPKLESEFVYGDYKVYDVRKMIAKSEQEIGKATAKYFFYSNIMNFFKTEITLANGEIRKRPLIETNGETGEIVWDKGRDFATVRKVLSMPQVNIVKKTEVQTGGFSKESILPKRNSDKLIARKKDWDPKKYGGFDSPTVAYSVLVVAKVEKGKSKKLKSVKELLGITIMERSSFEKNPIDFLEAKGYKEVKKDLIIKLPKYSLFELENGRKRMLASAGELQKGNELALPSKYVNFLYLASHYEKLKGSPEDNEQKQLFVEQHKHYLDEIIEQISEFSKRVILADANLDKVLSAYNKHRDKPIREQAENIIHLFTLTNLGAPAAFKYFDTTIDRKRYTSTKEVLDATLIHQSITGLYETRIDLSQLGGDGGGGGGSGGGGSGGGGSGGTLQLDDEYRLYSPLVKPDQNIQFWLEQFPQAWAETAGMGLAKQVPPQVIQLKASATPVSVRQYPLSKEAQEGIRPHVQRLIQQGILVPVQSPWNTPLLPVRKPGTNDYRPVQDLREVNKRVQDIHPTVPNPYNLLCALPPQRSWYTVLDLKDAFFCLRLHPTSQPLFAFEWRDPGTGRTGQLTWTRLPQGFKNSPTIFNEALHRDLANFRIQHPQVTLLQYVDDLLLAGATKQDCLEGTKALLLELSDLGYRASAKKAQICRREVTYLGYSLRDGQRWLTEARKKTVVQIPAPTTAKQVREFLGTAGFCRLWIPGFATLAAPLYPLTKPKGEFSWAPEHQKAFDAIKKALLSAPALALPDVTKPFTLYVDERKGVARGVLTQTLGPWRRPVAYLSKKLDPVASGWPVCLKAIAAVAILVKDADKLTLGQNITVIAPHALENIVRQPPDRWMTNARMTHYQSLLLTERVTFAPPAALNPATLLPEETDEPVTHDCHQLLIEETGVRKDLTDIPLTGEVLTWFTDGSSYVVEGKRMAGAAVVDGTRTIWASSLPEGTSAQKAELMALTQALRLAEGKSINIYTDSRYAFATAHVHGAIYKQRGWLTSAGREIKNKEEILSLLEALHLPKRLAIIHCPGHQKAKDPISRGNQMADRVAKQAAQGVNLLAGKRTADGSEFEKRTADGSEFESPKKKAKVE

SEQ ID NO: 392 - protein, 2084 aa, synthetic construct
MPAAKRVKLDGGDKKYSIGLDIGTNSVGWAVITDEYKVPSKKFKVLGNTDRHSIKKNLIGALLFDSGETAEATRLKRTARRRYTRRKNRICYLQEIFSNEMAKVDDSFFHRLEESFLVEEDKKHERHPIFGNIVDEVAYHEKYPTIYHLRKKLVDSTDKADLRLIYLALAHMIKFRGHFLIEGDLNPDNSDVDKLFIQLVQTYNQLFEENPINASGVDAKAILSARLSKSRRLENLIAQLPGEKKNGLFGNLIALSLGLTPNFKSNFDLAEDAKLQLSKDTYDDDLDNLLAQIGDQYADLFLAAKNLSDAILLSDILRVNTEITKAPLSASMIKRYDEHHQDLTLLKALVRQQLPEKYKEIFFDQSKNGYAGYIDGGASQEEFYKFIKPILEKMDGTEELLVKLNREDLLRKQRTFDNGSIPHQIHLGELHAILRRQEDFYPFLKDNREKIEKILTFRIPYYVGPLARGNSRFAWMTRKSEETITPWNFEEVVDKGASAQSFIERMTNFDKNLPNEKVLPKHSLLYEYFTVYNELTKVKYVTEGMRKPAFLSGEQKKAIVDLLFKTNRKVTVKQLKEDYFKKIECFDSVEISGVEDRFNASLGTYHDLLKIIKDKDFLDNEENEDILEDIVLTLTLFEDREMIEERLKTYAHLFDDKVMKQLKRRRYTGWGRLSRKLINGIRDKQSGKTILDFLKSDGFANRNFMQLIHDDSLTFKEDIQKAQVSGQGDSLHEHIANLAGSPAIKKGILQTVKVVDELVKVMGRHKPENIVIEMARENQTTQKGQKNSRERMKRIEEGIKELGSQILKEHPVENTQLQNEKLYLYYLQNGRDMYVDQELDINRLSDYDVDHIVPQSFLKDDSIDNKVLTRSDKARGKSDNVPSEEVVKKMKNYWRQLLNAKLITQRKFDNLTKAERGGLSELDKAGFIKRQLVETRQITKHVAQILDSRMNTKYDENDKLIREVKVITLKSKLVSDFRKDFQFYKVREINNYHHAHDAYLNAVVGTALIKKYPKLESEFVYGDYKVYDVRKMIAKSEQEIGKATAKYFFYSNIMNFFKTEITLANGEIRKRPLIETNGETGEIVWDKGRDFATVRKVLSMPQVNIVKKTEVQTGGFSKESILPKRNSDKLIARKKDWDPKKYGGFDSPTVAYSVLVVAKVEKGKSKKLKSVKELLGITIMERSSFEKNPIDFLEAKGYKEVKKDLIIKLPKYSLFELENGRKRMLASAGELQKGNELALPSKYVNFLYLASHYEKLKGSPEDNEQKQLFVEQHKHYLDEIIEQISEFSKRVILADANLDKVLSAYNKHRDKPIREQAENIIHLFTLTNLGAPAAFKYFDTTIDRKRYTSTKEVLDATLIHQSITGLYETRIDLSQLGGDGGGGGGSGGTLQLDDEYRLYSPLVKPDQNIQFWLEQFPQAWAETAGMGLAKQVPPQVIQLKASATPVSVRQYPLSKEAQEGIRPHVQRLIQQGILVPVQSPWNTPLLPVRKPGTNDYRPVQDLREVNKRVQDIHPTVPNPYNLLCALPPQRSWYTVLDLKDAFFCLRLHPTSQPLFAFEWRDPGTGRTGQLTWTRLPQGFKNSPTIFNEALHRDLANFRIQHPQVTLLQYVDDLLLAGATKQDCLEGTKALLLELSDLGYRASAKKAQICRREVTYLGYSLRDGQRWLTEARKKTVVQIPAPTTAKQVREFLGTAGFCRLWIPGFATLAAPLYPLTKPKGEFSWAPEHQKAFDAIKKALLSAPALALPDVTKPFTLYVDERKGVARGVLTQTLGPWRRPVAYLSKKLDPVASGWPVCLKAIAAVAILVKDADKLTLGQNITVIAPHALENIVRQPPDRWMTNARMTHYQSLLLTERVTFAPPAALNPATLLPEETDEPVTHDCHQLLIEETGVRKDLTDIPLTGEVLTWFTDGSSYVVEGKRMAGAAVVDGTRTIWASSLPEGTSAQKAELMALTQALRLAEGKSINIYTDSRYAFATAHVHGAIYKQRGWLTSAGREIKNKEEILSLLEALHLPKRLAIIHCPGHQKAKDPISRGNQMADRVAKQAAQGVNLLAGKRTADGSEFEKRTADGSEFESPKKKAKVE

SEQ ID NO: 393 - protein, 2085 aa, synthetic construct
MPAAKRVKLDGGDKKYSIGLDIGTNSVGWAVITDEYKVPSKKFKVLGNTDRHSIKKNLIGALLFDSGETAEATRLKRTARRRYTRRKNRICYLQEIFSNEMAKVDDSFFHRLEESFLVEEDKKHERHPIFGNIVDEVAYHEKYPTIYHLRKKLVDSTDKADLRLIYLALAHMIKFRGHFLIEGDLNPDNSDVDKLFIQLVQTYNQLFEENPINASGVDAKAILSARLSKSRRLENLIAQLPGEKKNGLFGNLIALSLGLTPNFKSNFDLAEDAKLQLSKDTYDDDLDNLLAQIGDQYADLFLAAKNLSDAILLSDILRVNTEITKAPLSASMIKRYDEHHQDLTLLKALVRQQLPEKYKEIFFDQSKNGYAGYIDGGASQEEFYKFIKPILEKMDGTEELLVKLNREDLLRKQRTFDNGSIPHQIHLGELHAILRRQEDFYPFLKDNREKIEKILTFRIPYYVGPLARGNSRFAWMTRKSEETITPWNFEEVVDKGASAQSFIERMTNFDKNLPNEKVLPKHSLLYEYFTVYNELTKVKYVTEGMRKPAFLSGEQKKAIVDLLFKTNRKVTVKQLKEDYFKKIECFDSVEISGVEDRFNASLGTYHDLLKIIKDKDFLDNEENEDILEDIVLTLTLFEDREMIEERLKTYAHLFDDKVMKQLKRRRYTGWGRLSRKLINGIRDKQSGKTILDFLKSDGFANRNFMQLIHDDSLTFKEDIQKAQVSGQGDSLHEHIANLAGSPAIKKGILQTVKVVDELVKVMGRHKPENIVIEMARENQTTQKGQKNSRERMKRIEEGIKELGSQILKEHPVENTQLQNEKLYLYYLQNGRDMYVDQELDINRLSDYDVDHIVPQSFLKDDSIDNKVLTRSDKARGKSDNVPSEEVVKKMKNYWRQLLNAKLITQRKFDNLTKAERGGLSELDKAGFIKRQLVETRQITKHVAQILDSRMNTKYDENDKLIREVKVITLKSKLVSDFRKDFQFYKVREINNYHHAHDAYLNAVVGTALIKKYPKLESEFVYGDYKVYDVRKMIAKSEQEIGKATAKYFFYSNIMNFFKTEITLANGEIRKRPLIETNGETGEIVWDKGRDFATVRKVLSMPQVNIVKKTEVQTGGFSKESILPKRNSDKLIARKKDWDPKKYGGFDSPTVAYSVLVVAKVEKGKSKKLKSVKELLGITIMERSSFEKNPIDFLEAKGYKEVKKDLIIKLPKYSLFELENGRKRMLASAGELQKGNELALPSKYVNFLYLASHYEKLKGSPEDNEQKQLFVEQHKHYLDEIIEQISEFSKRVILADANLDKVLSAYNKHRDKPIREQAENIIHLFTLTNLGAPAAFKYFDTTIDRKRYTSTKEVLDATLIHQSITGLYETRIDLSQLGGDGGGSSGGGGGTLQLDDEYRLYSPLVKPDQNIQFWLEQFPQAWAETAGMGLAKQVPPQVIQLKASATPVSVRQYPLSKEAQEGIRPHVQRLIQQGILVPVQSPWNTPLLPVRKPGTNDYRPVQDLREVNKRVQDIHPTVPNPYNLLCALPPQRSWYTVLDLKDAFFCLRLHPTSQPLFAFEWRDPGTGRTGQLTWTRLPQGFKNSPTIFNEALHRDLANFRIQHPQVTLLQYVDDLLLAGATKQDCLEGTKALLLELSDLGYRASAKKAQICRREVTYLGYSLRDGQRWLTEARKKTVVQIPAPTTAKQVREFLGTAGFCRLWIPGFATLAAPLYPLTKPKGEFSWAPEHQKAFDAIKKALLSAPALALPDVTKPFTLYVDERKGVARGVLTQTLGPWRRPVAYLSKKLDPVASGWPVCLKAIAAVAILVKDADKLTLGQNITVIAPHALENIVRQPPDRWMTNARMTHYQSLLLTERVTFAPPAALNPATLLPEETDEPVTHDCHQLLIEETGVRKDLTDIPLTGEVLTWFTDGSSYVVEGKRMAGAAVVDGTRTIWASSLPEGTSAQKAELMALTQALRLAEGKSINIYTDSRYAFATAHVHGAIYKQRGWLTSAGREIKNKEEILSLLEALHLPKRLAIIHCPGHQKAKDPISRGNQMADRVAKQAAQGVNLLAGKRTADGSEFEKRTADGSEFESPKKKAKVE

SEQ ID NO: 394 - protein, 2087 aa, synthetic construct
MPAAKRVKLDGGDKKYSIGLDIGTNSVGWAVITDEYKVPSKKFKVLGNTDRHSIKKNLIGALLFDSGETAEATRLKRTARRRYTRRKNRICYLQEIFSNEMAKVDDSFFHRLEESFLVEEDKKHERHPIFGNIVDEVAYHEKYPTIYHLRKKLVDSTDKADLRLIYLALAHMIKFRGHFLIEGDLNPDNSDVDKLFIQLVQTYNQLFEENPINASGVDAKAILSARLSKSRRLENLIAQLPGEKKNGLFGNLIALSLGLTPNFKSNFDLAEDAKLQLSKDTYDDDLDNLLAQIGDQYADLFLAAKNLSDAILLSDILRVNTEITKAPLSASMIKRYDEHHQDLTLLKALVRQQLPEKYKEIFFDQSKNGYAGYIDGGASQEEFYKFIKPILEKMDGTEELLVKLNREDLLRKQRTFDNGSIPHQIHLGELHAILRRQEDFYPFLKDNREKIEKILTFRIPYYVGPLARGNSRFAWMTRKSEETITPWNFEEVVDKGASAQSFIERMTNFDKNLPNEKVLPKHSLLYEYFTVYNELTKVKYVTEGMRKPAFLSGEQKKAIVDLLFKTNRKVTVKQLKEDYFKKIECFDSVEISGVEDRFNASLGTYHDLLKIIKDKDFLDNEENEDILEDIVLTLTLFEDREMIEERLKTYAHLFDDKVMKQLKRRRYTGWGRLSRKLINGIRDKQSGKTILDFLKSDGFANRNFMQLIHDDSLTFKEDIQKAQVSGQGDSLHEHIANLAGSPAIKKGILQTVKVVDELVKVMGRHKPENIVIEMARENQTTQKGQKNSRERMKRIEEGIKELGSQILKEHPVENTQLQNEKLYLYYLQNGRDMYVDQELDINRLSDYDVDHIVPQSFLKDDSIDNKVLTRSDKARGKSDNVPSEEVVKKMKNYWRQLLNAKLITQRKFDNLTKAERGGLSELDKAGFIKRQLVETRQITKHVAQILDSRMNTKYDENDKLIREVKVITLKSKLVSDFRKDFQFYKVREINNYHHAHDAYLNAVVGTALIKKYPKLESEFVYGDYKVYDVRKMIAKSEQEIGKATAKYFFYSNIMNFFKTEITLANGEIRKRPLIETNGETGEIVWDKGRDFATVRKVLSMPQVNIVKKTEVQTGGFSKESILPKRNSDKLIARKKDWDPKKYGGFDSPTVAYSVLVVAKVEKGKSKKLKSVKELLGITIMERSSFEKNPIDFLEAKGYKEVKKDLIIKLPKYSLFELENGRKRMLASAGELQKGNELALPSKYVNFLYLASHYEKLKGSPEDNEQKQLFVEQHKHYLDEIIEQISEFSKRVILADANLDKVLSAYNKHRDKPIREQAENIIHLFTLTNLGAPAAFKYFDTTIDRKRYTSTKEVLDATLIHQSITGLYETRIDLSQLGGDGGGGSEAAAKGGTLQLDDEYRLYSPLVKPDQNIQFWLEQFPQAWAETAGMGLAKQVPPQVIQLKASATPVSVRQYPLSKEAQEGIRPHVQRLIQQGILVPVQSPWNTPLLPVRKPGTNDYRPVQDLREVNKRVQDIHPTVPNPYNLLCALPPQRSWYTVLDLKDAFFCLRLHPTSQPLFAFEWRDPGTGRTGQLTWTRLPQGFKNSPTIFNEALHRDLANFRIQHPQVTLLQYVDDLLLAGATKQDCLEGTKALLLELSDLGYRASAKKAQICRREVTYLGYSLRDGQRWLTEARKKTVVQIPAPTTAKQVREFLGTAGFCRLWIPGFATLAAPLYPLTKPKGEFSWAPEHQKAFDAIKKALLSAPALALPDVTKPFTLYVDERKGVARGVLTQTLGPWRRPVAYLSKKLDPVASGWPVCLKAIAAVAILVKDADKLTLGQNITVIAPHALENIVRQPPDRWMTNARMTHYQSLLLTERVTFAPPAALNPATLLPEETDEPVTHDCHQLLIEETGVRKDLTDIPLTGEVLTWFTDGSSYVVEGKRMAGAAVVDGTRTIWASSLPEGTSAQKAELMALTQALRLAEGKSINIYTDSRYAFATAHVHGAIYKQRGWLTSAGREIKNKEEILSLLEALHLPKRLAIIHCPGHQKAKDPISRGNQMADRVAKQAAQGVNLLAGKRTADGSEFEKRTADGSEFESPKKKAKVE

SEQ ID NO: 395 - protein, 2088 aa, synthetic construct
MPAAKRVKLDGGDKKYSIGLDIGTNSVGWAVITDEYKVPSKKFKVLGNTDRHSIKKNLIGALLFDSGETAEATRLKRTARRRYTRRKNRICYLQEIFSNEMAKVDDSFFHRLEESFLVEEDKKHERHPIFGNIVDEVAYHEKYPTIYHLRKKLVDSTDKADLRLIYLALAHMIKFRGHFLIEGDLNPDNSDVDKLFIQLVQTYNQLFEENPINASGVDAKAILSARLSKSRRLENLIAQLPGEKKNGLFGNLIALSLGLTPNFKSNFDLAEDAKLQLSKDTYDDDLDNLLAQIGDQYADLFLAAKNLSDAILLSDILRVNTEITKAPLSASMIKRYDEHHQDLTLLKALVRQQLPEKYKEIFFDQSKNGYAGYIDGGASQEEFYKFIKPILEKMDGTEELLVKLNREDLLRKQRTFDNGSIPHQIHLGELHAILRRQEDFYPFLKDNREKIEKILTFRIPYYVGPLARGNSRFAWMTRKSEETITPWNFEEVVDKGASAQSFIERMTNFDKNLPNEKVLPKHSLLYEYFTVYNELTKVKYVTEGMRKPAFLSGEQKKAIVDLLFKTNRKVTVKQLKEDYFKKIECFDSVEISGVEDRFNASLGTYHDLLKIIKDKDFLDNEENEDILEDIVLTLTLFEDREMIEERLKTYAHLFDDKVMKQLKRRRYTGWGRLSRKLINGIRDKQSGKTILDFLKSDGFANRNFMQLIHDDSLTFKEDIQKAQVSGQGDSLHEHIANLAGSPAIKKGILQTVKVVDELVKVMGRHKPENIVIEMARENQTTQKGQKNSRERMKRIEEGIKELGSQILKEHPVENTQLQNEKLYLYYLQNGRDMYVDQELDINRLSDYDVDHIVPQSFLKDDSIDNKVLTRSDKARGKSDNVPSEEVVKKMKNYWRQLLNAKLITQRKFDNLTKAERGGLSELDKAGFIKRQLVETRQITKHVAQILDSRMNTKYDENDKLIREVKVITLKSKLVSDFRKDFQFYKVREINNYHHAHDAYLNAVVGTALIKKYPKLESEFVYGDYKVYDVRKMIAKSEQEIGKATAKYFFYSNIMNFFKTEITLANGEIRKRPLIETNGETGEIVWDKGRDFATVRKVLSMPQVNIVKKTEVQTGGFSKESILPKRNSDKLIARKKDWDPKKYGGFDSPTVAYSVLVVAKVEKGKSKKLKSVKELLGITIMERSSFEKNPIDFLEAKGYKEVKKDLIIKLPKYSLFELENGRKRMLASAGELQKGNELALPSKYVNFLYLASHYEKLKGSPEDNEQKQLFVEQHKHYLDEIIEQISEFSKRVILADANLDKVLSAYNKHRDKPIREQAENIIHLFTLTNLGAPAAFKYFDTTIDRKRYTSTKEVLDATLIHQSITGLYETRIDLSQLGGDGGGGGGSSGGSGGTLQLDDEYRLYSPLVKPDQNIQFWLEQFPQAWAETAGMGLAKQVPPQVIQLKASATPVSVRQYPLSKEAQEGIRPHVQRLIQQGILVPVQSPWNTPLLPVRKPGTNDYRPVQDLREVNKRVQDIHPTVPNPYNLLCALPPQRSWYTVLDLKDAFFCLRLHPTSQPLFAFEWRDPGTGRTGQLTWTRLPQGFKNSPTIFNEALHRDLANFRIQHPQVTLLQYVDDLLLAGATKQDCLEGTKALLLELSDLGYRASAKKAQICRREVTYLGYSLRDGQRWLTEARKKTVVQIPAPTTAKQVREFLGTAGFCRLWIPGFATLAAPLYPLTKPKGEFSWAPEHQKAFDAIKKALLSAPALALPDVTKPFTLYVDERKGVARGVLTQTLGPWRRPVAYLSKKLDPVASGWPVCLKAIAAVAILVKDADKLTLGQNITVIAPHALENIVRQPPDRWMTNARMTHYQSLLLTERVTFAPPAALNPATLLPEETDEPVTHDCHQLLIEETGVRKDLTDIPLTGEVLTWFTDGSSYVVEGKRMAGAAVVDGTRTIWASSLPEGTSAQKAELMALTQALRLAEGKSINIYTDSRYAFATAHVHGAIYKQRGWLTSAGREIKNKEEILSLLEALHLPKRLAIIHCPGHQKAKDPISRGNQMADRVAKQAAQGVNLLAGKRTADGSEFEKRTADGSEFESPKKKAKVE

SEQ ID NO: 396 - protein, 2097 aa, synthetic construct; identical to SEQ ID NO: 113

SEQ ID NO: 397 - protein, 2085 aa, synthetic construct
MPAAKRVKLDGGDKKYSIGLDIGTNSVGWAVITDEYKVPSKKFKVLGNTDRHSIKKNLIGALLFDSGETAEATRLKRTARRRYTRRKNRICYLQEIFSNEMAKVDDSFFHRLEESFLVEEDKKHERHPIFGNIVDEVAYHEKYPTIYHLRKKLVDSTDKADLRLIYLALAHMIKFRGHFLIEGDLNPDNSDVDKLFIQLVQTYNQLFEENPINASGVDAKAILSARLSKSRRLENLIAQLPGEKKNGLFGNLIALSLGLTPNFKSNFDLAEDAKLQLSKDTYDDDLDNLLAQIGDQYADLFLAAKNLSDAILLSDILRVNTEITKAPLSASMIKRYDEHHQDLTLLKALVRQQLPEKYKEIFFDQSKNGYAGYIDGGASQEEFYKFIKPILEKMDGTEELLVKLNREDLLRKQRTFDNGSIPHQIHLGELHAILRRQEDFYPFLKDNREKIEKILTFRIPYYVGPLARGNSRFAWMTRKSEETITPWNFEEVVDKGASAQSFIERMTNFDKNLPNEKVLPKHSLLYEYFTVYNELTKVKYVTEGMRKPAFLSGEQKKAIVDLLFKTNRKVTVKQLKEDYFKKIECFDSVEISGVEDRFNASLGTYHDLLKIIKDKDFLDNEENEDILEDIVLTLTLFEDREMIEERLKTYAHLFDDKVMKQLKRRRYTGWGRLSRKLINGIRDKQSGKTILDFLKSDGFANRNFMQLIHDDSLTFKEDIQKAQVSGQGDSLHEHIANLAGSPAIKKGILQTVKVVDELVKVMGRHKPENIVIEMARENQTTQKGQKNSRERMKRIEEGIKELGSQILKEHPVENTQLQNEKLYLYYLQNGRDMYVDQELDINRLSDYDVDHIVPQSFLKDDSIDNKVLTRSDKARGKSDNVPSEEVVKKMKNYWRQLLNAKLITQRKFDNLTKAERGGLSELDKAGFIKRQLVETRQITKHVAQILDSRMNTKYDENDKLIREVKVITLKSKLVSDFRKDFQFYKVREINNYHHAHDAYLNAVVGTALIKKYPKLESEFVYGDYKVYDVRKMIAKSEQEIGKATAKYFFYSNIMNFFKTEITLANGEIRKRPLIETNGETGEIVWDKGRDFATVRKVLSMPQVNIVKKTEVQTGGFSKESILPKRNSDKLIARKKDWDPKKYGGFDSPTVAYSVLVVAKVEKGKSKKLKSVKELLGITIMERSSFEKNPIDFLEAKGYKEVKKDLIIKLPKYSLFELENGRKRMLASAGELQKGNELALPSKYVNFLYLASHYEKLKGSPEDNEQKQLFVEQHKHYLDEIIEQISEFSKRVILADANLDKVLSAYNKHRDKPIREQAENIIHLFTLTNLGAPAAFKYFDTTIDRKRYTSTKEVLDATLIHQSITGLYETRIDLSQLGGDGGGGSGGGGGTLQLDDEYRLYSPLVKPDQNIQFWLEQFPQAWAETAGMGLAKQVPPQVIQLKASATPVSVRQYPLSKEAQEGIRPHVQRLIQQGILVPVQSPWNTPLLPVRKPGTNDYRPVQDLREVNKRVQDIHPTVPNPYNLLCALPPQRSWYTVLDLKDAFFCLRLHPTSQPLFAFEWRDPGTGRTGQLTWTRLPQGFKNSPTIFNEALHRDLANFRIQHPQVTLLQYVDDLLLAGATKQDCLEGTKALLLELSDLGYRASAKKAQICRREVTYLGYSLRDGQRWLTEARKKTVVQIPAPTTAKQVREFLGTAGFCRLWIPGFATLAAPLYPLTKPKGEFSWAPEHQKAFDAIKKALLSAPALALPDVTKPFTLYVDERKGVARGVLTQTLGPWRRPVAYLSKKLDPVASGWPVCLKAIAAVAILVKDADKLTLGQNITVIAPHALENIVRQPPDRWMTNARMTHYQSLLLTERVTFAPPAALNPATLLPEETDEPVTHDCHQLLIEETGVRKDLTDIPLTGEVLTWFTDGSSYVVEGKRMAGAAVVDGTRTIWASSLPEGTSAQKAELMALTQALRLAEGKSINIYTDSRYAFATAHVHGAIYKQRGWLTSAGREIKNKEEILSLLEALHLPKRLAIIHCPGHQKAKDPISRGNQMADRVAKQAAQGVNLLAGKRTADGSEFEKRTADGSEFESPKKKAKVE

SEQ ID NO: 398 - protein, 2090 aa, synthetic construct; identical to SEQ ID NO: 119

SEQ ID NO: 399 - protein, 2089 aa, synthetic construct
MPAAKRVKLDGGDKKYSIGLDIGTNSVGWAVITDEYKVPSKKFKVLGNTDRHSIKKNLIGALLFDSGETAEATRLKRTARRRYTRRKNRICYLQEIFSNEMAKVDDSFFHRLEESFLVEEDKKHERHPIFGNIVDEVAYHEKYPTIYHLRKKLVDSTDKADLRLIYLALAHMIKFRGHFLIEGDLNPDNSDVDKLFIQLVQTYNQLFEENPINASGVDAKAILSARLSKSRRLENLIAQLPGEKKNGLFGNLIALSLGLTPNFKSNFDLAEDAKLQLSKDTYDDDLDNLLAQIGDQYADLFLAAKNLSDAILLSDILRVNTEITKAPLSASMIKRYDEHHQDLTLLKALVRQQLPEKYKEIFFDQSKNGYAGYIDGGASQEEFYKFIKPILEKMDGTEELLVKLNREDLLRKQRTFDNGSIPHQIHLGELHAILRRQEDFYPFLKDNREKIEKILTFRIPYYVGPLARGNSRFAWMTRKSEETITPWNFEEVVDKGASAQSFIERMTNFDKNLPNEKVLPKHSLLYEYFTVYNELTKVKYVTEGMRKPAFLSGEQKKAIVDLLFKTNRKVTVKQLKEDYFKKIECFDSVEISGVEDRFNASLGTYHDLLKIIKDKDFLDNEENEDILEDIVLTLTLFEDREMIEERLKTYAHLFDDKVMKQLKRRRYTGWGRLSRKLINGIRDKQSGKTILDFLKSDGFANRNFMQLIHDDSLTFKEDIQKAQVSGQGDSLHEHIANLAGSPAIKKGILQTVKVVDELVKVMGRHKPENIVIEMARENQTTQKGQKNSRERMKRIEEGIKELGSQILKEHPVENTQLQNEKLYLYYLQNGRDMYVDQELDINRLSDYDVDHIVPQSFLKDDSIDNKVLTRSDKARGKSDNVPSEEVVKKMKNYWRQLLNAKLITQRKFDNLTKAERGGLSELDKAGFIKRQLVETRQITKHVAQILDSRMNTKYDENDKLIREVKVITLKSKLVSDFRKDFQFYKVREINNYHHAHDAYLNAVVGTALIKKYPKLESEFVYGDYKVYDVRKMIAKSEQEIGKATAKYFFYSNIMNFFKTEITLANGEIRKRPLIETNGETGEIVWDKGRDFATVRKVLSMPQVNIVKKTEVQTGGFSKESILPKRNSDKLIARKKDWDPKKYGGFDSPTVAYSVLVVAKVEKGKSKKLKSVKELLGITIMERSSFEKNPIDFLEAKGYKEVKKDLIIKLPKYSLFELENGRKRMLASAGELQKGNELALPSKYVNFLYLASHYEKLKGSPEDNEQKQLFVEQHKHYLDEIIEQISEFSKRVILADANLDKVLSAYNKHRDKPIREQAENIIHLFTLTNLGAPAAFKYFDTTIDRKRYTSTKEVLDATLIHQSITGLYETRIDLSQLGGDGGEAAAKEAAAKGGTLQLDDEYRLYSPLVKPDQNIQFWLEQFPQAWAETAGMGLAKQVPPQVIQLKASATPVSVRQYPLSKEAQEGIRPHVQRLIQQGILVPVQSPWNTPLLPVRKPGTNDYRPVQDLREVNKRVQDIHPTVPNPYNLLCALPPQRSWYTVLDLKDAFFCLRLHPTSQPLFAFEWRDPGTGRTGQLTWTRLPQGFKNSPTIFNEALHRDLANFRIQHPQVTLLQYVDDLLLAGATKQDCLEGTKALLLELSDLGYRASAKKAQICRREVTYLGYSLRDGQRWLTEARKKTVVQIPAPTTAKQVREFLGTAGFCRLWIPGFATLAAPLYPLTKPKGEFSWAPEHQKAFDAIKKALLSAPALALPDVTKPFTLYVDERKGVARGVLTQTLGPWRRPVAYLSKKLDPVASGWPVCLKAIAAVAILVKDADKLTLGQNITVIAPHALENIVRQPPDRWMTNARMTHYQSLLLTERVTFAPPAALNPATLLPEETDEPVTHDCHQLLIEETGVRKDLTDIPLTGEVLTWFTDGSSYVVEGKRMAGAAVVDGTRTIWASSLPEGTSAQKAELMALTQALRLAEGKSINIYTDSRYAFATAHVHGAIYKQRGWLTSAGREIKNKEEILSLLEALHLPKRLAIIHCPGHQKAKDPISRGNQMADRVAKQAAQGVNLLAGKRTADGSEFEKRTADGSEFESPKKKAKVE

SEQ ID NO: 400 - protein, 2088 aa, synthetic construct
MPAAKRVKLDGGDKKYSIGLDIGTNSVGWAVITDEYKVPSKKFKVLGNTDRHSIKKNLIGALLFDSGETAEATRLKRTARRRYTRRKNRICYLQEIFSNEMAKVDDSFFHRLEESFLVEEDKKHERHPIFGNIVDEVAYHEKYPTIYHLRKKLVDSTDKADLRLIYLALAHMIKFRGHFLIEGDLNPDNSDVDKLFIQLVQTYNQLFEENPINASGVDAKAILSARLSKSRRLENLIAQLPGEKKNGLFGNLIALSLGLTPNFKSNFDLAEDAKLQLSKDTYDDDLDNLLAQIGDQYADLFLAAKNLSDAILLSDILRVNTEITKAPLSASMIKRYDEHHQDLTLLKALVRQQLPEKYKEIFFDQSKNGYAGYIDGGASQEEFYKFIKPILEKMDGTEELLVKLNREDLLRKQRTFDNGSIPHQIHLGELHAILRRQEDFYPFLKDNREKIEKILTFRIPYYVGPLARGNSRFAWMTRKSEETITPWNFEEVVDKGASAQSFIERMTNFDKNLPNEKVLPKHSLLYEYFTVYNELTKVKYVTEGMRKPAFLSGEQKKAIVDLLFKTNRKVTVKQLKEDYFKKIECFDSVEISGVEDRFNASLGTYHDLLKIIKDKDFLDNEENEDILEDIVLTLTLFEDREMIEERLKTYAHLFDDKVMKQLKRRRYTGWGRLSRKLINGIRDKQSGKTILDFLKSDGFANRNFMQLIHDDSLTFKEDIQKAQVSGQGDSLHEHIANLAGSPAIKKGILQTVKVVDELVKVMGRHKPENIVIEMARENQTTQKGQKNSRERMKRIEEGIKELGSQILKEHPVENTQLQNEKLYLYYLQNGRDMYVDQELDINRLSDYDVDHIVPQSFLKDDSIDNKVLTRSDKARGKSDNVPSEEVVKKMKNYWRQLLNAKLITQRKFDNLTKAERGGLSELDKAGFIKRQLVETRQITKHVAQILDSRMNTKYDENDKLIREVKVITLKSKLVSDFRKDFQFYKVREINNYHHAHDAYLNAVVGTALIKKYPKLESEFVYGDYKVYDVRKMIAKSEQEIGKATAKYFFYSNIMNFFKTEITLANGEIRKRPLIETNGETGEIVWDKGRDFATVRKVLSMPQVNIVKKTEVQTGGFSKESILPKRNSDKLIARKKDWDPKKYGGFDSPTVAYSVLVVAKVEKGKSKKLKSVKELLGITIMERSSFEKNPIDFLEAKGYKEVKKDLIIKLPKYSLFELENGRKRMLASAGELQKGNELALPSKYVNFLYLASHYEKLKGSPEDNEQKQLFVEQHKHYLDEIIEQISEFSKRVILADANLDKVLSAYNKHRDKPIREQAENIIHLFTLTNLGAPAAFKYFDTTIDRKRYTSTKEVLDATLIHQSITGLYETRIDLSQLGGDGGPAPGSSGGGGGTLQLDDEYRLYSPLVKPDQNIQFWLEQFPQAWAETAGMGLAKQVPPQVIQLKASATPVSVRQYPLSKEAQEGIRPHVQRLIQQGILVPVQSPWNTPLLPVRKPGTNDYRPVQDLREVNKRVQDIHPTVPNPYNLLCALPPQRSWYTVLDLKDAFFCLRLHPTSQPLFAFEWRDPGTGRTGQLTWTRLPQGFKNSPTIFNEALHRDLANFRIQHPQVTLLQYVDDLLLAGATKQDCLEGTKALLLELSDLGYRASAKKAQICRREVTYLGYSLRDGQRWLTEARKKTVVQIPAPTTAKQVREFLGTAGFCRLWIPGFATLAAPLYPLTKPKGEFSWAPEHQKAFDAIKKALLSAPALALPDVTKPFTLYVDERKGVARGVLTQTLGPWRRPVAYLSKKLDPVASGWPVCLKAIAAVAILVKDADKLTLGQNITVIAPHALENIVRQPPDRWMTNARMTHYQSLLLTERVTFAPPAALNPATLLPEETDEPVTHDCHQLLIEETGVRKDLTDIPLTGEVLTWFTDGSSYVVEGKRMAGAAVVDGTRTIWASSLPEGTSAQKAELMALTQALRLAEGKSINIYTDSRYAFATAHVHGAIYKQRGWLTSAGREIKNKEEILSLLEALHLPKRLAIIHCPGHQKAKDPISRGNQMADRVAKQAAQGVNLLAGKRTADGSEFEKRTADGSEFESPKKKAKVE

SEQ ID NO: 401 - protein, 2088 aa, synthetic construct
MPAAKRVKLDGGDKKYSIGLDIGTNSVGWAVITDEYKVPSKKFKVLGNTDRHSIKKNLIGALLFDSGETAEATRLKRTARRRYTRRKNRICYLQEIFSNEMAKVDDSFFHRLEESFLVEEDKKHERHPIFGNIVDEVAYHEKYPTIYHLRKKLVDSTDKADLRLIYLALAHMIKFRGHFLIEGDLNPDNSDVDKLFIQLVQTYNQLFEENPINASGVDAKAILSARLSKSRRLENLIAQLPGEKKNGLFGNLIALSLGLTPNFKSNFDLAEDAKLQLSKDTYDDDLDNLLAQIGDQYADLFLAAKNLSDAILLSDILRVNTEITKAPLSASMIKRYDEHHQDLTLLKALVRQQLPEKYKEIFFDQSKNGYAGYIDGGASQEEFYKFIKPILEKMDGTEELLVKLNREDLLRKQRTFDNGSIPHQIHLGELHAILRRQEDFYPFLKDNREKIEKILTFRIPYYVGPLARGNSRFAWMTRKSEETITPWNFEEVVDKGASAQSFIERMTNFDKNLPNEKVLPKHSLLYEYFTVYNELTKVKYVTEGMRKPAFLSGEQKKAIVDLLFKTNRKVTVKQLKEDYFKKIECFDSVEISGVEDRFNASLGTYHDLLKIIKDKDFLDNEENEDILEDIVLTLTLFEDREMIEERLKTYAHLFDDKVMKQLKRRRYTGWGRLSRKLINGIRDKQSGKTILDFLKSDGFANRNFMQLIHDDSLTFKEDIQKAQVSGQGDSLHEHIANLAGSPAIKKGILQTVKVVDELVKVMGRHKPENIVIEMARENQTTQKGQKNSRERMKRIEEGIKELGSQILKEHPVENTQLQNEKLYLYYLQNGRDMYVDQELDINRLSDYDVDHIVPQSFLKDDSIDNKVLTRSDKARGKSDNVPSEEVVKKMKNYWRQLLNAKLITQRKFDNLTKAERGGLSELDKAGFIKRQLVETRQITKHVAQILDSRMNTKYDENDKLIREVKVITLKSKLVSDFRKDFQFYKVREINNYHHAHDAYLNAVVGTALIKKYPKLESEFVYGDYKVYDVRKMIAKSEQEIGKATAKYFFYSNIMNFFKTEITLANGEIRKRPLIETNGETGEIVWDKGRDFATVRKVLSMPQVNIVKKTEVQTGGFSKESILPKRNSDKLIARKKDWDPKKYGGFDSPTVAYSVLVVAKVEKGKSKKLKSVKELLGITIMERSSFEKNPIDFLEAKGYKEVKKDLIIKLPKYSLFELENGRKRMLASAGELQKGNELALPSKYVNFLYLASHYEKLKGSPEDNEQKQLFVEQHKHYLDEIIEQISEFSKRVILADANLDKVLSAYNKHRDKPIREQAENIIHLFTLTNLGAPAAFKYFDTTIDRKRYTSTKEVLDATLIHQSITGLYETRIDLSQLGGDGGGSSGGSPAPGGTLQLDDEYRLYSPLVKPDQNIQFWLEQFPQAWAETAGMGLAKQVPPQVIQLKASATPVSVRQYPLSKEAQEGIRPHVQRLIQQGILVPVQSPWNTPLLPVRKPGTNDYRPVQDLREVNKRVQDIHPTVPNPYNLLCALPPQRSWYTVLDLKDAFFCLRLHPTSQPLFAFEWRDPGTGRTGQLTWTRLPQGFKNSPTIFNEALHRDLANFRIQHPQVTLLQYVDDLLLAGATKQDCLEGTKALLLELSDLGYRASAKKAQICRREVTYLGYSLRDGQRWLTEARKKTVVQIPAPTTAKQVREFLGTAGFCRLWIPGFATLAAPLYPLTKPKGEFSWAPEHQKAFDAIKKALLSAPALALPDVTKPFTLYVDERKGVARGVLTQTLGPWRRPVAYLSKKLDPVASGWPVCLKAIAAVAILVKDADKLTLGQNITVIAPHALENIVRQPPDRWMTNARMTHYQSLLLTERVTFAPPAALNPATLLPEETDEPVTHDCHQLLIEETGVRKDLTDIPLTGEVLTWFTDGSSYVVEGKRMAGAAVVDGTRTIWASSLPEGTSAQKAELMALTQALRLAEGKSINIYTDSRYAFATAHVHGAIYKQRGWLTSAGREIKNKEEILSLLEALHLPKRLAIIHCPGHQKAKDPISRGNQMADRVAKQAAQGVNLLAGKRTADGSEFEKRTADGSEFESPKKKAKVE

SEQ ID NO: 402 - protein, 2088 aa, synthetic construct
MPAAKRVKLDGGDKKYSIGLDIGTNSVGWAVITDEYKVPSKKFKVLGNTDRHSIKKNLIGALLFDSGETAEATRLKRTARRRYTRRKNRICYLQEIFSNEMAKVDDSFFHRLEESFLVEEDKKHERHPIFGNIVDEVAYHEKYPTIYHLRKKLVDSTDKADLRLIYLALAHMIKFRGHFLIEGDLNPDNSDVDKLFIQLVQTYNQLFEENPINASGVDAKAILSARLSKSRRLENLIAQLPGEKKNGLFGNLIALSLGLTPNFKSNFDLAEDAKLQLSKDTYDDDLDNLLAQIGDQYADLFLAAKNLSDAILLSDILRVNTEITKAPLSASMIKRYDEHHQDLTLLKALVRQQLPEKYKEIFFDQSKNGYAGYIDGGASQEEFYKFIKPILEKMDGTEELLVKLNREDLLRKQRTFDNGSIPHQIHLGELHAILRRQEDFYPFLKDNREKIEKILTFRIPYYVGPLARGNSRFAWMTRKSEETITPWNFEEVVDKGASAQSFIERMTNFDKNLPNEKVLPKHSLLYEYFTVYNELTKVKYVTEGMRKPAFLSGEQKKAIVDLLFKTNRKVTVKQLKEDYFKKIECFDSVEISGVEDRFNASLGTYHDLLKIIKDKDFLDNEENEDILEDIVLTLTLFEDREMIEERLKTYAHLFDDKVMKQLKRRRYTGWGRLSRKLINGIRDKQSGKTILDFLKSDGFANRNFMQLIHDDSLTFKEDIQKAQVSGQGDSLHEHIANLAGSPAIKKGILQTVKVVDELVKVMGRHKPENIVIEMARENQTTQKGQKNSRERMKRIEEGIKELGSQILKEHPVENTQLQNEKLYLYYLQNGRDMYVDQELDINRLSDYDVDHIVPQSFLKDDSIDNKVLTRSDKARGKSDNVPSEEVVKKMKNYWRQLLNAKLITQRKFDNLTKAERGGLSELDKAGFIKRQLVETRQITKHVAQILDSRMNTKYDENDKLIREVKVITLKSKLVSDFRKDFQFYKVREINNYHHAHDAYLNAVVGTALIKKYPKLESEFVYGDYKVYDVRKMIAKSEQEIGKATAKYFFYSNIMNFFKTEITLANGEIRKRPLIETNGETGEIVWDKGRDFATVRKVLSMPQVNIVKKTEVQTGGFSKESILPKRNSDKLIARKKDWDPKKYGGFDSPTVAYSVLVVAKVEKGKSKKLKSVKELLGITIMERSSFEKNPIDFLEAKGYKEVKKDLIIKLPKYSLFELENGRKRMLASAGELQKGNELALPSKYVNFLYLASHYEKLKGSPEDNEQKQLFVEQHKHYLDEIIEQISEFSKRVILADANLDKVLSAYNKHRDKPIREQAENIIHLFTLTNLGAPAAFKYFDTTIDRKRYTSTKEVLDATLIHQSITGLYETRIDLSQLGGDGGGGGGGSPAPGGTLQLDDEYRLYSPLVKPDQNIQFWLEQFPQAWAETAGMGLAKQVPPQVIQLKASATPVSVRQYPLSKEAQEGIRPHVQRLIQQGILVPVQSPWNTPLLPVRKPGTNDYRPVQDLREVNKRVQDIHPTVPNPYNLLCALPPQRSWYTVLDLKDAFFCLRLHPTSQPLFAFEWRDPGTGRTGQLTWTRLPQGFKNSPTIFNEALHRDLANFRIQHPQVTLLQYVDDLLLAGATKQDCLEGTKALLLELSDLGYRASAKKAQICRREVTYLGYSLRDGQRWLTEARKKTVVQIPAPTTAKQVREFLGTAGFCRLWIPGFATLAAPLYPLTKPKGEFSWAPEHQKAFDAIKKALLSAPALALPDVTKPFTLYVDERKGVARGVLTQTLGPWRRPVAYLSKKLDPVASGWPVCLKAIAAVAILVKDADKLTLGQNITVIAPHALENIVRQPPDRWMTNARMTHYQSLLLTERVTFAPPAALNPATLLPEETDEPVTHDCHQLLIEETGVRKDLTDIPLTGEVLTWFTDGSSYVVEGKRMAGAAVVDGTRTIWASSLPEGTSAQKAELMALTQALRLAEGKSINIYTDSRYAFATAHVHGAIYKQRGWLTSAGREIKNKEEILSLLEALHLPKRLAIIHCPGHQKAKDPISRGNQMADRVAKQAAQGVNLLAGKRTADGSEFEKRTADGSEFESPKKKAKVE

SEQ ID NO: 403 - protein, 2088 aa, synthetic construct
MPAAKRVKLDGGDKKYSIGLDIGTNSVGWAVITDEYKVPSKKFKVLGNTDRHSIKKNLIGALLFDSGETAEATRLKRTARRRYTRRKNRICYLQEIFSNEMAKVDDSFFHRLEESFLVEEDKKHERHPIFGNIVDEVAYHEKYPTIYHLRKKLVDSTDKADLRLIYLALAHMIKFRGHFLIEGDLNPDNSDVDKLFIQLVQTYNQLFEENPINASGVDAKAILSARLSKSRRLENLIAQLPGEKKNGLFGNLIALSLGLTPNFKSNFDLAEDAKLQLSKDTYDDDLDNLLAQIGDQYADLFLAAKNLSDAILLSDILRVNTEITKAPLSASMIKRYDEHHQDLTLLKALVRQQLPEKYKEIFFDQSKNGYAGYIDGGASQEEFYKFIKPILEKMDGTEELLVKLNREDLLRKQRTFDNGSIPHQIHLGELHAILRRQEDFYPFLKDNREKIEKILTFRIPYYVGPLARGNSRFAWMTRKSEETITPWNFEEVVDKGASAQSFIERMTNFDKNLPNEKVLPKHSLLYEYFTVYNELTKVKYVTEGMRKPAFLSGEQKKAIVDLLFKTNRKVTVKQLKEDYFKKIECFDSVEISGVEDRFNASLGTYHDLLKIIKDKDFLDNEENEDILEDIVLTLTLFEDREMIEERLKTYAHLFDDKVMKQLKRRRYTGWGRLSRKLINGIRDKQSGKTILDFLKSDGFANRNFMQLIHDDSLTFKEDIQKAQVSGQGDSLHEHIANLAGSPAIKKGILQTVKVVDELVKVMGRHKPENIVIEMARENQTTQKGQKNSRERMKRIEEGIKELGSQILKEHPVENTQLQNEKLYLYYLQNGRDMYVDQELDINRLSDYDVDHIVPQSFLKDDSIDNKVLTRSDKARGKSDNVPSEEVVKKMKNYWRQLLNAKLITQRKFDNLTKAERGGLSELDKAGFIKRQLVETRQITKHVAQILDSRMNTKYDENDKLIREVKVITLKSKLVSDFRKDFQFYKVREINNYHHAHDAYLNAVVGTALIKKYPKLESEFVYGDYKVYDVRKMIAKSEQEIGKATAKYFFYSNIMNFFKTEITLANGEIRKRPLIETNGETGEIVWDKGRDFATVRKVLSMPQVNIVKKTEVQTGGFSKESILPKRNSDKLIARKKDWDPKKYGGFDSPTVAYSVLVVAKVEKGKSKKLKSVKELLGITIMERSSFEKNPIDFLEAKGYKEVKKDLIIKLPKYSLFELENGRKRMLASAGELQKGNELALPSKYVNFLYLASHYEKLKGSPEDNEQKQLFVEQHKHYLDEIIEQISEFSKRVILADANLDKVLSAYNKHRDKPIREQAENIIHLFTLTNLGAPAAFKYFDTTIDRKRYTSTKEVLDATLIHQSITGLYETRIDLSQLGGDGGGGSGGSGGSGGTLQLDDEYRLYSPLVKPDQNIQFWLEQFPQAWAETAGMGLAKQVPPQVIQLKASATPVSVRQYPLSKEAQEGIRPHVQRLIQQGILVPVQSPWNTPLLPVRKPGTNDYRPVQDLREVNKRVQDIHPTVPNPYNLLCALPPQRSWYTVLDLKDAFFCLRLHPTSQPLFAFEWRDPGTGRTGQLTWTRLPQGFKNSPTIFNEALHRDLANFRIQHPQVTLLQYVDDLLLAGATKQDCLEGTKALLLELSDLGYRASAKKAQICRREVTYLGYSLRDGQRWLTEARKKTVVQIPAPTTAKQVREFLGTAGFCRLWIPGFATLAAPLYPLTKPKGEFSWAPEHQKAFDAIKKALLSAPALALPDVTKPFTLYVDERKGVARGVLTQTLGPWRRPVAYLSKKLDPVASGWPVCLKAIAAVAILVKDADKLTLGQNITVIAPHALENIVRQPPDRWMTNARMTHYQSLLLTERVTFAPPAALNPATLLPEETDEPVTHDCHQLLIEETGVRKDLTDIPLTGEVLTWFTDGSSYVVEGKRMAGAAVVDGTRTIWASSLPEGTSAQKAELMALTQALRLAEGKSINIYTDSRYAFATAHVHGAIYKQRGWLTSAGREIKNKEEILSLLEALHLPKRLAIIHCPGHQKAKDPISRGNQMADRVAKQAAQGVNLLAGKRTADGSEFEKRTADGSEFESPKKKAKVE

SEQ ID NO: 404 - protein, 2094 aa, synthetic construct
MPAAKRVKLDGGDKKYSIGLDIGTNSVGWAVITDEYKVPSKKFKVLGNTDRHSIKKNLIGALLFDSGETAEATRLKRTARRRYTRRKNRICYLQEIFSNEMAKVDDSFFHRLEESFLVEEDKKHERHPIFGNIVDEVAYHEKYPTIYHLRKKLVDSTDKADLRLIYLALAHMIKFRGHFLIEGDLNPDNSDVDKLFIQLVQTYNQLFEENPINASGVDAKAILSARLSKSRRLENLIAQLPGEKKNGLFGNLIALSLGLTPNFKSNFDLAEDAKLQLSKDTYDDDLDNLLAQIGDQYADLFLAAKNLSDAILLSDILRVNTEITKAPLSASMIKRYDEHHQDLTLLKALVRQQLPEKYKEIFFDQSKNGYAGYIDGGASQEEFYKFIKPILEKMDGTEELLVKLNREDLLRKQRTFDNGSIPHQIHLGELHAILRRQEDFYPFLKDNREKIEKILTFRIPYYVGPLARGNSRFAWMTRKSEETITPWNFEEVVDKGASAQSFIERMTNFDKNLPNEKVLPKHSLLYEYFTVYNELTKVKYVTEGMRKPAFLSGEQKKAIVDLLFKTNRKVTVKQLKEDYFKKIECFDSVEISGVEDRFNASLGTYHDLLKIIKDKDFLDNEENEDILEDIVLTLTLFEDREMIEERLKTYAHLFDDKVMKQLKRRRYTGWGRLSRKLINGIRDKQSGKTILDFLKSDGFANRNFMQLIHDDSLTFKEDIQKAQVSGQGDSLHEHIANLAGSPAIKKGILQTVKVVDELVKVMGRHKPENIVIEMARENQTTQKGQKNSRERMKRIEEGIKELGSQILKEHPVENTQLQNEKLYLYYLQNGRDMYVDQELDINRLSDYDVDHIVPQSFLKDDSIDNKVLTRSDKARGKSDNVPSEEVVKKMKNYWRQLLNAKLITQRKFDNLTKAERGGLSELDKAGFIKRQLVETRQITKHVAQILDSRMNTKYDENDKLIREVKVITLKSKLVSDFRKDFQFYKVREINNYHHAHDAYLNAVVGTALIKKYPKLESEFVYGDYKVYDVRKMIAKSEQEIGKATAKYFFYSNIMNFFKTEITLANGEIRKRPLIETNGETGEIVWDKGRDFATVRKVLSMPQVNIVKKTEVQTGGFSKESILPKRNSDKLIARKKDWDPKKYGGFDSPTVAYSVLVVAKVEKGKSKKLKSVKELLGITIMERSSFEKNPIDFLEAKGYKEVKKDLIIKLPKYSLFELENGRKRMLASAGELQKGNELALPSKYVNFLYLASHYEKLKGSPEDNEQKQLFVEQHKHYLDEIIEQISEFSKRVILADANLDKVLSAYNKHRDKPIREQAENIIHLFTLTNLGAPAAFKYFDTTIDRKRYTSTKEVLDATLIHQSITGLYETRIDLSQLGGDGGGGGGSEAAAKGGGGSGGTLQLDDEYRLYSPLVKPDQNIQFWLEQFPQAWAETAGMGLAKQVPPQVIQLKASATPVSVRQYPLSKEAQEGIRPHVQRLIQQGILVPVQSPWNTPLLPVRKPGTNDYRPVQDLREVNKRVQDIHPTVPNPYNLLCALPPQRSWYTVLDLKDAFFCLRLHPTSQPLFAFEWRDPGTGRTGQLTWTRLPQGFKNSPTIFNEALHRDLANFRIQHPQVTLLQYVDDLLLAGATKQDCLEGTKALLLELSDLGYRASAKKAQICRREVTYLGYSLRDGQRWLTEARKKTVVQIPAPTTAKQVREFLGTAGFCRLWIPGFATLAAPLYPLTKPKGEFSWAPEHQKAFDAIKKALLSAPALALPDVTKPFTLYVDERKGVARGVLTQTLGPWRRPVAYLSKKLDPVASGWPVCLKAIAAVAILVKDADKLTLGQNITVIAPHALENIVRQPPDRWMTNARMTHYQSLLLTERVTFAPPAALNPATLLPEETDEPVTHDCHQLLIEETGVRKDLTDIPLTGEVLTWFTDGSSYVVEGKRMAGAAVVDGTRTIWASSLPEGTSAQKAELMALTQALRLAEGKSINIYTDSRYAFATAHVHGAIYKQRGWLTSAGREIKNKEEILSLLEALHLPKRLAIIHCPGHQKAKDPISRGNQMADRVAKQAAQGVNLLAGKRTADGSEFEKRTADGSEFESPKKKAKVE

SEQ ID NO: 405 - protein, 2085 aa, synthetic construct
MPAAKRVKLDGGDKKYSIGLDIGTNSVGWAVITDEYKVPSKKFKVLGNTDRHSIKKNLIGALLFDSGETAEATRLKRTARRRYTRRKNRICYLQEIFSNEMAKVDDSFFHRLEESFLVEEDKKHERHPIFGNIVDEVAYHEKYPTIYHLRKKLVDSTDKADLRLIYLALAHMIKFRGHFLIEGDLNPDNSDVDKLFIQLVQTYNQLFEENPINASGVDAKAILSARLSKSRRLENLIAQLPGEKKNGLFGNLIALSLGLTPNFKSNFDLAEDAKLQLSKDTYDDDLDNLLAQIGDQYADLFLAAKNLSDAILLSDILRVNTEITKAPLSASMIKRYDEHHQDLTLLKALVRQQLPEKYKEIFFDQSKNGYAGYIDGGASQEEFYKFIKPILEKMDGTEELLVKLNREDLLRKQRTFDNGSIPHQIHLGELHAILRRQEDFYPFLKDNREKIEKILTFRIPYYVGPLARGNSRFAWMTRKSEETITPWNFEEVVDKGASAQSFIERMTNFDKNLPNEKVLPKHSLLYEYFTVYNELTKVKYVTEGMRKPAFLSGEQKKAIVDLLFKTNRKVTVKQLKEDYFKKIECFDSVEISGVEDRFNASLGTYHDLLKIIKDKDFLDNEENEDILEDIVLTLTLFEDREMIEERLKTYAHLFDDKVMKQLKRRRYTGWGRLSRKLINGIRDKQSGKTILDFLKSDGFANRNFMQLIHDDSLTFKEDIQKAQVSGQGDSLHEHIANLAGSPAIKKGILQTVKVVDELVKVMGRHKPENIVIEMARENQTTQKGQKNSRERMKRIEEGIKELGSQILKEHPVENTQLQNEKLYLYYLQNGRDMYVDQELDINRLSDYDVDHIVPQSFLKDDSIDNKVLTRSDKARGKSDNVPSEEVVKKMKNYWRQLLNAKLITQRKFDNLTKAERGGLSELDKAGFIKRQLVETRQITKHVAQILDSRMNTKYDENDKLIREVKVITLKSKLVSDFRKDFQFYKVREINNYHHAHDAYLNAVVGTALIKKYPKLESEFVYGDYKVYDVRKMIAKSEQEIGKATAKYFFYSNIMNFFKTEITLANGEIRKRPLIETNGETGEIVWDKGRDFATVRKVLSMPQVNIVKKTEVQTGGFSKESILPKRNSDKLIARKKDWDPKKYGGFDSPTVAYSVLVVAKVEKGKSKKLKSVKELLGITIMERSSFEKNPIDFLEAKGYKEVKKDLIIKLPKYSLFELENGRKRMLASAGELQKGNELALPSKYVNFLYLASHYEKLKGSPEDNEQKQLFVEQHKHYLDEIIEQISEFSKRVILADANLDKVLSAYNKHRDKPIREQAENIIHLFTLTNLGAPAAFKYFDTTIDRKRYTSTKEVLDATLIHQSITGLYETRIDLSQLGGDGGGGGGSSGGTLQLDDEYRLYSPLVKPDQNIQFWLEQFPQAWAETAGMGLAKQVPPQVIQLKASATPVSVRQYPLSKEAQEGIRPHVQRLIQQGILVPVQSPWNTPLLPVRKPGTNDYRPVQDLREVNKRVQDIHPTVPNPYNLLCALPPQRSWYTVLDLKDAFFCLRLHPTSQPLFAFEWRDPGTGRTGQLTWTRLPQGFKNSPTIFNEALHRDLANFRIQHPQVTLLQYVDDLLLAGATKQDCLEGTKALLLELSDLGYRASAKKAQICRREVTYLGYSLRDGQRWLTEARKKTVVQIPAPTTAKQVREFLGTAGFCRLWIPGFATLAAPLYPLTKPKGEFSWAPEHQKAFDAIKKALLSAPALALPDVTKPFTLYVDERKGVARGVLTQTLGPWRRPVAYLSKKLDPVASGWPVCLKAIAAVAILVKDADKLTLGQNITVIAPHALENIVRQPPDRWMTNARMTHYQSLLLTERVTFAPPAALNPATLLPEETDEPVTHDCHQLLIEETGVRKDLTDIPLTGEVLTWFTDGSSYVVEGKRMAGAAVVDGTRTIWASSLPEGTSAQKAELMALTQALRLAEGKSINIYTDSRYAFATAHVHGAIYKQRGWLTSAGREIKNKEEILSLLEALHLPKRLAIIHCPGHQKAKDPISRGNQMADRVAKQAAQGVNLLAGKRTADGSEFEKRTADGSEFESPKKKAKVE

SEQ ID NO: 406 - protein, 2088 aa, synthetic construct
MPAAKRVKLDGGDKKYSIGLDIGTNSVGWAVITDEYKVPSKKFKVLGNTDRHSIKKNLIGALLFDSGETAEATRLKRTARRRYTRRKNRICYLQEIFSNEMAKVDDSFFHRLEESFLVEEDKKHERHPIFGNIVDEVAYHEKYPTIYHLRKKLVDSTDKADLRLIYLALAHMIKFRGHFLIEGDLNPDNSDVDKLFIQLVQTYNQLFEENPINASGVDAKAILSARLSKSRRLENLIAQLPGEKKNGLFGNLIALSLGLTPNFKSNFDLAEDAKLQLSKDTYDDDLDNLLAQIGDQYADLFLAAKNLSDAILLSDILRVNTEITKAPLSASMIKRYDEHHQDLTLLKALVRQQLPEKYKEIFFDQSKNGYAGYIDGGASQEEFYKFIKPILEKMDGTEELLVKLNREDLLRKQRTFDNGSIPHQIHLGELHAILRRQEDFYPFLKDNREKIEKILTFRIPYYVGPLARGNSRFAWMTRKSEETITPWNFEEVVDKGASAQSFIERMTNFDKNLPNEKVLPKHSLLYEYFTVYNELTKVKYVTEGMRKPAFLSGEQKKAIVDLLFKTNRKVTVKQLKEDYFKKIECFDSVEISGVEDRFNASLGTYHDLLKIIKDKDFLDNEENEDILEDIVLTLTLFEDREMIEERLKTYAHLFDDKVMKQLKRRRYTGWGRLSRKLINGIRDKQSGKTILDFLKSDGFANRNFMQLIHDDSLTFKEDIQKAQVSGQGDSLHEHIANLAGSPAIKKGILQTVKVVDELVKVMGRHKPENIVIEMARENQTTQKGQKNSRERMKRIEEGIKELGSQILKEHPVENTQLQNEKLYLYYLQNGRDMYVDQELDINRLSDYDVDHIVPQSFLKDDSIDNKVLTRSDKARGKSDNVPSEEVVKKMKNYWRQLLNAKLITQRKFDNLTKAERGGLSELDKAGFIKRQLVETRQITKHVAQILDSRMNTKYDENDKLIREVKVITLKSKLVSDFRKDFQFYKVREINNYHHAHDAYLNAVVGTALIKKYPKLESEFVYGDYKVYDVRKMIAKSEQEIGKATAKYFFYSNIMNFFKTEITLANGEIRKRPLIETNGETGEIVWDKGRDFATVRKVLSMPQVNIVKKTEVQTGGFSKESILPKRNSDKLIARKKDWDPKKYGGFDSPTVAYSVLVVAKVEKGKSKKLKSVKELLGITIMERSSFEKNPIDFLEAKGYKEVKKDLIIKLPKYSLFELENGRKRMLASAGELQKGNELALPSKYVNFLYLASHYEKLKGSPEDNEQKQLFVEQHKHYLDEIIEQISEFSKRVILADANLDKVLSAYNKHRDKPIREQAENIIHLFTLTNLGAPAAFKYFDTTIDRKRYTSTKEVLDATLIHQSITGLYETRIDLSQLGGDGGGSSGGSGGGGGTLQLDDEYRLYSPLVKPDQNIQFWLEQFPQAWAETAGMGLAKQVPPQVIQLKASATPVSVRQYPLSKEAQEGIRPHVQRLIQQGILVPVQSPWNTPLLPVRKPGTNDYRPVQDLREVNKRVQDIHPTVPNPYNLLCALPPQRSWYTVLDLKDAFFCLRLHPTSQPLFAFEWRDPGTGRTGQLTWTRLPQGFKNSPTIFNEALHRDLANFRIQHPQVTLLQYVDDLLLAGATKQDCLEGTKALLLELSDLGYRASAKKAQICRREVTYLGYSLRDGQRWLTEARKKTVVQIPAPTTAKQVREFLGTAGFCRLWIPGFATLAAPLYPLTKPKGEFSWAPEHQKAFDAIKKALLSAPALALPDVTKPFTLYVDERKGVARGVLTQTLGPWRRPVAYLSKKLDPVASGWPVCLKAIAAVAILVKDADKLTLGQNITVIAPHALENIVRQPPDRWMTNARMTHYQSLLLTERVTFAPPAALNPATLLPEETDEPVTHDCHQLLIEETGVRKDLTDIPLTGEVLTWFTDGSSYVVEGKRMAGAAVVDGTRTIWASSLPEGTSAQKAELMALTQALRLAEGKSINIYTDSRYAFATAHVHGAIYKQRGWLTSAGREIKNKEEILSLLEALHLPKRLAIIHCPGHQKAKDPISRGNQMADRVAKQAAQGVNLLAGKRTADGSEFEKRTADGSEFESPKKKAKVE

SEQ ID NO: 407 - protein, 2211 aa, synthetic construct
MPAAKRVKLDGGDKKYSIGLDIGTNSVGWAVITDEYKVPSKKFKVLGNTDRHSIKKNLIGALLFDSGETAEATRLKRTARRRYTRRKNRICYLQEIFSNEMAKVDDSFFHRLEESFLVEEDKKHERHPIFGNIVDEVAYHEKYPTIYHLRKKLVDSTDKADLRLIYLALAHMIKFRGHFLIEGDLNPDNSDVDKLFIQLVQTYNQLFEENPINASGVDAKAILSARLSKSRRLENLIAQLPGEKKNGLFGNLIALSLGLTPNFKSNFDLAEDAKLQLSKDTYDDDLDNLLAQIGDQYADLFLAAKNLSDAILLSDILRVNTEITKAPLSASMIKRYDEHHQDLTLLKALVRQQLPEKYKEIFFDQSKNGYAGYIDGGASQEEFYKFIKPILEKMDGTEELLVKLNREDLLRKQRTFDNGSIPHQIHLGELHAILRRQEDFYPFLKDNREKIEKILTFRIPYYVGPLARGNSRFAWMTRKSEETITPWNFEEVVDKGASAQSFIERMTNFDKNLPNEKVLPKHSLLYEYFTVYNELTKVKYVTEGMRKPAFLSGEQKKAIVDLLFKTNRKVTVKQLKEDYFKKIECFDSVEISGVEDRFNASLGTYHDLLKIIKDKDFLDNEENEDILEDIVLTLTLFEDREMIEERLKTYAHLFDDKVMKQLKRRRYTGWGRLSRKLINGIRDKQSGKTILDFLKSDGFANRNFMQLIHDDSLTFKEDIQKAQVSGQGDSLHEHIANLAGSPAIKKGILQTVKVVDELVKVMGRHKPENIVIEMARENQTTQKGQKNSRERMKRIEEGIKELGSQILKEHPVENTQLQNEKLYLYYLQNGRDMYVDQELDINRLSDYDVDHIVPQSFLKDDSIDNKVLTRSDKARGKSDNVPSEEVVKKMKNYWRQLLNAKLITQRKFDNLTKAERGGLSELDKAGFIKRQLVETRQITKHVAQILDSRMNTKYDENDKLIREVKVITLKSKLVSDFRKDFQFYKVREINNYHHAHDAYLNAVVGTALIKKYPKLESEFVYGDYKVYDVRKMIAKSEQEIGKATAKYFFYSNIMNFFKTEITLANGEIRKRPLIETNGETGEIVWDKGRDFATVRKVLSMPQVNIVKKTEVQTGGFSKESILPKRNSDKLIARKKDWDPKKYGGFDSPTVAYSVLVVAKVEKGKSKKLKSVKELLGITIMERSSFEKNPIDFLEAKGYKEVKKDLIIKLPKYSLFELENGRKRMLASAGELQKGNELALPSKYVNFLYLASHYEKLKGSPEDNEQKQLFVEQHKHYLDEIIEQISEFSKRVILADANLDKVLSAYNKHRDKPIREQAENIIHLFTLTNLGAPAAFKYFDTTIDRKRYTSTKEVLDATLIHQSITGLYETRIDLSQLGGDGGAEAAAKEAAAKEAAAKEAAAKALEAEAAAKEAAAKEAAAKEAAAKAGGMDPLQLLQPLEAEIKGTKLKAHWNSGATITCVPEAFLEDERPIQTMLIKTIHGEKQQDVYYLTFKVQGRKVEAEVLASPYDYILLNPSDVPWLMKKPLQLTVLVPLHEYQERLLQQTALPKEQKELLQKLFLKYDALWQHWENQVGHRRIKPHNIATGTLAPRPQKQYPINPKAKPSIQIVIDDLLKQGVLIQQNSTMNTPVYPVPKPDGKWRMVLDYREVNKTIPLIAAQNQHSAGILSSIYRGKYKTTLDLTNGFWAHPITPESYWLTAFTWQGKQYCWTRLPQGFLNSPALFTADVVDLLKEIPNVQAYVDDIYISHDDPQEHLEQLEKIFSILLNAGYVVSLKKSEIAQREVEFLGFNITKEGRGLTDTFKQKLLNITPPKDLKQLQSILGLLNFARNFIPNYSELVKPLYTIVANANGKFISWTEDNSNQLQHIISVLNQADNLEERNPETRLIIKVNSSPSAGYIRYYNEGSKRPIMYVNYIFSKAEAKFTQTEKLLTTMHKGLIKAMDLAMGQEILVYSPIVSMTKIQRTPLPERKALPVRWITWMTYLEDPRIQFHYDKSLPELQQIPNVTEDVIAKTKHPSEFAMVFYTDGSAIKHPDVNKSHSAGMGIAQVQFIPEYKIVHQWSIPLGDHTAQLAEIAAVEFACKKALKISGPVLIVTDSFYVAESANKELPYWKSNGFLNNKKKPLRHVSKWKSIAECLQLKPDIIIMHEKGHQQPMTTLHTEGNNLADKLATQGSYVVHAGKRTADGSEFEKRTADGSEFESPKKKAKVE

SEQ ID NO: 408 - protein, 2198 aa, synthetic construct
MPAAKRVKLDGGDKKYSIGLDIGTNSVGWAVITDEYKVPSKKFKVLGNTDRHSIKKNLIGALLFDSGETAEATRLKRTARRRYTRRKNRICYLQEIFSNEMAKVDDSFFHRLEESFLVEEDKKHERHPIFGNIVDEVAYHEKYPTIYHLRKKLVDSTDKADLRLIYLALAHMIKFRGHFLIEGDLNPDNSDVDKLFIQLVQTYNQLFEENPINASGVDAKAILSARLSKSRRLENLIAQLPGEKKNGLFGNLIALSLGLTPNFKSNFDLAEDAKLQLSKDTYDDDLDNLLAQIGDQYADLFLAAKNLSDAILLSDILRVNTEITKAPLSASMIKRYDEHHQDLTLLKALVRQQLPEKYKEIFFDQSKNGYAGYIDGGASQEEFYKFIKPILEKMDGTEELLVKLNREDLLRKQRTFDNGSIPHQIHLGELHAILRRQEDFYPFLKDNREKIEKILTFRIPYYVGPLARGNSRFAWMTRKSEETITPWNFEEVVDKGASAQSFIERMTNFDKNLPNEKVLPKHSLLYEYFTVYNELTKVKYVTEGMRKPAFLSGEQKKAIVDLLFKTNRKVTVKQLKEDYFKKIECFDSVEISGVEDRFNASLGTYHDLLKIIKDKDFLDNEENEDILEDIVLTLTLFEDREMIEERLKTYAHLFDDKVMKQLKRRRYTGWGRLSRKLINGIRDKQSGKTILDFLKSDGFANRNFMQLIHDDSLTFKEDIQKAQVSGQGDSLHEHIANLAGSPAIKKGILQTVKVVDELVKVMGRHKPENIVIEMARENQTTQKGQKNSRERMKRIEEGIKELGSQILKEHPVENTQLQNEKLYLYYLQNGRDMYVDQELDINRLSDYDVDHIVPQSFLKDDSIDNKVLTRSDKARGKSDNVPSEEVVKKMKNYWRQLLNAKLITQRKFDNLTKAERGGLSELDKAGFIKRQLVETRQITKHVAQILDSRMNTKYDENDKLIREVKVITLKSKLVSDFRKDFQFYKVREINNYHHAHDAYLNAVVGTALIKKYPKLESEFVYGDYKVYDVRKMIAKSEQEIGKATAKYFFYSNIMNFFKTEITLANGEIRKRPLIETNGETGEIVWDKGRDFATVRKVLSMPQVNIVKKTEVQTGGFSKESILPKRNSDKLIARKKDWDPKKYGGFDSPTVAYSVLVVAKVEKGKSKKLKSVKELLGITIMERSSFEKNPIDFLEAKGYKEVKKDLIIKLPKYSLFELENGRKRMLASAGELQKGNELALPSKYVNFLYLASHYEKLKGSPEDNEQKQLFVEQHKHYLDEIIEQISEFSKRVILADANLDKVLSAYNKHRDKPIREQAENIIHLFTLTNLGAPAAFKYFDTTIDRKRYTSTKEVLDATLIHQSITGLYETRIDLSQLGGDGGSGGSSGGSSGSETPGTSESATPESSGGSSGGSSGGMDPLQLLQPLEAEIKGTKLKAHWNSGATITCVPEAFLEDERPIQTMLIKTIHGEKQQDVYYLTFKVQGRKVEAEVLASPYDYILLNPSDVPWLMKKPLQLTVLVPLHEYQERLLQQTALPKEQKELLQKLFLKYDALWQHWENQVGHRRIKPHNIATGTLAPRPQKQYPINPKAKPSIQIVIDDLLKQGVLIQQNSTMNTPVYPVPKPDGKWRMVLDYREVNKTIPLIAAQNQHSAGILSSIYRGKYKTTLDLTNGFWAHPITPESYWLTAFTWQGKQYCWTRLPQGFLNSPALFTADVVDLLKEIPNVQAYVDDIYISHDDPQEHLEQLEKIFSILLNAGYVVSLKKSEIAQREVEFLGFNITKEGRGLTDTFKQKLLNITPPKDLKQLQSILGLLNFARNFIPNYSELVKPLYTIVANANGKFISWTEDNSNQLQHIISVLNQADNLEERNPETRLIIKVNSSPSAGYIRYYNEGSKRPIMYVNYIFSKAEAKFTQTEKLLTTMHKGLIKAMDLAMGQEILVYSPIVSMTKIQRTPLPERKALPVRWITWMTYLEDPRIQFHYDKSLPELQQIPNVTEDVIAKTKHPSEFAMVFYTDGSAIKHPDVNKSHSAGMGIAQVQFIPEYKIVHQWSIPLGDHTAQLAEIAAVEFACKKALKISGPVLIVTDSFYVAESANKELPYWKSNGFLNNKKKPLRHVSKWKSIAECLQLKPDIIIMHEKGHQQPMTTLHTEGNNLADKLATQGSYVVHAGKRTADGSEFEKRTADGSEFESPKKKAKVE

SEQ ID NO: 409 - protein, 2176 aa, synthetic construct
MPAAKRVKLDGGDKKYSIGLDIGTNSVGWAVITDEYKVPSKKFKVLGNTDRHSIKKNLIGALLFDSGETAEATRLKRTARRRYTRRKNRICYLQEIFSNEMAKVDDSFFHRLEESFLVEEDKKHERHPIFGNIVDEVAYHEKYPTIYHLRKKLVDSTDKADLRLIYLALAHMIKFRGHFLIEGDLNPDNSDVDKLFIQLVQTYNQLFEENPINASGVDAKAILSARLSKSRRLENLIAQLPGEKKNGLFGNLIALSLGLTPNFKSNFDLAEDAKLQLSKDTYDDDLDNLLAQIGDQYADLFLAAKNLSDAILLSDILRVNTEITKAPLSASMIKRYDEHHQDLTLLKALVRQQLPEKYKEIFFDQSKNGYAGYIDGGASQEEFYKFIKPILEKMDGTEELLVKLNREDLLRKQRTFDNGSIPHQIHLGELHAILRRQEDFYPFLKDNREKIEKILTFRIPYYVGPLARGNSRFAWMTRKSEETITPWNFEEVVDKGASAQSFIERMTNFDKNLPNEKVLPKHSLLYEYFTVYNELTKVKYVTEGMRKPAFLSGEQKKAIVDLLFKTNRKVTVKQLKEDYFKKIECFDSVEISGVEDRFNASLGTYHDLLKIIKDKDFLDNEENEDILEDIVLTLTLFEDREMIEERLKTYAHLFDDKVMKQLKRRRYTGWGRLSRKLINGIRDKQSGKTILDFLKSDGFANRNFMQLIHDDSLTFKEDIQKAQVSGQGDSLHEHIANLAGSPAIKKGILQTVKVVDELVKVMGRHKPENIVIEMARENQTTQKGQKNSRERMKRIEEGIKELGSQILKEHPVENTQLQNEKLYLYYLQNGRDMYVDQELDINRLSDYDVDHIVPQSFLKDDSIDNKVLTRSDKARGKSDNVPSEEVVKKMKNYWRQLLNAKLITQRKFDNLTKAERGGLSELDKAGFIKRQLVETRQITKHVAQILDSRMNTKYDENDKLIREVKVITLKSKLVSDFRKDFQFYKVREINNYHHAHDAYLNAVVGTALIKKYPKLESEFVYGDYKVYDVRKMIAKSEQEIGKATAKYFFYSNIMNFFKTEITLANGEIRKRPLIETNGETGEIVWDKGRDFATVRKVLSMPQVNIVKKTEVQTGGFSKESILPKRNSDKLIARKKDWDPKKYGGFDSPTVAYSVLVVAKVEKGKSKKLKSVKELLGITIMERSSFEKNPIDFLEAKGYKEVKKDLIIKLPKYSLFELENGRKRMLASAGELQKGNELALPSKYVNFLYLASHYEKLKGSPEDNEQKQLFVEQHKHYLDEIIEQISEFSKRVILADANLDKVLSAYNKHRDKPIREQAENIIHLFTLTNLGAPAAFKYFDTTIDRKRYTSTKEVLDATLIHQSITGLYETRIDLSQLGGDGGGSSEAAAKPAPGGMDPLQLLQPLEAEIKGTKLKAHWNSGATITCVPEAFLEDERPIQTMLIKTIHGEKQQDVYYLTFKVQGRKVEAEVLASPYDYILLNPSDVPWLMKKPLQLTVLVPLHEYQERLLQQTALPKEQKELLQKLFLKYDALWQHWENQVGHRRIKPHNIATGTLAPRPQKQYPINPKAKPSIQIVIDDLLKQGVLIQQNSTMNTPVYPVPKPDGKWRMVLDYREVNKTIPLIAAQNQHSAGILSSIYRGKYKTTLDLTNGFWAHPITPESYWLTAFTWQGKQYCWTRLPQGFLNSPALFTADVVDLLKEIPNVQAYVDDIYISHDDPQEHLEQLEKIFSILLNAGYVVSLKKSEIAQREVEFLGFNITKEGRGLTDTFKQKLLNITPPKDLKQLQSILGLLNFARNFIPNYSELVKPLYTIVANANGKFISWTEDNSNQLQHIISVLNQADNLEERNPETRLIIKVNSSPSAGYIRYYNEGSKRPIMYVNYIFSKAEAKFTQTEKLLTTMHKGLIKAMDLAMGQEILVYSPIVSMTKIQRTPLPERKALPVRWITWMTYLEDPRIQFHYDKSLPELQQIPNVTEDVIAKTKHPSEFAMVFYTDGSAIKHPDVNKSHSAGMGIAQVQFIPEYKIVHQWSIPLGDHTAQLAEIAAVEFACKKALKISGPVLIVTDSFYVAESANKELPYWKSNGFLNNKKKPLRHVSKWKSIAECLQLKPDIIIMHEKGHQQPMTTLHTEGNNLADKLATQGSYVVHAGKRTADGSEFEKRTADGSEFESPKKKAKVE

SEQ ID NO: 410 - protein, 2181 aa, synthetic construct
MPAAKRVKLDGGDKKYSIGLDIGTNSVGWAVITDEYKVPSKKFKVLGNTDRHSIKKNLIGALLFDSGETAEATRLKRTARRRYTRRKNRICYLQEIFSNEMAKVDDSFFHRLEESFLVEEDKKHERHPIFGNIVDEVAYHEKYPTIYHLRKKLVDSTDKADLRLIYLALAHMIKFRGHFLIEGDLNPDNSDVDKLFIQLVQTYNQLFEENPINASGVDAKAILSARLSKSRRLENLIAQLPGEKKNGLFGNLIALSLGLTPNFKSNFDLAEDAKLQLSKDTYDDDLDNLLAQIGDQYADLFLAAKNLSDAILLSDILRVNTEITKAPLSASMIKRYDEHHQDLTLLKALVRQQLPEKYKEIFFDQSKNGYAGYIDGGASQEEFYKFIKPILEKMDGTEELLVKLNREDLLRKQRTFDNGSIPHQIHLGELHAILRRQEDFYPFLKDNREKIEKILTFRIPYYVGPLARGNSRFAWMTRKSEETITPWNFEEVVDKGASAQSFIERMTNFDKNLPNEKVLPKHSLLYEYFTVYNELTKVKYVTEGMRKPAFLSGEQKKAIVDLLFKTNRKVTVKQLKEDYFKKIECFDSVEISGVEDRFNASLGTYHDLLKIIKDKDFLDNEENEDILEDIVLTLTLFEDREMIEERLKTYAHLFDDKVMKQLKRRRYTGWGRLSRKLINGIRDKQSGKTILDFLKSDGFANRNFMQLIHDDSLTFKEDIQKAQVSGQGDSLHEHIANLAGSPAIKKGILQTVKVVDELVKVMGRHKPENIVIEMARENQTTQKGQKNSRERMKRIEEGIKELGSQILKEHPVENTQLQNEKLYLYYLQNGRDMYVDQELDINRLSDYDVDHIVPQSFLKDDSIDNKVLTRSDKARGKSDNVPSEEVVKKMKNYWRQLLNAKLITQRKFDNLTKAERGGLSELDKAGFIKRQLVETRQITKHVAQILDSRMNTKYDENDKLIREVKVITLKSKLVSDFRKDFQFYKVREINNYHHAHDAYLNAVVGTALIKKYPKLESEFVYGDYKVYDVRKMIAKSEQEIGKATAKYFFYSNIMNFFKTEITLANGEIRKRPLIETNGETGEIVWDKGRDFATVRKVLSMPQVNIVKKTEVQTGGFSKESILPKRNSDKLIARKKDWDPKKYGGFDSPTVAYSVLVVAKVEKGKSKKLKSVKELLGITIMERSSFEKNPIDFLEAKGYKEVKKDLIIKLPKYSLFELENGRKRMLASAGELQKGNELALPSKYVNFLYLASHYEKLKGSPEDNEQKQLFVEQHKHYLDEIIEQISEFSKRVILADANLDKVLSAYNKHRDKPIREQAENIIHLFTLTNLGAPAAFKYFDTTIDRKRYTSTKEVLDATLIHQSITGLYETRIDLSQLGGDGGSGSETPGTSESATPESGGMDPLQLLQPLEAEIKGTKLKAHWNSGATITCVPEAFLEDERPIQTMLIKTIHGEKQQDVYYLTFKVQGRKVEAEVLASPYDYILLNPSDVPWLMKKPLQLTVLVPLHEYQERLLQQTALPKEQKELLQKLFLKYDALWQHWENQVGHRRIKPHNIATGTLAPRPQKQYPINPKAKPSIQIVIDDLLKQGVLIQQNSTMNTPVYPVPKPDGKWRMVLDYREVNKTIPLIAAQNQHSAGILSSIYRGKYKTTLDLTNGFWAHPITPESYWLTAFTWQGKQYCWTRLPQGFLNSPALFTADVVDLLKEIPNVQAYVDDIYISHDDPQEHLEQLEKIFSILLNAGYVVSLKKSEIAQREVEFLGFNITKEGRGLTDTFKQKLLNITPPKDLKQLQSILGLLNFARNFIPNYSELVKPLYTIVANANGKFISWTEDNSNQLQHIISVLNQADNLEERNPETRLIIKVNSSPSAGYIRYYNEGSKRPIMYVNYIFSKAEAKFTQTEKLLTTMHKGLIKAMDLAMGQEILVYSPIVSMTKIQRTPLPERKALPVRWITWMTYLEDPRIQFHYDKSLPELQQIPNVTEDVIAKTKHPSEFAMVFYTDGSAIKHPDVNKSHSAGMGIAQVQFIPEYKIVHQWSIPLGDHTAQLAEIAAVEFACKKALKISGPVLIVTDSFYVAESANKELPYWKSNGFLNNKKKPLRHVSKWKSIAECLQLKPDIIIMHEKGHQQPMTTLHTEGNNLADKLATQGSYVVHAGKRTADGSEFEKRTADGSEFESPKKKAKVE

SEQ ID NO: 411 - protein, 2178 aa, synthetic construct
MPAAKRVKLDGGDKKYSIGLDIGTNSVGWAVITDEYKVPSKKFKVLGNTDRHSIKKNLIGALLFDSGETAEATRLKRTARRRYTRRKNRICYLQEIFSNEMAKVDDSFFHRLEESFLVEEDKKHERHPIFGNIVDEVAYHEKYPTIYHLRKKLVDSTDKADLRLIYLALAHMIKFRGHFLIEGDLNPDNSDVDKLFIQLVQTYNQLFEENPINASGVDAKAILSARLSKSRRLENLIAQLPGEKKNGLFGNLIALSLGLTPNFKSNFDLAEDAKLQLSKDTYDDDLDNLLAQIGDQYADLFLAAKNLSDAILLSDILRVNTEITKAPLSASMIKRYDEHHQDLTLLKALVRQQLPEKYKEIFFDQSKNGYAGYIDGGASQEEFYKFIKPILEKMDGTEELLVKLNREDLLRKQRTFDNGSIPHQIHLGELHAILRRQEDFYPFLKDNREKIEKILTFRIPYYVGPLARGNSRFAWMTRKSEETITPWNFEEVVDKGASAQSFIERMTNFDKNLPNEKVLPKHSLLYEYFTVYNELTKVKYVTEGMRKPAFLSGEQKKAIVDLLFKTNRKVTVKQLKEDYFKKIECFDSVEISGVEDRFNASLGTYHDLLKIIKDKDFLDNEENEDILEDIVLTLTLFEDREMIEERLKTYAHLFDDKVMKQLKRRRYTGWGRLSRKLINGIRDKQSGKTILDFLKSDGFANRNFMQLIHDDSLTFKEDIQKAQVSGQGDSLHEHIANLAGSPAIKKGILQTVKVVDELVKVMGRHKPENIVIEMARENQTTQKGQKNSRERMKRIEEGIKELGSQILKEHPVENTQLQNEKLYLYYLQNGRDMYVDQELDINRLSDYDVDHIVPQSFLKDDSIDNKVLTRSDKARGKSDNVPSEEVVKKMKNYWRQLLNAKLITQRKFDNLTKAERGGLSELDKAGFIKRQLVETRQITKHVAQILDSRMNTKYDENDKLIREVKVITLKSKLVSDFRKDFQFYKVREINNYHHAHDAYLNAVVGTALIKKYPKLESEFVYGDYKVYDVRKMIAKSEQEIGKATAKYFFYSNIMNFFKTEITLANGEIRKRPLIETNGETGEIVWDKGRDFATVRKVLSMPQVNIVKKTEVQTGGFSKESILPKRNSDKLIARKKDWDPKKYGGFDSPTVAYSVLVVAKVEKGKSKKLKSVKELLGITIMERSSFEKNPIDFLEAKGYKEVKKDLIIKLPKYSLFELENGRKRMLASAGELQKGNELALPSKYVNFLYLASHYEKLKGSPEDNEQKQLFVEQHKHYLDEIIEQISEFSKRVILADANLDKVLSAYNKHRDKPIREQAENIIHLFTLTNLGAPAAFKYFDTTIDRKRYTSTKEVLDATLIHQSITGLYETRIDLSQLGGDGGPAPAPAPAPAPAPGGMDPLQLLQPLEAEIKGTKLKAHWNSGATITCVPEAFLEDERPIQTMLIKTIHGEKQQDVYYLTFKVQGRKVEAEVLASPYDYILLNPSDVPWLMKKPLQLTVLVPLHEYQERLLQQTALPKEQKELLQKLFLKYDALWQHWENQVGHRRIKPHNIATGTLAPRPQKQYPINPKAKPSIQIVIDDLLKQGVLIQQNSTMNTPVYPVPKPDGKWRMVLDYREVNKTIPLIAAQNQHSAGILSSIYRGKYKTTLDLTNGFWAHPITPESYWLTAFTWQGKQYCWTRLPQGFLNSPALFTADVVDLLKEIPNVQAYVDDIYISHDDPQEHLEQLEKIFSILLNAGYVVSLKKSEIAQREVEFLGFNITKEGRGLTDTFKQKLLNITPPKDLKQLQSILGLLNFARNFIPNYSELVKPLYTIVANANGKFISWTEDNSNQLQHIISVLNQADNLEERNPETRLIIKVNSSPSAGYIRYYNEGSKRPIMYVNYIFSKAEAKFTQTEKLLTTMHKGLIKAMDLAMGQEILVYSPIVSMTKIQRTPLPERKALPVRWITWMTYLEDPRIQFHYDKSLPELQQIPNVTEDVIAKTKHPSEFAMVFYTDGSAIKHPDVNKSHSAGMGIAQVQFIPEYKIVHQWSIPLGDHTAQLAEIAAVEFACKKALKISGPVLIVTDSFYVAESANKELPYWKSNGFLNNKKKPLRHVSKWKSIAECLQLKPDIIIMHEKGHQQPMTTLHTEGNNLADKLATQGSYVVHAGKRTADGSEFEKRTADGSEFESPKKKAKVE

SEQ ID NO: 412 - protein, 2176 aa, synthetic construct
MPAAKRVKLDGGDKKYSIGLDIGTNSVGWAVITDEYKVPSKKFKVLGNTDRHSIKKNLIGALLFDSGETAEATRLKRTARRRYTRRKNRICYLQEIFSNEMAKVDDSFFHRLEESFLVEEDKKHERHPIFGNIVDEVAYHEKYPTIYHLRKKLVDSTDKADLRLIYLALAHMIKFRGHFLIEGDLNPDNSDVDKLFIQLVQTYNQLFEENPINASGVDAKAILSARLSKSRRLENLIAQLPGEKKNGLFGNLIALSLGLTPNFKSNFDLAEDAKLQLSKDTYDDDLDNLLAQIGDQYADLFLAAKNLSDAILLSDILRVNTEITKAPLSASMIKRYDEHHQDLTLLKALVRQQLPEKYKEIFFDQSKNGYAGYIDGGASQEEFYKFIKPILEKMDGTEELLVKLNREDLLRKQRTFDNGSIPHQIHLGELHAILRRQEDFYPFLKDNREKIEKILTFRIPYYVGPLARGNSRFAWMTRKSEETITPWNFEEVVDKGASAQSFIERMTNFDKNLPNEKVLPKHSLLYEYFTVYNELTKVKYVTEGMRKPAFLSGEQKKAIVDLLFKTNRKVTVKQLKEDYFKKIECFDSVEISGVEDRFNASLGTYHDLLKIIKDKDFLDNEENEDILEDIVLTLTLFEDREMIEERLKTYAHLFDDKVMKQLKRRRYTGWGRLSRKLINGIRDKQSGKTILDFLKSDGFANRNFMQLIHDDSLTFKEDIQKAQVSGQGDSLHEHIANLAGSPAIKKGILQTVKVVDELVKVMGRHKPENIVIEMARENQTTQKGQKNSRERMKRIEEGIKELGSQILKEHPVENTQLQNEKLYLYYLQNGRDMYVDQELDINRLSDYDVDHIVPQSFLKDDSIDNKVLTRSDKARGKSDNVPSEEVVKKMKNYWRQLLNAKLITQRKFDNLTKAERGGLSELDKAGFIKRQLVETRQITKHVAQILDSRMNTKYDENDKLIREVKVITLKSKLVSDFRKDFQFYKVREINNYHHAHDAYLNAVVGTALIKKYPKLESEFVYGDYKVYDVRKMIAKSEQEIGKATAKYFFYSNIMNFFKTEITLANGEIRKRPLIETNGETGEIVWDKGRDFATVRKVLSMPQVNIVKKTEVQTGGFSKESILPKRNSDKLIARKKDWDPKKYGGFDSPTVAYSVLVVAKVEKGKSKKLKSVKELLGITIMERSSFEKNPIDFLEAKGYKEVKKDLIIKLPKYSLFELENGRKRMLASAGELQKGNELALPSKYVNFLYLASHYEKLKGSPEDNEQKQLFVEQHKHYLDEIIEQISEFSKRVILADANLDKVLSAYNKHRDKPIREQAENIIHLFTLTNLGAPAAFKYFDTTIDRKRYTSTKEVLDATLIHQSITGLYETRIDLSQLGGDGGPAPEAAAKGSSGGMDPLQLLQPLEAEIKGTKLKAHWNSGATITCVPEAFLEDERPIQTMLIKTIHGEKQQDVYYLTFKVQGRKVEAEVLASPYDYILLNPSDVPWLMKKPLQLTVLVPLHEYQERLLQQTALPKEQKELLQKLFLKYDALWQHWENQVGHRRIKPHNIATGTLAPRPQKQYPINPKAKPSIQIVIDDLLKQGVLIQQNSTMNTPVYPVPKPDGKWRMVLDYREVNKTIPLIAAQNQHSAGILSSIYRGKYKTTLDLTNGFWAHPITPESYWLTAFTWQGKQYCWTRLPQGFLNSPALFTADVVDLLKEIPNVQAYVDDIYISHDDPQEHLEQLEKIFSILLNAGYVVSLKKSEIAQREVEFLGFNITKEGRGLTDTFKQKLLNITPPKDLKQLQSILGLLNFARNFIPNYSELVKPLYTIVANANGKFISWTEDNSNQLQHIISVLNQADNLEERNPETRLIIKVNSSPSAGYIRYYNEGSKRPIMYVNYIFSKAEAKFTQTEKLLTTMHKGLIKAMDLAMGQEILVYSPIVSMTKIQRTPLPERKALPVRWITWMTYLEDPRIQFHYDKSLPELQQIPNVTEDVIAKTKHPSEFAMVFYTDGSAIKHPDVNKSHSAGMGIAQVQFIPEYKIVHQWSIPLGDHTAQLAEIAAVEFACKKALKISGPVLIVTDSFYVAESANKELPYWKSNGFLNNKKKPLRHVSKWKSIAECLQLKPDIIIMHEKGHQQPMTTLHTEGNNLADKLATQGSYVVHAGKRTADGSEFEKRTADGSEFESPKKKAKVE

SEQ ID NO: 413 - protein, 2180 aa, synthetic construct
MPAAKRVKLDGGDKKYSIGLDIGTNSVGWAVITDEYKVPSKKFKVLGNTDRHSIKKNLIGALLFDSGETAEATRLKRTARRRYTRRKNRICYLQEIFSNEMAKVDDSFFHRLEESFLVEEDKKHERHPIFGNIVDEVAYHEKYPTIYHLRKKLVDSTDKADLRLIYLALAHMIKFRGHFLIEGDLNPDNSDVDKLFIQLVQTYNQLFEENPINASGVDAKAILSARLSKSRRLENLIAQLPGEKKNGLFGNLIALSLGLTPNFKSNFDLAEDAKLQLSKDTYDDDLDNLLAQIGDQYADLFLAAKNLSDAILLSDILRVNTEITKAPLSASMIKRYDEHHQDLTLLKALVRQQLPEKYKEIFFDQSKNGYAGYIDGGASQEEFYKFIKPILEKMDGTEELLVKLNREDLLRKQRTFDNGSIPHQIHLGELHAILRRQEDFYPFLKDNREKIEKILTFRIPYYVGPLARGNSRFAWMTRKSEETITPWNFEEVVDKGASAQSFIERMTNFDKNLPNEKVLPKHSLLYEYFTVYNELTKVKYVTEGMRKPAFLSGEQKKAIVDLLFKTNRKVTVKQLKEDYFKKIECFDSVEISGVEDRFNASLGTYHDLLKIIKDKDFLDNEENEDILEDIVLTLTLFEDREMIEERLKTYAHLFDDKVMKQLKRRRYTGWGRLSRKLINGIRDKQSGKTILDFLKSDGFANRNFMQLIHDDSLTFKEDIQKAQVSGQGDSLHEHIANLAGSPAIKKGILQTVKVVDELVKVMGRHKPENIVIEMARENQTTQKGQKNSRERMKRIEEGIKELGSQILKEHPVENTQLQNEKLYLYYLQNGRDMYVDQELDINRLSDYDVDHIVPQSFLKDDSIDNKVLTRSDKARGKSDNVPSEEVVKKMKNYWRQLLNAKLITQRKFDNLTKAERGGLSELDKAGFIKRQLVETRQITKHVAQILDSRMNTKYDENDKLIREVKVITLKSKLVSDFRKDFQFYKVREINNYHHAHDAYLNAVVGTALIKKYPKLESEFVYGDYKVYDVRKMIAKSEQEIGKATAKYFFYSNIMNFFKTEITLANGEIRKRPLIETNGETGEIVWDKGRDFATVRKVLSMPQVNIVKKTEVQTGGFSKESILPKRNSDKLIARKKDWDPKKYGGFDSPTVAYSVLVVAKVEKGKSKKLKSVKELLGITIMERSSFEKNPIDFLEAKGYKEVKKDLIIKLPKYSLFELENGRKRMLASAGELQKGNELALPSKYVNFLYLASHYEKLKGSPEDNEQKQLFVEQHKHYLDEIIEQISEFSKRVILADANLDKVLSAYNKHRDKPIREQAENIIHLFTLTNLGAPAAFKYFDTTIDRKRYTSTKEVLDATLIHQSITGLYETRIDLSQLGGDGGEAAAKEAAAKEAAAKGGMDPLQLLQPLEAEIKGTKLKAHWNSGATITCVPEAFLEDERPIQTMLIKTIHGEKQQDVYYLTFKVQGRKVEAEVLASPYDYILLNPSDVPWLMKKPLQLTVLVPLHEYQERLLQQTALPKEQKELLQKLFLKYDALWQHWENQVGHRRIKPHNIATGTLAPRPQKQYPINPKAKPSIQIVIDDLLKQGVLIQQNSTMNTPVYPVPKPDGKWRMVLDYREVNKTIPLIAAQNQHSAGILSSIYRGKYKTTLDLTNGFWAHPITPESYWLTAFTWQGKQYCWTRLPQGFLNSPALFTADVVDLLKEIPNVQAYVDDIYISHDDPQEHLEQLEKIFSILLNAGYVVSLKKSEIAQREVEFLGFNITKEGRGLTDTFKQKLLNITPPKDLKQLQSILGLLNFARNFIPNYSELVKPLYTIVANANGKFISWTEDNSNQLQHIISVLNQADNLEERNPETRLIIKVNSSPSAGYIRYYNEGSKRPIMYVNYIFSKAEAKFTQTEKLLTTMHKGLIKAMDLAMGQEILVYSPIVSMTKIQRTPLPERKALPVRWITWMTYLEDPRIQFHYDKSLPELQQIPNVTEDVIAKTKHPSEFAMVFYTDGSAIKHPDVNKSHSAGMGIAQVQFIPEYKIVHQWSIPLGDHTAQLAEIAAVEFACKKALKISGPVLIVTDSFYVAESANKELPYWKSNGFLNNKKKPLRHVSKWKSIAECLQLKPDIIIMHEKGHQQPMTTLHTEGNNLADKLATQGSYVVHAGKRTADGSEFEKRTADGSEFESPKKKAKVE

SEQ ID NO: 414 - protein, 2176 aa, synthetic construct
MPAAKRVKLDGGDKKYSIGLDIGTNSVGWAVITDEYKVPSKKFKVLGNTDRHSIKKNLIGALLFDSGETAEATRLKRTARRRYTRRKNRICYLQEIFSNEMAKVDDSFFHRLEESFLVEEDKKHERHPIFGNIVDEVAYHEKYPTIYHLRKKLVDSTDKADLRLIYLALAHMIKFRGHFLIEGDLNPDNSDVDKLFIQLVQTYNQLFEENPINASGVDAKAILSARLSKSRRLENLIAQLPGEKKNGLFGNLIALSLGLTPNFKSNFDLAEDAKLQLSKDTYDDDLDNLLAQIGDQYADLFLAAKNLSDAILLSDILRVNTEITKAPLSASMIKRYDEHHQDLTLLKALVRQQLPEKYKEIFFDQSKNGYAGYIDGGASQEEFYKFIKPILEKMDGTEELLVKLNREDLLRKQRTFDNGSIPHQIHLGELHAILRRQEDFYPFLKDNREKIEKILTFRIPYYVGPLARGNSRFAWMTRKSEETITPWNFEEVVDKGASAQSFIERMTNFDKNLPNEKVLPKHSLLYEYFTVYNELTKVKYVTEGMRKPAFLSGEQKKAIVDLLFKTNRKVTVKQLKEDYFKKIECFDSVEISGVEDRFNASLGTYHDLLKIIKDKDFLDNEENEDILEDIVLTLTLFEDREMIEERLKTYAHLFDDKVMKQLKRRRYTGWGRLSRKLINGIRDKQSGKTILDFLKSDGFANRNFMQLIHDDSLTFKEDIQKAQVSGQGDSLHEHIANLAGSPAIKKGILQTVKVVDELVKVMGRHKPENIVIEMARENQTTQKGQKNSRERMKRIEEGIKELGSQILKEHPVENTQLQNEKLYLYYLQNGRDMYVDQELDINRLSDYDVDHIVPQSFLKDDSIDNKVLTRSDKARGKSDNVPSEEVVKKMKNYWRQLLNAKLITQRKFDNLTKAERGGLSELDKAGFIKRQLVETRQITKHVAQILDSRMNTKYDENDKLIREVKVITLKSKLVSDFRKDFQFYKVREINNYHHAHDAYLNAVVGTALIKKYPKLESEFVYGDYKVYDVRKMIAKSEQEIGKATAKYFFYSNIMNFFKTEITLANGEIRKRPLIETNGETGEIVWDKGRDFATVRKVLSMPQVNIVKKTEVQTGGFSKESILPKRNSDKLIARKKDWDPKKYGGFDSPTVAYSVLVVAKVEKGKSKKLKSVKELLGITIMERSSFEKNPIDFLEAKGYKEVKKDLIIKLPKYSLFELENGRKRMLASAGELQKGNELALPSKYVNFLYLASHYEKLKGSPEDNEQKQLFVEQHKHYLDEIIEQISEFSKRVILADANLDKVLSAYNKHRDKPIREQAENIIHLFTLTNLGAPAAFKYFDTTIDRKRYTSTKEVLDATLIHQSITGLYETRIDLSQLGGDGGEAAAKGSSPAPGGMDPLQLLQPLEAEIKGTKLKAHWNSGATITCVPEAFLEDERPIQTMLIKTIHGEKQQDVYYLTFKVQGRKVEAEVLASPYDYILLNPSDVPWLMKKPLQLTVLVPLHEYQERLLQQTALPKEQKELLQKLFLKYDALWQHWENQVGHRRIKPHNIATGTLAPRPQKQYPINPKAKPSIQIVIDDLLKQGVLIQQNSTMNTPVYPVPKPDGKWRMVLDYREVNKTIPLIAAQNQHSAGILSSIYRGKYKTTLDLTNGFWAHPITPESYWLTAFTWQGKQYCWTRLPQGFLNSPALFTADVVDLLKEIPNVQAYVDDIYISHDDPQEHLEQLEKIFSILLNAGYVVSLKKSEIAQREVEFLGFNITKEGRGLTDTFKQKLLNITPPKDLKQLQSILGLLNFARNFIPNYSELVKPLYTIVANANGKFISWTEDNSNQLQHIISVLNQADNLEERNPETRLIIKVNSSPSAGYIRYYNEGSKRPIMYVNYIFSKAEAKFTQTEKLLTTMHKGLIKAMDLAMGQEILVYSPIVSMTKIQRTPLPERKALPVRWITWMTYLEDPRIQFHYDKSLPELQQIPNVTEDVIAKTKHPSEFAMVFYTDGSAIKHPDVNKSHSAGMGIAQVQFIPEYKIVHQWSIPLGDHTAQLAEIAAVEFACKKALKISGPVLIVTDSFYVAESANKELPYWKSNGFLNNKKKPLRHVSKWKSIAECLQLKPDIIIMHEKGHQQPMTTLHTEGNNLADKLATQGSYVVHAGKRTADGSEFEKRTADGSEFESPKKKAKVE

SEQ ID NO: 415 - protein, 2174 aa, synthetic construct
MPAAKRVKLDGGDKKYSIGLDIGTNSVGWAVITDEYKVPSKKFKVLGNTDRHSIKKNLIGALLFDSGETAEATRLKRTARRRYTRRKNRICYLQEIFSNEMAKVDDSFFHRLEESFLVEEDKKHERHPIFGNIVDEVAYHEKYPTIYHLRKKLVDSTDKADLRLIYLALAHMIKFRGHFLIEGDLNPDNSDVDKLFIQLVQTYNQLFEENPINASGVDAKAILSARLSKSRRLENLIAQLPGEKKNGLFGNLIALSLGLTPNFKSNFDLAEDAKLQLSKDTYDDDLDNLLAQIGDQYADLFLAAKNLSDAILLSDILRVNTEITKAPLSASMIKRYDEHHQDLTLLKALVRQQLPEKYKEIFFDQSKNGYAGYIDGGASQEEFYKFIKPILEKMDGTEELLVKLNREDLLRKQRTFDNGSIPHQIHLGELHAILRRQEDFYPFLKDNREKIEKILTFRIPYYVGPLARGNSRFAWMTRKSEETITPWNFEEVVDKGASAQSFIERMTNFDKNLPNEKVLPKHSLLYEYFTVYNELTKVKYVTEGMRKPAFLSGEQKKAIVDLLFKTNRKVTVKQLKEDYFKKIECFDSVEISGVEDRFNASLGTYHDLLKIIKDKDFLDNEENEDILEDIVLTLTLFEDREMIEERLKTYAHLFDDKVMKQLKRRRYTGWGRLSRKLINGIRDKQSGKTILDFLKSDGFANRNFMQLIHDDSLTFKEDIQKAQVSGQGDSLHEHIANLAGSPAIKKGILQTVKVVDELVKVMGRHKPENIVIEMARENQTTQKGQKNSRERMKRIEEGIKELGSQILKEHPVENTQLQNEKLYLYYLQNGRDMYVDQELDINRLSDYDVDHIVPQSFLKDDSIDNKVLTRSDKARGKSDNVPSEEVVKKMKNYWRQLLNAKLITQRKFDNLTKAERGGLSELDKAGFIKRQLVETRQITKHVAQILDSRMNTKYDENDKLIREVKVITLKSKLVSDFRKDFQFYKVREINNYHHAHDAYLNAVVGTALIKKYPKLESEFVYGDYKVYDVRKMIAKSEQEIGKATAKYFFYSNIMNFFKTEITLANGEIRKRPLIETNGETGEIVWDKGRDFATVRKVLSMPQVNIVKKTEVQTGGFSKESILPKRNSDKLIARKKDWDPKKYGGFDSPTVAYSVLVVAKVEKGKSKKLKSVKELLGITIMERSSFEKNPIDFLEAKGYKEVKKDLIIKLPKYSLFELENGRKRMLASAGELQKGNELALPSKYVNFLYLASHYEKLKGSPEDNEQKQLFVEQHKHYLDEIIEQISEFSKRVILADANLDKVLSAYNKHRDKPIREQAENIIHLFTLTNLGAPAAFKYFDTTIDRKRYTSTKEVLDATLIHQSITGLYETRIDLSQLGGDGGGGGPAPGSSGGMDPLQLLQPLEAEIKGTKLKAHWNSGATITCVPEAFLEDERPIQTMLIKTIHGEKQQDVYYLTFKVQGRKVEAEVLASPYDYILLNPSDVPWLMKKPLQLTVLVPLHEYQERLLQQTALPKEQKELLQKLFLKYDALWQHWENQVGHRRIKPHNIATGTLAPRPQKQYPINPKAKPSIQIVIDDLLKQGVLIQQNSTMNTPVYPVPKPDGKWRMVLDYREVNKTIPLIAAQNQHSAGILSSIYRGKYKTTLDLTNGFWAHPITPESYWLTAFTWQGKQYCWTRLPQGFLNSPALFTADVVDLLKEIPNVQAYVDDIYISHDDPQEHLEQLEKIFSILLNAGYVVSLKKSEIAQREVEFLGFNITKEGRGLTDTFKQKLLNITPPKDLKQLQSILGLLNFARNFIPNYSELVKPLYTIVANANGKFISWTEDNSNQLQHIISVLNQADNLEERNPETRLIIKVNSSPSAGYIRYYNEGSKRPIMYVNYIFSKAEAKFTQTEKLLTTMHKGLIKAMDLAMGQEILVYSPIVSMTKIQRTPLPERKALPVRWITWMTYLEDPRIQFHYDKSLPELQQIPNVTEDVIAKTKHPSEFAMVFYTDGSAIKHPDVNKSHSAGMGIAQVQFIPEYKIVHQWSIPLGDHTAQLAEIAAVEFACKKALKISGPVLIVTDSFYVAESANKELPYWKSNGFLNNKKKPLRHVSKWKSIAECLQLKPDIIIMHEKGHQQPMTTLHTEGNNLADKLATQGSYVVHAGKRTADGSEFEKRTADGSEFESPKKKAKVE

SEQ ID NO: 416 - protein, 2173 aa, synthetic construct
MPAAKRVKLDGGDKKYSIGLDIGTNSVGWAVITDEYKVPSKKFKVLGNTDRHSIKKNLIGALLFDSGETAEATRLKRTARRRYTRRKNRICYLQEIFSNEMAKVDDSFFHRLEESFLVEEDKKHERHPIFGNIVDEVAYHEKYPTIYHLRKKLVDSTDKADLRLIYLALAHMIKFRGHFLIEGDLNPDNSDVDKLFIQLVQTYNQLFEENPINASGVDAKAILSARLSKSRRLENLIAQLPGEKKNGLFGNLIALSLGLTPNFKSNFDLAEDAKLQLSKDTYDDDLDNLLAQIGDQYADLFLAAKNLSDAILLSDILRVNTEITKAPLSASMIKRYDEHHQDLTLLKALVRQQLPEKYKEIFFDQSKNGYAGYIDGGASQEEFYKFIKPILEKMDGTEELLVKLNREDLLRKQRTFDNGSIPHQIHLGELHAILRRQEDFYPFLKDNREKIEKILTFRIPYYVGPLARGNSRFAWMTRKSEETITPWNFEEVVDKGASAQSFIERMTNFDKNLPNEKVLPKHSLLYEYFTVYNELTKVKYVTEGMRKPAFLSGEQKKAIVDLLFKTNRKVTVKQLKEDYFKKIECFDSVEISGVEDRFNASLGTYHDLLKIIKDKDFLDNEENEDILEDIVLTLTLFEDREMIEERLKTYAHLFDDKVMKQLKRRRYTGWGRLSRKLINGIRDKQSGKTILDFLKSDGFANRNFMQLIHDDSLTFKEDIQKAQVSGQGDSLHEHIANLAGSPAIKKGILQTVKVVDELVKVMGRHKPENIVIEMARENQTTQKGQKNSRERMKRIEEGIKELGSQILKEHPVENTQLQNEKLYLYYLQNGRDMYVDQELDINRLSDYDVDHIVPQSFLKDDSIDNKVLTRSDKARGKSDNVPSEEVVKKMKNYWRQLLNAKLITQRKFDNLTKAERGGLSELDKAGFIKRQLVETRQITKHVAQILDSRMNTKYDENDKLIREVKVITLKSKLVSDFRKDFQFYKVREINNYHHAHDAYLNAVVGTALIKKYPKLESEFVYGDYKVYDVRKMIAKSEQEIGKATAKYFFYSNIMNFFKTEITLANGEIRKRPLIETNGETGEIVWDKGRDFATVRKVLSMPQVNIVKKTEVQTGGFSKESILPKRNSDKLIARKKDWDPKKYGGFDSPTVAYSVLVVAKVEKGKSKKLKSVKELLGITIMERSSFEKNPIDFLEAKGYKEVKKDLIIKLPKYSLFELENGRKRMLASAGELQKGNELALPSKYVNFLYLASHYEKLKGSPEDNEQKQLFVEQHKHYLDEIIEQISEFSKRVILADANLDKVLSAYNKHRDKPIREQAENIIHLFTLTNLGAPAAFKYFDTTIDRKRYTSTKEVLDATLIHQSITGLYETRIDLSQLGGDGGGGGEAAAKGGMDPLQLLQPLEAEIKGTKLKAHWNSGATITCVPEAFLEDERPIQTMLIKTIHGEKQQDVYYLTFKVQGRKVEAEVLASPYDYILLNPSDVPWLMKKPLQLTVLVPLHEYQERLLQQTALPKEQKELLQKLFLKYDALWQHWENQVGHRRIKPHNIATGTLAPRPQKQYPINPKAKPSIQIVIDDLLKQGVLIQQNSTMNTPVYPVPKPDGKWRMVLDYREVNKTIPLIAAQNQHSAGILSSIYRGKYKTTLDLTNGFWAHPITPESYWLTAFTWQGKQYCWTRLPQGFLNSPALFTADVVDLLKEIPNVQAYVDDIYISHDDPQEHLEQLEKIFSILLNAGYVVSLKKSEIAQREVEFLGFNITKEGRGLTDTFKQKLLNITPPKDLKQLQSILGLLNFARNFIPNYSELVKPLYTIVANANGKFISWTEDNSNQLQHIISVLNQADNLEERNPETRLIIKVNSSPSAGYIRYYNEGSKRPIMYVNYIFSKAEAKFTQTEKLLTTMHKGLIKAMDLAMGQEILVYSPIVSMTKIQRTPLPERKALPVRWITWMTYLEDPRIQFHYDKSLPELQQIPNVTEDVIAKTKHPSEFAMVFYTDGSAIKHPDVNKSHSAGMGIAQVQFIPEYKIVHQWSIPLGDHTAQLAEIAAVEFACKKALKISGPVLIVTDSFYVAESANKELPYWKSNGFLNNKKKPLRHVSKWKSIAECLQLKPDIIIMHEKGHQQPMTTLHTEGNNLADKLATQGSYVVHAGKRTADGSEFEKRTADGSEFESPKKKAKVE

SEQ ID NO: 417 - protein, 2176 aa, synthetic construct
MPAAKRVKLDGGDKKYSIGLDIGTNSVGWAVITDEYKVPSKKFKVLGNTDRHSIKKNLIGALLFDSGETAEATRLKRTARRRYTRRKNRICYLQEIFSNEMAKVDDSFFHRLEESFLVEEDKKHERHPIFGNIVDEVAYHEKYPTIYHLRKKLVDSTDKADLRLIYLALAHMIKFRGHFLIEGDLNPDNSDVDKLFIQLVQTYNQLFEENPINASGVDAKAILSARLSKSRRLENLIAQLPGEKKNGLFGNLIALSLGLTPNFKSNFDLAEDAKLQLSKDTYDDDLDNLLAQIGDQYADLFLAAKNLSDAILLSDILRVNTEITKAPLSASMIKRYDEHHQDLTLLKALVRQQLPEKYKEIFFDQSKNGYAGYIDGGASQEEFYKFIKPILEKMDGTEELLVKLNREDLLRKQRTFDNGSIPHQIHLGELHAILRRQEDFYPFLKDNREKIEKILTFRIPYYVGPLARGNSRFAWMTRKSEETITPWNFEEVVDKGASAQSFIERMTNFDKNLPNEKVLPKHSLLYEYFTVYNELTKVKYVTEGMRKPAFLSGEQKKAIVDLLFKTNRKVTVKQLKEDYFKKIECFDSVEISGVEDRFNASLGTYHDLLKIIKDKDFLDNEENEDILEDIVLTLTLFEDREMIEERLKTYAHLFDDKVMKQLKRRRYTGWGRLSRKLINGIRDKQSGKTILDFLKSDGFANRNFMQLIHDDSLTFKEDIQKAQVSGQGDSLHEHIANLAGSPAIKKGILQTVKVVDELVKVMGRHKPENIVIEMARENQTTQKGQKNSRERMKRIEEGIKELGSQILKEHPVENTQLQNEKLYLYYLQNGRDMYVDQELDINRLSDYDVDHIVPQSFLKDDSIDNKVLTRSDKARGKSDNVPSEEVVKKMKNYWRQLLNAKLITQRKFDNLTKAERGGLSELDKAGFIKRQLVETRQITKHVAQILDSRMNTKYDENDKLIREVKVITLKSKLVSDFRKDFQFYKVREINNYHHAHDAYLNAVVGTALIKKYPKLESEFVYGDYKVYDVRKMIAKSEQEIGKATAKYFFYSNIMNFFKTEITLANGEIRKRPLIETNGETGEIVWDKGRDFATVRKVLSMPQVNIVKKTEVQTGGFSKESILPKRNSDKLIARKKDWDPKKYGGFDSPTVAYSVLVVAKVEKGKSKKLKSVKELLGITIMERSSFEKNPIDFLEAKGYKEVKKDLIIKLPKYSLFELENGRKRMLASAGELQKGNELALPSKYVNFLYLASHYEKLKGSPEDNEQKQLFVEQHKHYLDEIIEQISEFSKRVILADANLDKVLSAYNKHRDKPIREQAENIIHLFTLTNLGAPAAFKYFDTTIDRKRYTSTKEVLDATLIHQSITGLYETRIDLSQLGGDGGGGSEAAAKPAPGGMDPLQLLQPLEAEIKGTKLKAHWNSGATITCVPEAFLEDERPIQTMLIKTIHGEKQQDVYYLTFKVQGRKVEAEVLASPYDYILLNPSDVPWLMKKPLQLTVLVPLHEYQERLLQQTALPKEQKELLQKLFLKYDALWQHWENQVGHRRIKPHNIATGTLAPRPQKQYPINPKAKPSIQIVIDDLLKQGVLIQQNSTMNTPVYPVPKPDGKWRMVLDYREVNKTIPLIAAQNQHSAGILSSIYRGKYKTTLDLTNGFWAHPITPESYWLTAFTWQGKQYCWTRLPQGFLNSPALFTADVVDLLKEIPNVQAYVDDIYISHDDPQEHLEQLEKIFSILLNAGYVVSLKKSEIAQREVEFLGFNITKEGRGLTDTFKQKLLNITPPKDLKQLQSILGLLNFARNFIPNYSELVKPLYTIVANANGKFISWTEDNSNQLQHIISVLNQADNLEERNPETRLIIKVNSSPSAGYIRYYNEGSKRPIMYVNYIFSKAEAKFTQTEKLLTTMHKGLIKAMDLAMGQEILVYSPIVSMTKIQRTPLPERKALPVRWITWMTYLEDPRIQFHYDKSLPELQQIPNVTEDVIAKTKHPSEFAMVFYTDGSAIKHPDVNKSHSAGMGIAQVQFIPEYKIVHQWSIPLGDHTAQLAEIAAVEFACKKALKISGPVLIVTDSFYVAESANKELPYWKSNGFLNNKKKPLRHVSKWKSIAECLQLKPDIIIMHEKGHQQPMTTLHTEGNNLADKLATQGSYVVHAGKRTADGSEFEKRTADGSEFESPKKKAKVE

SEQ ID NO: 418 - protein, 2177 aa, synthetic construct
MPAAKRVKLDGGDKKYSIGLDIGTNSVGWAVITDEYKVPSKKFKVLGNTDRHSIKKNLIGALLFDSGETAEATRLKRTARRRYTRRKNRICYLQEIFSNEMAKVDDSFFHRLEESFLVEEDKKHERHPIFGNIVDEVAYHEKYPTIYHLRKKLVDSTDKADLRLIYLALAHMIKFRGHFLIEGDLNPDNSDVDKLFIQLVQTYNQLFEENPINASGVDAKAILSARLSKSRRLENLIAQLPGEKKNGLFGNLIALSLGLTPNFKSNFDLAEDAKLQLSKDTYDDDLDNLLAQIGDQYADLFLAAKNLSDAILLSDILRVNTEITKAPLSASMIKRYDEHHQDLTLLKALVRQQLPEKYKEIFFDQSKNGYAGYIDGGASQEEFYKFIKPILEKMDGTEELLVKLNREDLLRKQRTFDNGSIPHQIHLGELHAILRRQEDFYPFLKDNREKIEKILTFRIPYYVGPLARGNSRFAWMTRKSEETITPWNFEEVVDKGASAQSFIERMTNFDKNLPNEKVLPKHSLLYEYFTVYNELTKVKYVTEGMRKPAFLSGEQKKAIVDLLFKTNRKVTVKQLKEDYFKKIECFDSVEISGVEDRFNASLGTYHDLLKIIKDKDFLDNEENEDILEDIVLTLTLFEDREMIEERLKTYAHLFDDKVMKQLKRRRYTGWGRLSRKLINGIRDKQSGKTILDFLKSDGFANRNFMQLIHDDSLTFKEDIQKAQVSGQGDSLHEHIANLAGSPAIKKGILQTVKVVDELVKVMGRHKPENIVIEMARENQTTQKGQKNSRERMKRIEEGIKELGSQILKEHPVENTQLQNEKLYLYYLQNGRDMYVDQELDINRLSDYDVDHIVPQSFLKDDSIDNKVLTRSDKARGKSDNVPSEEVVKKMKNYWRQLLNAKLITQRKFDNLTKAERGGLSELDKAGFIKRQLVETRQITKHVAQILDSRMNTKYDENDKLIREVKVITLKSKLVSDFRKDFQFYKVREINNYHHAHDAYLNAVVGTALIKKYPKLESEFVYGDYKVYDVRKMIAKSEQEIGKATAKYFFYSNIMNFFKTEITLANGEIRKRPLIETNGETGEIVWDKGRDFATVRKVLSMPQVNIVKKTEVQTGGFSKESILPKRNSDKLIARKKDWDPKKYGGFDSPTVAYSVLVVAKVEKGKSKKLKSVKELLGITIMERSSFEKNPIDFLEAKGYKEVKKDLIIKLPKYSLFELENGRKRMLASAGELQKGNELALPSKYVNFLYLASHYEKLKGSPEDNEQKQLFVEQHKHYLDEIIEQISEFSKRVILADANLDKVLSAYNKHRDKPIREQAENIIHLFTLTNLGAPAAFKYFDTTIDRKRYTSTKEVLDATLIHQSITGLYETRIDLSQLGGDGGGSSGSSGSSGSSGGMDPLQLLQPLEAEIKGTKLKAHWNSGATITCVPEAFLEDERPIQTMLIKTIHGEKQQDVYYLTFKVQGRKVEAEVLASPYDYILLNPSDVPWLMKKPLQLTVLVPLHEYQERLLQQTALPKEQKELLQKLFLKYDALWQHWENQVGHRRIKPHNIATGTLAPRPQKQYPINPKAKPSIQIVIDDLLKQGVLIQQNSTMNTPVYPVPKPDGKWRMVLDYREVNKTIPLIAAQNQHSAGILSSIYRGKYKTTLDLTNGFWAHPITPESYWLTAFTWQGKQYCWTRLPQGFLNSPALFTADVVDLLKEIPNVQAYVDDIYISHDDPQEHLEQLEKIFSILLNAGYVVSLKKSEIAQREVEFLGFNITKEGRGLTDTFKQKLLNITPPKDLKQLQSILGLLNFARNFIPNYSELVKPLYTIVANANGKFISWTEDNSNQLQHIISVLNQADNLEERNPETRLIIKVNSSPSAGYIRYYNEGSKRPIMYVNYIFSKAEAKFTQTEKLLTTMHKGLIKAMDLAMGQEILVYSPIVSMTKIQRTPLPERKALPVRWITWMTYLEDPRIQFHYDKSLPELQQIPNVTEDVIAKTKHPSEFAMVFYTDGSAIKHPDVNKSHSAGMGIAQVQFIPEYKIVHQWSIPLGDHTAQLAEIAAVEFACKKALKISGPVLIVTDSFYVAESANKELPYWKSNGFLNNKKKPLRHVSKWKSIAECLQLKPDIIIMHEKGHQQPMTTLHTEGNNLADKLATQGSYVVHAGKRTADGSEFEKRTADGSEFESPKKKAKVE

SEQ ID NO: 419 - protein, 2174 aa, synthetic construct
MPAAKRVKLDGGDKKYSIGLDIGTNSVGWAVITDEYKVPSKKFKVLGNTDRHSIKKNLIGALLFDSGETAEATRLKRTARRRYTRRKNRICYLQEIFSNEMAKVDDSFFHRLEESFLVEEDKKHERHPIFGNIVDEVAYHEKYPTIYHLRKKLVDSTDKADLRLIYLALAHMIKFRGHFLIEGDLNPDNSDVDKLFIQLVQTYNQLFEENPINASGVDAKAILSARLSKSRRLENLIAQLPGEKKNGLFGNLIALSLGLTPNFKSNFDLAEDAKLQLSKDTYDDDLDNLLAQIGDQYADLFLAAKNLSDAILLSDILRVNTEITKAPLSASMIKRYDEHHQDLTLLKALVRQQLPEKYKEIFFDQSKNGYAGYIDGGASQEEFYKFIKPILEKMDGTEELLVKLNREDLLRKQRTFDNGSIPHQIHLGELHAILRRQEDFYPFLKDNREKIEKILTFRIPYYVGPLARGNSRFAWMTRKSEETITPWNFEEVVDKGASAQSFIERMTNFDKNLPNEKVLPKHSLLYEYFTVYNELTKVKYVTEGMRKPAFLSGEQKKAIVDLLFKTNRKVTVKQLKEDYFKKIECFDSVEISGVEDRFNASLGTYHDLLKIIKDKDFLDNEENEDILEDIVLTLTLFEDREMIEERLKTYAHLFDDKVMKQLKRRRYTGWGRLSRKLINGIRDKQSGKTILDFLKSDGFANRNFMQLIHDDSLTFKEDIQKAQVSGQGDSLHEHIANLAGSPAIKKGILQTVKVVDELVKVMGRHKPENIVIEMARENQTTQKGQKNSRERMKRIEEGIKELGSQILKEHPVENTQLQNEKLYLYYLQNGRDMYVDQELDINRLSDYDVDHIVPQSFLKDDSIDNKVLTRSDKARGKSDNVPSEEVVKKMKNYWRQLLNAKLITQRKFDNLTKAERGGLSELDKAGFIKRQLVETRQITKHVAQILDSRMNTKYDENDKLIREVKVITLKSKLVSDFRKDFQFYKVREINNYHHAHDAYLNAVVGTALIKKYPKLESEFVYGDYKVYDVRKMIAKSEQEIGKATAKYFFYSNIMNFFKTEITLANGEIRKRPLIETNGETGEIVWDKGRDFATVRKVLSMPQVNIVKKTEVQTGGFSKESILPKRNSDKLIARKKDWDPKKYGGFDSPTVAYSVLVVAKVEKGKSKKLKSVKELLGITIMERSSFEKNPIDFLEAKGYKEVKKDLIIKLPKYSLFELENGRKRMLASAGELQKGNELALPSKYVNFLYLASHYEKLKGSPEDNEQKQLFVEQHKHYLDEIIEQISEFSKRVILADANLDKVLSAYNKHRDKPIREQAENIIHLFTLTNLGAPAAFKYFDTTIDRKRYTSTKEVLDATLIHQSITGLYETRIDLSQLGGDGGGGGGSSPAPGGMDPLQLLQPLEAEIKGTKLKAHWNSGATITCVPEAFLEDERPIQTMLIKTIHGEKQQDVYYLTFKVQGRKVEAEVLASPYDYILLNPSDVPWLMKKPLQLTVLVPLHEYQERLLQQTALPKEQKELLQKLFLKYDALWQHWENQVGHRRIKPHNIATGTLAPRPQKQYPINPKAKPSIQIVIDDLLKQGVLIQQNSTMNTPVYPVPKPDGKWRMVLDYREVNKTIPLIAAQNQHSAGILSSIYRGKYKTTLDLTNGFWAHPITPESYWLTAFTWQGKQYCWTRLPQGFLNSPALFTADVVDLLKEIPNVQAYVDDIYISHDDPQEHLEQLEKIFSILLNAGYVVSLKKSEIAQREVEFLGFNITKEGRGLTDTFKQKLLNITPPKDLKQLQSILGLLNFARNFIPNYSELVKPLYTIVANANGKFISWTEDNSNQLQHIISVLNQADNLEERNPETRLIIKVNSSPSAGYIRYYNEGSKRPIMYVNYIFSKAEAKFTQTEKLLTTMHKGLIKAMDLAMGQEILVYSPIVSMTKIQRTPLPERKALPVRWITWMTYLEDPRIQFHYDKSLPELQQIPNVTEDVIAKTKHPSEFAMVFYTDGSAIKHPDVNKSHSAGMGIAQVQFIPEYKIVHQWSIPLGDHTAQLAEIAAVEFACKKALKISGPVLIVTDSFYVAESANKELPYWKSNGFLNNKKKPLRHVSKWKSIAECLQLKPDIIIMHEKGHQQPMTTLHTEGNNLADKLATQGSYVVHAGKRTADGSEFEKRTADGSEFESPKKKAKVE

SEQ ID NO: 420 - protein, 2176 aa, synthetic construct
MPAAKRVKLDGGDKKYSIGLDIGTNSVGWAVITDEYKVPSKKFKVLGNTDRHSIKKNLIGALLFDSGETAEATRLKRTARRRYTRRKNRICYLQEIFSNEMAKVDDSFFHRLEESFLVEEDKKHERHPIFGNIVDEVAYHEKYPTIYHLRKKLVDSTDKADLRLIYLALAHMIKFRGHFLIEGDLNPDNSDVDKLFIQLVQTYNQLFEENPINASGVDAKAILSARLSKSRRLENLIAQLPGEKKNGLFGNLIALSLGLTPNFKSNFDLAEDAKLQLSKDTYDDDLDNLLAQIGDQYADLFLAAKNLSDAILLSDILRVNTEITKAPLSASMIKRYDEHHQDLTLLKALVRQQLPEKYKEIFFDQSKNGYAGYIDGGASQEEFYKFIKPILEKMDGTEELLVKLNREDLLRKQRTFDNGSIPHQIHLGELHAILRRQEDFYPFLKDNREKIEKILTFRIPYYVGPLARGNSRFAWMTRKSEETITPWNFEEVVDKGASAQSFIERMTNFDKNLPNEKVLPKHSLLYEYFTVYNELTKVKYVTEGMRKPAFLSGEQKKAIVDLLFKTNRKVTVKQLKEDYFKKIECFDSVEISGVEDRFNASLGTYHDLLKIIKDKDFLDNEENEDILEDIVLTLTLFEDREMIEERLKTYAHLFDDKVMKQLKRRRYTGWGRLSRKLINGIRDKQSGKTILDFLKSDGFANRNFMQLIHDDSLTFKEDIQKAQVSGQGDSLHEHIANLAGSPAIKKGILQTVKVVDELVKVMGRHKPENIVIEMARENQTTQKGQKNSRERMKRIEEGIKELGSQILKEHPVENTQLQNEKLYLYYLQNGRDMYVDQELDINRLSDYDVDHIVPQSFLKDDSIDNKVLTRSDKARGKSDNVPSEEVVKKMKNYWRQLLNAKLITQRKFDNLTKAERGGLSELDKAGFIKRQLVETRQITKHVAQILDSRMNTKYDENDKLIREVKVITLKSKLVSDFRKDFQFYKVREINNYHHAHDAYLNAVVGTALIKKYPKLESEFVYGDYKVYDVRKMIAKSEQEIGKATAKYFFYSNIMNFFKTEITLANGEIRKRPLIETNGETGEIVWDKGRDFATVRKVLSMPQVNIVKKTEVQTGGFSKESILPKRNSDKLIARKKDWDPKKYGGFDSPTVAYSVLVVAKVEKGKSKKLKSVKELLGITIMERSSFEKNPIDFLEAKGYKEVKKDLIIKLPKYSLFELENGRKRMLASAGELQKGNELALPSKYVNFLYLASHYEKLKGSPEDNEQKQLFVEQHKHYLDEIIEQISEFSKRVILADANLDKVLSAYNKHRDKPIREQAENIIHLFTLTNLGAPAAFKYFDTTIDRKRYTSTKEVLDATLIHQSITGLYETRIDLSQLGGDGGGGGGSSEAAAKGGMDPLQLLQPLEAEIKGTKLKAHWNSGATITCVPEAFLEDERPIQTMLIKTIHGEKQQDVYYLTFKVQGRKVEAEVLASPYDYILLNPSDVPWLMKKPLQLTVLVPLHEYQERLLQQTALPKEQKELLQKLFLKYDALWQHWENQVGHRRIKPHNIATGTLAPRPQKQYPINPKAKPSIQIVIDDLLKQGVLIQQNSTMNTPVYPVPKPDGKWRMVLDYREVNKTIPLIAAQNQHSAGILSSIYRGKYKTTLDLTNGFWAHPITPESYWLTAFTWQGKQYCWTRLPQGFLNSPALFTADVVDLLKEIPNVQAYVDDIYISHDDPQEHLEQLEKIFSILLNAGYVVSLKKSEIAQREVEFLGFNITKEGRGLTDTFKQKLLNITPPKDLKQLQSILGLLNFARNFIPNYSELVKPLYTIVANANGKFISWTEDNSNQLQHIISVLNQADNLEERNPETRLIIKVNSSPSAGYIRYYNEGSKRPIMYVNYIFSKAEAKFTQTEKLLTTMHKGLIKAMDLAMGQEILVYSPIVSMTKIQRTPLPERKALPVRWITWMTYLEDPRIQFHYDKSLPELQQIPNVTEDVIAKTKHPSEFAMVFYTDGSAIKHPDVNKSHSAGMGIAQVQFIPEYKIVHQWSIPLGDHTAQLAEIAAVEFACKKALKISGPVLIVTDSFYVAESANKELPYWKSNGFLNNKKKPLRHVSKWKSIAECLQLKPDIIIMHEKGHQQPMTTLHTEGNNLADKLATQGSYVVHAGKRTADGSEFEKRTADGSEFESPKKKAKVE

SEQ ID NO: 421 - protein, 2180 aa, synthetic construct
MPAAKRVKLDGGDKKYSIGLDIGTNSVGWAVITDEYKVPSKKFKVLGNTDRHSIKKNLIGALLFDSGETAEATRLKRTARRRYTRRKNRICYLQEIFSNEMAKVDDSFFHRLEESFLVEEDKKHERHPIFGNIVDEVAYHEKYPTIYHLRKKLVDSTDKADLRLIYLALAHMIKFRGHFLIEGDLNPDNSDVDKLFIQLVQTYNQLFEENPINASGVDAKAILSARLSKSRRLENLIAQLPGEKKNGLFGNLIALSLGLTPNFKSNFDLAEDAKLQLSKDTYDDDLDNLLAQIGDQYADLFLAAKNLSDAILLSDILRVNTEITKAPLSASMIKRYDEHHQDLTLLKALVRQQLPEKYKEIFFDQSKNGYAGYIDGGASQEEFYKFIKPILEKMDGTEELLVKLNREDLLRKQRTFDNGSIPHQIHLGELHAILRRQEDFYPFLKDNREKIEKILTFRIPYYVGPLARGNSRFAWMTRKSEETITPWNFEEVVDKGASAQSFIERMTNFDKNLPNEKVLPKHSLLYEYFTVYNELTKVKYVTEGMRKPAFLSGEQKKAIVDLLFKTNRKVTVKQLKEDYFKKIECFDSVEISGVEDRFNASLGTYHDLLKIIKDKDFLDNEENEDILEDIVLTLTLFEDREMIEERLKTYAHLFDDKVMKQLKRRRYTGWGRLSRKLINGIRDKQSGKTILDFLKSDGFANRNFMQLIHDDSLTFKEDIQKAQVSGQGDSLHEHIANLAGSPAIKKGILQTVKVVDELVKVMGRHKPENIVIEMARENQTTQKGQKNSRERMKRIEEGIKELGSQILKEHPVENTQLQNEKLYLYYLQNGRDMYVDQELDINRLSDYDVDHIVPQSFLKDDSIDNKVLTRSDKARGKSDNVPSEEVVKKMKNYWRQLLNAKLITQRKFDNLTKAERGGLSELDKAGFIKRQLVETRQITKHVAQILDSRMNTKYDENDKLIREVKVITLKSKLVSDFRKDFQFYKVREINNYHHAHDAYLNAVVGTALIKKYPKLESEFVYGDYKVYDVRKMIAKSEQEIGKATAKYFFYSNIMNFFKTEITLANGEIRKRPLIETNGETGEIVWDKGRDFATVRKVLSMPQVNIVKKTEVQTGGFSKESILPKRNSDKLIARKKDWDPKKYGGFDSPTVAYSVLVVAKVEKGKSKKLKSVKELLGITIMERSSFEKNPIDFLEAKGYKEVKKDLIIKLPKYSLFELENGRKRMLASAGELQKGNELALPSKYVNFLYLASHYEKLKGSPEDNEQKQLFVEQHKHYLDEIIEQISEFSKRVILADANLDKVLSAYNKHRDKPIREQAENIIHLFTLTNLGAPAAFKYFDTTIDRKRYTSTKEVLDATLIHQSITGLYETRIDLSQLGGDGGGGGGSEAAAKGGGGSGGMDPLQLLQPLEAEIKGTKLKAHWNSGATITCVPEAFLEDERPIQTMLIKTIHGEKQQDVYYLTFKVQGRKVEAEVLASPYDYILLNPSDVPWLMKKPLQLTVLVPLHEYQERLLQQTALPKEQKELLQKLFLKYDALWQHWENQVGHRRIKPHNIATGTLAPRPQKQYPINPKAKPSIQIVIDDLLKQGVLIQQNSTMNTPVYPVPKPDGKWRMVLDYREVNKTIPLIAAQNQHSAGILSSIYRGKYKTTLDLTNGFWAHPITPESYWLTAFTWQGKQYCWTRLPQGFLNSPALFTADVVDLLKEIPNVQAYVDDIYISHDDPQEHLEQLEKIFSILLNAGYVVSLKKSEIAQREVEFLGFNITKEGRGLTDTFKQKLLNITPPKDLKQLQSILGLLNFARNFIPNYSELVKPLYTIVANANGKFISWTEDNSNQLQHIISVLNQADNLEERNPETRLIIKVNSSPSAGYIRYYNEGSKRPIMYVNYIFSKAEAKFTQTEKLLTTMHKGLIKAMDLAMGQEILVYSPIVSMTKIQRTPLPERKALPVRWITWMTYLEDPRIQFHYDKSLPELQQIPNVTEDVIAKTKHPSEFAMVFYTDGSAIKHPDVNKSHSAGMGIAQVQFIPEYKIVHQWSIPLGDHTAQLAEIAAVEFACKKALKISGPVLIVTDSFYVAESANKELPYWKSNGFLNNKKKPLRHVSKWKSIAECLQLKPDIIIMHEKGHQQPMTTLHTEGNNLADKLATQGSYVVHAGKRTADGSEFEKRTADGSEFESPKKKAKVE

SEQ ID NO: 422 - protein, 2176 aa, synthetic construct
MPAAKRVKLDGGDKKYSIGLDIGTNSVGWAVITDEYKVPSKKFKVLGNTDRHSIKKNLIGALLFDSGETAEATRLKRTARRRYTRRKNRICYLQEIFSNEMAKVDDSFFHRLEESFLVEEDKKHERHPIFGNIVDEVAYHEKYPTIYHLRKKLVDSTDKADLRLIYLALAHMIKFRGHFLIEGDLNPDNSDVDKLFIQLVQTYNQLFEENPINASGVDAKAILSARLSKSRRLENLIAQLPGEKKNGLFGNLIALSLGLTPNFKSNFDLAEDAKLQLSKDTYDDDLDNLLAQIGDQYADLFLAAKNLSDAILLSDILRVNTEITKAPLSASMIKRYDEHHQDLTLLKALVRQQLPEKYKEIFFDQSKNGYAGYIDGGASQEEFYKFIKPILEKMDGTEELLVKLNREDLLRKQRTFDNGSIPHQIHLGELHAILRRQEDFYPFLKDNREKIEKILTFRIPYYVGPLARGNSRFAWMTRKSEETITPWNFEEVVDKGASAQSFIERMTNFDKNLPNEKVLPKHSLLYEYFTVYNELTKVKYVTEGMRKPAFLSGEQKKAIVDLLFKTNRKVTVKQLKEDYFKKIECFDSVEISGVEDRFNASLGTYHDLLKIIKDKDFLDNEENEDILEDIVLTLTLFEDREMIEERLKTYAHLFDDKVMKQLKRRRYTGWGRLSRKLINGIRDKQSGKTILDFLKSDGFANRNFMQLIHDDSLTFKEDIQKAQVSGQGDSLHEHIANLAGSPAIKKGILQTVKVVDELVKVMGRHKPENIVIEMARENQTTQKGQKNSRERMKRIEEGIKELGSQILKEHPVENTQLQNEKLYLYYLQNGRDMYVDQELDINRLSDYDVDHIVPQSFLKDDSIDNKVLTRSDKARGKSDNVPSEEVVKKMKNYWRQLLNAKLITQRKFDNLTKAERGGLSELDKAGFIKRQLVETRQITKHVAQILDSRMNTKYDENDKLIREVKVITLKSKLVSDFRKDFQFYKVREINNYHHAHDAYLNAVVGTALIKKYPKLESEFVYGDYKVYDVRKMIAKSEQEIGKATAKYFFYSNIMNFFKTEITLANGEIRKRPLIETNGETGEIVWDKGRDFATVRKVLSMPQVNIVKKTEVQTGGFSKESILPKRNSDKLIARKKDWDPKKYGGFDSPTVAYSVLVVAKVEKGKSKKLKSVKELLGITIMERSSFEKNPIDFLEAKGYKEVKKDLIIKLPKYSLFELENGRKRMLASAGELQKGNELALPSKYVNFLYLASHYEKLKGSPEDNEQKQLFVEQHKHYLDEIIEQISEFSKRVILADANLDKVLSAYNKHRDKPIREQAENIIHLFTLTNLGAPAAFKYFDTTIDRKRYTSTKEVLDATLIHQSITGLYETRIDLSQLGGDGGGGGEAAAKGGSGGMDPLQLLQPLEAEIKGTKLKAHWNSGATITCVPEAFLEDERPIQTMLIKTIHGEKQQDVYYLTFKVQGRKVEAEVLASPYDYILLNPSDVPWLMKKPLQLTVLVPLHEYQERLLQQTALPKEQKELLQKLFLKYDALWQHWENQVGHRRIKPHNIATGTLAPRPQKQYPINPKAKPSIQIVIDDLLKQGVLIQQNSTMNTPVYPVPKPDGKWRMVLDYREVNKTIPLIAAQNQHSAGILSSIYRGKYKTTLDLTNGFWAHPITPESYWLTAFTWQGKQYCWTRLPQGFLNSPALFTADVVDLLKEIPNVQAYVDDIYISHDDPQEHLEQLEKIFSILLNAGYVVSLKKSEIAQREVEFLGFNITKEGRGLTDTFKQKLLNITPPKDLKQLQSILGLLNFARNFIPNYSELVKPLYTIVANANGKFISWTEDNSNQLQHIISVLNQADNLEERNPETRLIIKVNSSPSAGYIRYYNEGSKRPIMYVNYIFSKAEAKFTQTEKLLTTMHKGLIKAMDLAMGQEILVYSPIVSMTKIQRTPLPERKALPVRWITWMTYLEDPRIQFHYDKSLPELQQIPNVTEDVIAKTKHPSEFAMVFYTDGSAIKHPDVNKSHSAGMGIAQVQFIPEYKIVHQWSIPLGDHTAQLAEIAAVEFACKKALKISGPVLIVTDSFYVAESANKELPYWKSNGFLNNKKKPLRHVSKWKSIAECLQLKPDIIIMHEKGHQQPMTTLHTEGNNLADKLATQGSYVVHAGKRTADGSEFEKRTADGSEFESPKKKAKVE

SEQ ID NO: 423 - protein, 2171 aa, synthetic construct
MPAAKRVKLDGGDKKYSIGLDIGTNSVGWAVITDEYKVPSKKFKVLGNTDRHSIKKNLIGALLFDSGETAEATRLKRTARRRYTRRKNRICYLQEIFSNEMAKVDDSFFHRLEESFLVEEDKKHERHPIFGNIVDEVAYHEKYPTIYHLRKKLVDSTDKADLRLIYLALAHMIKFRGHFLIEGDLNPDNSDVDKLFIQLVQTYNQLFEENPINASGVDAKAILSARLSKSRRLENLIAQLPGEKKNGLFGNLIALSLGLTPNFKSNFDLAEDAKLQLSKDTYDDDLDNLLAQIGDQYADLFLAAKNLSDAILLSDILRVNTEITKAPLSASMIKRYDEHHQDLTLLKALVRQQLPEKYKEIFFDQSKNGYAGYIDGGASQEEFYKFIKPILEKMDGTEELLVKLNREDLLRKQRTFDNGSIPHQIHLGELHAILRRQEDFYPFLKDNREKIEKILTFRIPYYVGPLARGNSRFAWMTRKSEETITPWNFEEVVDKGASAQSFIERMTNFDKNLPNEKVLPKHSLLYEYFTVYNELTKVKYVTEGMRKPAFLSGEQKKAIVDLLFKTNRKVTVKQLKEDYFKKIECFDSVEISGVEDRFNASLGTYHDLLKIIKDKDFLDNEENEDILEDIVLTLTLFEDREMIEERLKTYAHLFDDKVMKQLKRRRYTGWGRLSRKLINGIRDKQSGKTILDFLKSDGFANRNFMQLIHDDSLTFKEDIQKAQVSGQGDSLHEHIANLAGSPAIKKGILQTVKVVDELVKVMGRHKPENIVIEMARENQTTQKGQKNSRERMKRIEEGIKELGSQILKEHPVENTQLQNEKLYLYYLQNGRDMYVDQELDINRLSDYDVDHIVPQSFLKDDSIDNKVLTRSDKARGKSDNVPSEEVVKKMKNYWRQLLNAKLITQRKFDNLTKAERGGLSELDKAGFIKRQLVETRQITKHVAQILDSRMNTKYDENDKLIREVKVITLKSKLVSDFRKDFQFYKVREINNYHHAHDAYLNAVVGTALIKKYPKLESEFVYGDYKVYDVRKMIAKSEQEIGKATAKYFFYSNIMNFFKTEITLANGEIRKRPLIETNGETGEIVWDKGRDFATVRKVLSMPQVNIVKKTEVQTGGFSKESILPKRNSDKLIARKKDWDPKKYGGFDSPTVAYSVLVVAKVEKGKSKKLKSVKELLGITIMERSSFEKNPIDFLEAKGYKEVKKDLIIKLPKYSLFELENGRKRMLASAGELQKGNELALPSKYVNFLYLASHYEKLKGSPEDNEQKQLFVEQHKHYLDEIIEQISEFSKRVILADANLDKVLSAYNKHRDKPIREQAENIIHLFTLTNLGAPAAFKYFDTTIDRKRYTSTKEVLDATLIHQSITGLYETRIDLSQLGGDGGGSSGSSGGMDPLQLLQPLEAEIKGTKLKAHWNSGATITCVPEAFLEDERPIQTMLIKTIHGEKQQDVYYLTFKVQGRKVEAEVLASPYDYILLNPSDVPWLMKKPLQLTVLVPLHEYQERLLQQTALPKEQKELLQKLFLKYDALWQHWENQVGHRRIKPHNIATGTLAPRPQKQYPINPKAKPSIQIVIDDLLKQGVLIQQNSTMNTPVYPVPKPDGKWRMVLDYREVNKTIPLIAAQNQHSAGILSSIYRGKYKTTLDLTNGFWAHPITPESYWLTAFTWQGKQYCWTRLPQGFLNSPALFTADVVDLLKEIPNVQAYVDDIYISHDDPQEHLEQLEKIFSILLNAGYVVSLKKSEIAQREVEFLGFNITKEGRGLTDTFKQKLLNITPPKDLKQLQSILGLLNFARNFIPNYSELVKPLYTIVANANGKFISWTEDNSNQLQHIISVLNQADNLEERNPETRLIIKVNSSPSAGYIRYYNEGSKRPIMYVNYIFSKAEAKFTQTEKLLTTMHKGLIKAMDLAMGQEILVYSPIVSMTKIQRTPLPERKALPVRWITWMTYLEDPRIQFHYDKSLPELQQIPNVTEDVIAKTKHPSEFAMVFYTDGSAIKHPDVNKSHSAGMGIAQVQFIPEYKIVHQWSIPLGDHTAQLAEIAAVEFACKKALKISGPVLIVTDSFYVAESANKELPYWKSNGFLNNKKKPLRHVSKWKSIAECLQLKPDIIIMHEKGHQQPMTTLHTEGNNLADKLATQGSYVVHAGKRTADGSEFEKRTADGSEFESPKKKAKVE

SEQ ID NO: 424 - protein, 2176 aa, synthetic construct
MPAAKRVKLDGGDKKYSIGLDIGTNSVGWAVITDEYKVPSKKFKVLGNTDRHSIKKNLIGALLFDSGETAEATRLKRTARRRYTRRKNRICYLQEIFSNEMAKVDDSFFHRLEESFLVEEDKKHERHPIFGNIVDEVAYHEKYPTIYHLRKKLVDSTDKADLRLIYLALAHMIKFRGHFLIEGDLNPDNSDVDKLFIQLVQTYNQLFEENPINASGVDAKAILSARLSKSRRLENLIAQLPGEKKNGLFGNLIALSLGLTPNFKSNFDLAEDAKLQLSKDTYDDDLDNLLAQIGDQYADLFLAAKNLSDAILLSDILRVNTEITKAPLSASMIKRYDEHHQDLTLLKALVRQQLPEKYKEIFFDQSKNGYAGYIDGGASQEEFYKFIKPILEKMDGTEELLVKLNREDLLRKQRTFDNGSIPHQIHLGELHAILRRQEDFYPFLKDNREKIEKILTFRIPYYVGPLARGNSRFAWMTRKSEETITPWNFEEVVDKGASAQSFIERMTNFDKNLPNEKVLPKHSLLYEYFTVYNELTKVKYVTEGMRKPAFLSGEQKKAIVDLLFKTNRKVTVKQLKEDYFKKIECFDSVEISGVEDRFNASLGTYHDLLKIIKDKDFLDNEENEDILEDIVLTLTLFEDREMIEERLKTYAHLFDDKVMKQLKRRRYTGWGRLSRKLINGIRDKQSGKTILDFLKSDGFANRNFMQLIHDDSLTFKEDIQKAQVSGQGDSLHEHIANLAGSPAIKKGILQTVKVVDELVKVMGRHKPENIVIEMARENQTTQKGQKNSRERMKRIEEGIKELGSQILKEHPVENTQLQNEKLYLYYLQNGRDMYVDQELDINRLSDYDVDHIVPQSFLKDDSIDNKVLTRSDKARGKSDNVPSEEVVKKMKNYWRQLLNAKLITQRKFDNLTKAERGGLSELDKAGFIKRQLVETRQITKHVAQILDSRMNTKYDENDKLIREVKVITLKSKLVSDFRKDFQFYKVREINNYHHAHDAYLNAVVGTALIKKYPKLESEFVYGDYKVYDVRKMIAKSEQEIGKATAKYFFYSNIMNFFKTEITLANGEIRKRPLIETNGETGEIVWDKGRDFATVRKVLSMPQVNIVKKTEVQTGGFSKESILPKRNSDKLIARKKDWDPKKYGGFDSPTVAYSVLVVAKVEKGKSKKLKSVKELLGITIMERSSFEKNPIDFLEAKGYKEVKKDLIIKLPKYSLFELENGRKRMLASAGELQKGNELALPSKYVNFLYLASHYEKLKGSPEDNEQKQLFVEQHKHYLDEIIEQISEFSKRVILADANLDKVLSAYNKHRDKPIREQAENIIHLFTLTNLGAPAAFKYFDTTIDRKRYTSTKEVLDATLIHQSITGLYETRIDLSQLGGDGGPAPGGGEAAAKGGMDPLQLLQPLEAEIKGTKLKAHWNSGATITCVPEAFLEDERPIQTMLIKTIHGEKQQDVYYLTFKVQGRKVEAEVLASPYDYILLNPSDVPWLMKKPLQLTVLVPLHEYQERLLQQTALPKEQKELLQKLFLKYDALWQHWENQVGHRRIKPHNIATGTLAPRPQKQYPINPKAKPSIQIVIDDLLKQGVLIQQNSTMNTPVYPVPKPDGKWRMVLDYREVNKTIPLIAAQNQHSAGILSSIYRGKYKTTLDLTNGFWAHPITPESYWLTAFTWQGKQYCWTRLPQGFLNSPALFTADVVDLLKEIPNVQAYVDDIYISHDDPQEHLEQLEKIFSILLNAGYVVSLKKSEIAQREVEFLGFNITKEGRGLTDTFKQKLLNITPPKDLKQLQSILGLLNFARNFIPNYSELVKPLYTIVANANGKFISWTEDNSNQLQHIISVLNQADNLEERNPETRLIIKVNSSPSAGYIRYYNEGSKRPIMYVNYIFSKAEAKFTQTEKLLTTMHKGLIKAMDLAMGQEILVYSPIVSMTKIQRTPLPERKALPVRWITWMTYLEDPRIQFHYDKSLPELQQIPNVTEDVIAKTKHPSEFAMVFYTDGSAIKHPDVNKSHSAGMGIAQVQFIPEYKIVHQWSIPLGDHTAQLAEIAAVEFACKKALKISGPVLIVTDSFYVAESANKELPYWKSNGFLNNKKKPLRHVSKWKSIAECLQLKPDIIIMHEKGHQQPMTTLHTEGNNLADKLATQGSYVVHAGKRTADGSEFEKRTADGSEFESPKKKAKVE

SEQ ID NO: 425 - protein, 2174 aa, synthetic construct
MPAAKRVKLDGGDKKYSIGLDIGTNSVGWAVITDEYKVPSKKFKVLGNTDRHSIKKNLIGALLFDSGETAEATRLKRTARRRYTRRKNRICYLQEIFSNEMAKVDDSFFHRLEESFLVEEDKKHERHPIFGNIVDEVAYHEKYPTIYHLRKKLVDSTDKADLRLIYLALAHMIKFRGHFLIEGDLNPDNSDVDKLFIQLVQTYNQLFEENPINASGVDAKAILSARLSKSRRLENLIAQLPGEKKNGLFGNLIALSLGLTPNFKSNFDLAEDAKLQLSKDTYDDDLDNLLAQIGDQYADLFLAAKNLSDAILLSDILRVNTEITKAPLSASMIKRYDEHHQDLTLLKALVRQQLPEKYKEIFFDQSKNGYAGYIDGGASQEEFYKFIKPILEKMDGTEELLVKLNREDLLRKQRTFDNGSIPHQIHLGELHAILRRQEDFYPFLKDNREKIEKILTFRIPYYVGPLARGNSRFAWMTRKSEETITPWNFEEVVDKGASAQSFIERMTNFDKNLPNEKVLPKHSLLYEYFTVYNELTKVKYVTEGMRKPAFLSGEQKKAIVDLLFKTNRKVTVKQLKEDYFKKIECFDSVEISGVEDRFNASLGTYHDLLKIIKDKDFLDNEENEDILEDIVLTLTLFEDREMIEERLKTYAHLFDDKVMKQLKRRRYTGWGRLSRKLINGIRDKQSGKTILDFLKSDGFANRNFMQLIHDDSLTFKEDIQKAQVSGQGDSLHEHIANLAGSPAIKKGILQTVKVVDELVKVMGRHKPENIVIEMARENQTTQKGQKNSRERMKRIEEGIKELGSQILKEHPVENTQLQNEKLYLYYLQNGRDMYVDQELDINRLSDYDVDHIVPQSFLKDDSIDNKVLTRSDKARGKSDNVPSEEVVKKMKNYWRQLLNAKLITQRKFDNLTKAERGGLSELDKAGFIKRQLVETRQITKHVAQILDSRMNTKYDENDKLIREVKVITLKSKLVSDFRKDFQFYKVREINNYHHAHDAYLNAVVGTALIKKYPKLESEFVYGDYKVYDVRKMIAKSEQEIGKATAKYFFYSNIMNFFKTEITLANGEIRKRPLIETNGETGEIVWDKGRDFATVRKVLSMPQVNIVKKTEVQTGGFSKESILPKRNSDKLIARKKDWDPKKYGGFDSPTVAYSVLVVAKVEKGKSKKLKSVKELLGITIMERSSFEKNPIDFLEAKGYKEVKKDLIIKLPKYSLFELENGRKRMLASAGELQKGNELALPSKYVNFLYLASHYEKLKGSPEDNEQKQLFVEQHKHYLDEIIEQISEFSKRVILADANLDKVLSAYNKHRDKPIREQAENIIHLFTLTNLGAPAAFKYFDTTIDRKRYTSTKEVLDATLIHQSITGLYETRIDLSQLGGDGGGGSGGSGGSGGMDPLQLLQPLEAEIKGTKLKAHWNSGATITCVPEAFLEDERPIQTMLIKTIHGEKQQDVYYLTFKVQGRKVEAEVLASPYDYILLNPSDVPWLMKKPLQLTVLVPLHEYQERLLQQTALPKEQKELLQKLFLKYDALWQHWENQVGHRRIKPHNIATGTLAPRPQKQYPINPKAKPSIQIVIDDLLKQGVLIQQNSTMNTPVYPVPKPDGKWRMVLDYREVNKTIPLIAAQNQHSAGILSSIYRGKYKTTLDLTNGFWAHPITPESYWLTAFTWQGKQYCWTRLPQGFLNSPALFTADVVDLLKEIPNVQAYVDDIYISHDDPQEHLEQLEKIFSILLNAGYVVSLKKSEIAQREVEFLGFNITKEGRGLTDTFKQKLLNITPPKDLKQLQSILGLLNFARNFIPNYSELVKPLYTIVANANGKFISWTEDNSNQLQHIISVLNQADNLEERNPETRLIIKVNSSPSAGYIRYYNEGSKRPIMYVNYIFSKAEAKFTQTEKLLTTMHKGLIKAMDLAMGQEILVYSPIVSMTKIQRTPLPERKALPVRWITWMTYLEDPRIQFHYDKSLPELQQIPNVTEDVIAKTKHPSEFAMVFYTDGSAIKHPDVNKSHSAGMGIAQVQFIPEYKIVHQWSIPLGDHTAQLAEIAAVEFACKKALKISGPVLIVTDSFYVAESANKELPYWKSNGFLNNKKKPLRHVSKWKSIAECLQLKPDIIIMHEKGHQQPMTTLHTEGNNLADKLATQGSYVVHAGKRTADGSEFEKRTADGSEFESPKKKAKVE

SEQ ID NO: 426 - protein, 2094 aa, synthetic construct
MPAAKRVKLDGGDKKYSIGLDIGTNSVGWAVITDEYKVPSKKFKVLGNTDRHSIKKNLIGALLFDSGETAEATRLKRTARRRYTRRKNRICYLQEIFSNEMAKVDDSFFHRLEESFLVEEDKKHERHPIFGNIVDEVAYHEKYPTIYHLRKKLVDSTDKADLRLIYLALAHMIKFRGHFLIEGDLNPDNSDVDKLFIQLVQTYNQLFEENPINASGVDAKAILSARLSKSRRLENLIAQLPGEKKNGLFGNLIALSLGLTPNFKSNFDLAEDAKLQLSKDTYDDDLDNLLAQIGDQYADLFLAAKNLSDAILLSDILRVNTEITKAPLSASMIKRYDEHHQDLTLLKALVRQQLPEKYKEIFFDQSKNGYAGYIDGGASQEEFYKFIKPILEKMDGTEELLVKLNREDLLRKQRTFDNGSIPHQIHLGELHAILRRQEDFYPFLKDNREKIEKILTFRIPYYVGPLARGNSRFAWMTRKSEETITPWNFEEVVDKGASAQSFIERMTNFDKNLPNEKVLPKHSLLYEYFTVYNELTKVKYVTEGMRKPAFLSGEQKKAIVDLLFKTNRKVTVKQLKEDYFKKIECFDSVEISGVEDRFNASLGTYHDLLKIIKDKDFLDNEENEDILEDIVLTLTLFEDREMIEERLKTYAHLFDDKVMKQLKRRRYTGWGRLSRKLINGIRDKQSGKTILDFLKSDGFANRNFMQLIHDDSLTFKEDIQKAQVSGQGDSLHEHIANLAGSPAIKKGILQTVKVVDELVKVMGRHKPENIVIEMARENQTTQKGQKNSRERMKRIEEGIKELGSQILKEHPVENTQLQNEKLYLYYLQNGRDMYVDQELDINRLSDYDVDHIVPQSFLKDDSIDNKVLTRSDKARGKSDNVPSEEVVKKMKNYWRQLLNAKLITQRKFDNLTKAERGGLSELDKAGFIKRQLVETRQITKHVAQILDSRMNTKYDENDKLIREVKVITLKSKLVSDFRKDFQFYKVREINNYHHAHDAYLNAVVGTALIKKYPKLESEFVYGDYKVYDVRKMIAKSEQEIGKATAKYFFYSNIMNFFKTEITLANGEIRKRPLIETNGETGEIVWDKGRDFATVRKVLSMPQVNIVKKTEVQTGGFSKESILPKRNSDKLIARKKDWDPKKYGGFDSPTVAYSVLVVAKVEKGKSKKLKSVKELLGITIMERSSFEKNPIDFLEAKGYKEVKKDLIIKLPKYSLFELENGRKRMLASAGELQKGNELALPSKYVNFLYLASHYEKLKGSPEDNEQKQLFVEQHKHYLDEIIEQISEFSKRVILADANLDKVLSAYNKHRDKPIREQAENIIHLFTLTNLGAPAAFKYFDTTIDRKRYTSTKEVLDATLIHQSITGLYETRIDLSQLGGDGGGSSGSSGSSGSSGSSGSSGGVPWLMKKPLQLTVLVPLHEYQERLLQQTALPKEQKELLQKLFLKYDALWQHWENQVGHRRIKPHNIATGTLAPRPQKQYPINPKAKPSIQIVIDDLLKQGVLIQQNSTMNTPVYPVPKPDGKWRMVLDYREVNKTIPLIAAQNQHSAGILSSIYRGKYKTTLDLTNGFWAHPITPESYWLTAFTWQGKQYCWTRLPQGFLNSPALFTADVVDLLKEIPNVQAYVDDIYISHDDPQEHLEQLEKIFSILLNAGYVVSLKKSEIAQREVEFLGFNITKEGRGLTDTFKQKLLNITPPKDLKQLQSILGLLNFARNFIPNYSELVKPLYTIVANANGKFISWTEDNSNQLQHIISVLNQADNLEERNPETRLIIKVNSSPSAGYIRYYNEGSKRPIMYVNYIFSKAEAKFTQTEKLLTTMHKGLIKAMDLAMGQEILVYSPIVSMTKIQRTPLPERKALPVRWITWMTYLEDPRIQFHYDKSLPELQQIPNVTEDVIAKTKHPSEFAMVFYTDGSAIKHPDVNKSHSAGMGIAQVQFIPEYKIVHQWSIPLGDHTAQLAEIAAVEFACKKALKISGPVLIVTDSFYVAESANKELPYWKSNGFLNNKKKPLRHVSKWKSIAECLQLKPDIIIMHEKGHQQPMTTLHTEGNNLADKLATQGSYVVHAGKRTADGSEFEKRTADGSEFESPKKKAKVE

SEQ ID NO: 427 - protein, 2087 aa, synthetic construct
MPAAKRVKLDGGDKKYSIGLDIGTNSVGWAVITDEYKVPSKKFKVLGNTDRHSIKKNLIGALLFDSGETAEATRLKRTARRRYTRRKNRICYLQEIFSNEMAKVDDSFFHRLEESFLVEEDKKHERHPIFGNIVDEVAYHEKYPTIYHLRKKLVDSTDKADLRLIYLALAHMIKFRGHFLIEGDLNPDNSDVDKLFIQLVQTYNQLFEENPINASGVDAKAILSARLSKSRRLENLIAQLPGEKKNGLFGNLIALSLGLTPNFKSNFDLAEDAKLQLSKDTYDDDLDNLLAQIGDQYADLFLAAKNLSDAILLSDILRVNTEITKAPLSASMIKRYDEHHQDLTLLKALVRQQLPEKYKEIFFDQSKNGYAGYIDGGASQEEFYKFIKPILEKMDGTEELLVKLNREDLLRKQRTFDNGSIPHQIHLGELHAILRRQEDFYPFLKDNREKIEKILTFRIPYYVGPLARGNSRFAWMTRKSEETITPWNFEEVVDKGASAQSFIERMTNFDKNLPNEKVLPKHSLLYEYFTVYNELTKVKYVTEGMRKPAFLSGEQKKAIVDLLFKTNRKVTVKQLKEDYFKKIECFDSVEISGVEDRFNASLGTYHDLLKIIKDKDFLDNEENEDILEDIVLTLTLFEDREMIEERLKTYAHLFDDKVMKQLKRRRYTGWGRLSRKLINGIRDKQSGKTILDFLKSDGFANRNFMQLIHDDSLTFKEDIQKAQVSGQGDSLHEHIANLAGSPAIKKGILQTVKVVDELVKVMGRHKPENIVIEMARENQTTQKGQKNSRERMKRIEEGIKELGSQILKEHPVENTQLQNEKLYLYYLQNGRDMYVDQELDINRLSDYDVDHIVPQSFLKDDSIDNKVLTRSDKARGKSDNVPSEEVVKKMKNYWRQLLNAKLITQRKFDNLTKAERGGLSELDKAGFIKRQLVETRQITKHVAQILDSRMNTKYDENDKLIREVKVITLKSKLVSDFRKDFQFYKVREINNYHHAHDAYLNAVVGTALIKKYPKLESEFVYGDYKVYDVRKMIAKSEQEIGKATAKYFFYSNIMNFFKTEITLANGEIRKRPLIETNGETGEIVWDKGRDFATVRKVLSMPQVNIVKKTEVQTGGFSKESILPKRNSDKLIARKKDWDPKKYGGFDSPTVAYSVLVVAKVEKGKSKKLKSVKELLGITIMERSSFEKNPIDFLEAKGYKEVKKDLIIKLPKYSLFELENGRKRMLASAGELQKGNELALPSKYVNFLYLASHYEKLKGSPEDNEQKQLFVEQHKHYLDEIIEQISEFSKRVILADANLDKVLSAYNKHRDKPIREQAENIIHLFTLTNLGAPAAFKYFDTTIDRKRYTSTKEVLDATLIHQSITGLYETRIDLSQLGGDGGPAPEAAAKGSSGGVPWLMKKPLQLTVLVPLHEYQERLLQQTALPKEQKELLQKLFLKYDALWQHWENQVGHRRIKPHNIATGTLAPRPQKQYPINPKAKPSIQIVIDDLLKQGVLIQQNSTMNTPVYPVPKPDGKWRMVLDYREVNKTIPLIAAQNQHSAGILSSIYRGKYKTTLDLTNGFWAHPITPESYWLTAFTWQGKQYCWTRLPQGFLNSPALFTADVVDLLKEIPNVQAYVDDIYISHDDPQEHLEQLEKIFSILLNAGYVVSLKKSEIAQREVEFLGFNITKEGRGLTDTFKQKLLNITPPKDLKQLQSILGLLNFARNFIPNYSELVKPLYTIVANANGKFISWTEDNSNQLQHIISVLNQADNLEERNPETRLIIKVNSSPSAGYIRYYNEGSKRPIMYVNYIFSKAEAKFTQTEKLLTTMHKGLIKAMDLAMGQEILVYSPIVSMTKIQRTPLPERKALPVRWITWMTYLEDPRIQFHYDKSLPELQQIPNVTEDVIAKTKHPSEFAMVFYTDGSAIKHPDVNKSHSAGMGIAQVQFIPEYKIVHQWSIPLGDHTAQLAEIAAVEFACKKALKISGPVLIVTDSFYVAESANKELPYWKSNGFLNNKKKPLRHVSKWKSIAECLQLKPDIIIMHEKGHQQPMTTLHTEGNNLADKLATQGSYVVHAGKRTADGSEFEKRTADGSEFESPKKKAKVE

SEQ ID NO: 428 - protein, 2091 aa, synthetic construct
MPAAKRVKLDGGDKKYSIGLDIGTNSVGWAVITDEYKVPSKKFKVLGNTDRHSIKKNLIGALLFDSGETAEATRLKRTARRRYTRRKNRICYLQEIFSNEMAKVDDSFFHRLEESFLVEEDKKHERHPIFGNIVDEVAYHEKYPTIYHLRKKLVDSTDKADLRLIYLALAHMIKFRGHFLIEGDLNPDNSDVDKLFIQLVQTYNQLFEENPINASGVDAKAILSARLSKSRRLENLIAQLPGEKKNGLFGNLIALSLGLTPNFKSNFDLAEDAKLQLSKDTYDDDLDNLLAQIGDQYADLFLAAKNLSDAILLSDILRVNTEITKAPLSASMIKRYDEHHQDLTLLKALVRQQLPEKYKEIFFDQSKNGYAGYIDGGASQEEFYKFIKPILEKMDGTEELLVKLNREDLLRKQRTFDNGSIPHQIHLGELHAILRRQEDFYPFLKDNREKIEKILTFRIPYYVGPLARGNSRFAWMTRKSEETITPWNFEEVVDKGASAQSFIERMTNFDKNLPNEKVLPKHSLLYEYFTVYNELTKVKYVTEGMRKPAFLSGEQKKAIVDLLFKTNRKVTVKQLKEDYFKKIECFDSVEISGVEDRFNASLGTYHDLLKIIKDKDFLDNEENEDILEDIVLTLTLFEDREMIEERLKTYAHLFDDKVMKQLKRRRYTGWGRLSRKLINGIRDKQSGKTILDFLKSDGFANRNFMQLIHDDSLTFKEDIQKAQVSGQGDSLHEHIANLAGSPAIKKGILQTVKVVDELVKVMGRHKPENIVIEMARENQTTQKGQKNSRERMKRIEEGIKELGSQILKEHPVENTQLQNEKLYLYYLQNGRDMYVDQELDINRLSDYDVDHIVPQSFLKDDSIDNKVLTRSDKARGKSDNVPSEEVVKKMKNYWRQLLNAKLITQRKFDNLTKAERGGLSELDKAGFIKRQLVETRQITKHVAQILDSRMNTKYDENDKLIREVKVITLKSKLVSDFRKDFQFYKVREINNYHHAHDAYLNAVVGTALIKKYPKLESEFVYGDYKVYDVRKMIAKSEQEIGKATAKYFFYSNIMNFFKTEITLANGEIRKRPLIETNGETGEIVWDKGRDFATVRKVLSMPQVNIVKKTEVQTGGFSKESILPKRNSDKLIARKKDWDPKKYGGFDSPTVAYSVLVVAKVEKGKSKKLKSVKELLGITIMERSSFEKNPIDFLEAKGYKEVKKDLIIKLPKYSLFELENGRKRMLASAGELQKGNELALPSKYVNFLYLASHYEKLKGSPEDNEQKQLFVEQHKHYLDEIIEQISEFSKRVILADANLDKVLSAYNKHRDKPIREQAENIIHLFTLTNLGAPAAFKYFDTTIDRKRYTSTKEVLDATLIHQSITGLYETRIDLSQLGGDGGGSSGSSGSSGSSGSSGGVPWLMKKPLQLTVLVPLHEYQERLLQQTALPKEQKELLQKLFLKYDALWQHWENQVGHRRIKPHNIATGTLAPRPQKQYPINPKAKPSIQIVIDDLLKQGVLIQQNSTMNTPVYPVPKPDGKWRMVLDYREVNKTIPLIAAQNQHSAGILSSIYRGKYKTTLDLTNGFWAHPITPESYWLTAFTWQGKQYCWTRLPQGFLNSPALFTADVVDLLKEIPNVQAYVDDIYISHDDPQEHLEQLEKIFSILLNAGYVVSLKKSEIAQREVEFLGFNITKEGRGLTDTFKQKLLNITPPKDLKQLQSILGLLNFARNFIPNYSELVKPLYTIVANANGKFISWTEDNSNQLQHIISVLNQADNLEERNPETRLIIKVNSSPSAGYIRYYNEGSKRPIMYVNYIFSKAEAKFTQTEKLLTTMHKGLIKAMDLAMGQEILVYSPIVSMTKIQRTPLPERKALPVRWITWMTYLEDPRIQFHYDKSLPELQQIPNVTEDVIAKTKHPSEFAMVFYTDGSAIKHPDVNKSHSAGMGIAQVQFIPEYKIVHQWSIPLGDHTAQLAEIAAVEFACKKALKISGPVLIVTDSFYVAESANKELPYWKSNGFLNNKKKPLRHVSKWKSIAECLQLKPDIIIMHEKGHQQPMTTLHTEGNNLADKLATQGSYVVHAGKRTADGSEFEKRTADGSEFESPKKKAKVE

SEQ ID NO: 429 - protein, 2084 aa, synthetic construct
MPAAKRVKLDGGDKKYSIGLDIGTNSVGWAVITDEYKVPSKKFKVLGNTDRHSIKKNLIGALLFDSGETAEATRLKRTARRRYTRRKNRICYLQEIFSNEMAKVDDSFFHRLEESFLVEEDKKHERHPIFGNIVDEVAYHEKYPTIYHLRKKLVDSTDKADLRLIYLALAHMIKFRGHFLIEGDLNPDNSDVDKLFIQLVQTYNQLFEENPINASGVDAKAILSARLSKSRRLENLIAQLPGEKKNGLFGNLIALSLGLTPNFKSNFDLAEDAKLQLSKDTYDDDLDNLLAQIGDQYADLFLAAKNLSDAILLSDILRVNTEITKAPLSASMIKRYDEHHQDLTLLKALVRQQLPEKYKEIFFDQSKNGYAGYIDGGASQEEFYKFIKPILEKMDGTEELLVKLNREDLLRKQRTFDNGSIPHQIHLGELHAILRRQEDFYPFLKDNREKIEKILTFRIPYYVGPLARGNSRFAWMTRKSEETITPWNFEEVVDKGASAQSFIERMTNFDKNLPNEKVLPKHSLLYEYFTVYNELTKVKYVTEGMRKPAFLSGEQKKAIVDLLFKTNRKVTVKQLKEDYFKKIECFDSVEISGVEDRFNASLGTYHDLLKIIKDKDFLDNEENEDILEDIVLTLTLFEDREMIEERLKTYAHLFDDKVMKQLKRRRYTGWGRLSRKLINGIRDKQSGKTILDFLKSDGFANRNFMQLIHDDSLTFKEDIQKAQVSGQGDSLHEHIANLAGSPAIKKGILQTVKVVDELVKVMGRHKPENIVIEMARENQTTQKGQKNSRERMKRIEEGIKELGSQILKEHPVENTQLQNEKLYLYYLQNGRDMYVDQELDINRLSDYDVDHIVPQSFLKDDSIDNKVLTRSDKARGKSDNVPSEEVVKKMKNYWRQLLNAKLITQRKFDNLTKAERGGLSELDKAGFIKRQLVETRQITKHVAQILDSRMNTKYDENDKLIREVKVITLKSKLVSDFRKDFQFYKVREINNYHHAHDAYLNAVVGTALIKKYPKLESEFVYGDYKVYDVRKMIAKSEQEIGKATAKYFFYSNIMNFFKTEITLANGEIRKRPLIETNGETGEIVWDKGRDFATVRKVLSMPQVNIVKKTEVQTGGFSKESILPKRNSDKLIARKKDWDPKKYGGFDSPTVAYSVLVVAKVEKGKSKKLKSVKELLGITIMERSSFEKNPIDFLEAKGYKEVKKDLIIKLPKYSLFELENGRKRMLASAGELQKGNELALPSKYVNFLYLASHYEKLKGSPEDNEQKQLFVEQHKHYLDEIIEQISEFSKRVILADANLDKVLSAYNKHRDKPIREQAENIIHLFTLTNLGAPAAFKYFDTTIDRKRYTSTKEVLDATLIHQSITGLYETRIDLSQLGGDGGGGGGGGGGGGVPWLMKKPLQLTVLVPLHEYQERLLQQTALPKEQKELLQKLFLKYDALWQHWENQVGHRRIKPHNIATGTLAPRPQKQYPINPKAKPSIQIVIDDLLKQGVLIQQNSTMNTPVYPVPKPDGKWRMVLDYREVNKTIPLIAAQNQHSAGILSSIYRGKYKTTLDLTNGFWAHPITPESYWLTAFTWQGKQYCWTRLPQGFLNSPALFTADVVDLLKEIPNVQAYVDDIYISHDDPQEHLEQLEKIFSILLNAGYVVSLKKSEIAQREVEFLGFNITKEGRGLTDTFKQKLLNITPPKDLKQLQSILGLLNFARNFIPNYSELVKPLYTIVANANGKFISWTEDNSNQLQHIISVLNQADNLEERNPETRLIIKVNSSPSAGYIRYYNEGSKRPIMYVNYIFSKAEAKFTQTEKLLTTMHKGLIKAMDLAMGQEILVYSPIVSMTKIQRTPLPERKALPVRWITWMTYLEDPRIQFHYDKSLPELQQIPNVTEDVIAKTKHPSEFAMVFYTDGSAIKHPDVNKSHSAGMGIAQVQFIPEYKIVHQWSIPLGDHTAQLAEIAAVEFACKKALKISGPVLIVTDSFYVAESANKELPYWKSNGFLNNKKKPLRHVSKWKSIAECLQLKPDIIIMHEKGHQQPMTTLHTEGNNLADKLATQGSYVVHAGKRTADGSEFEKRTADGSEFESPKKKAKVE

SEQ ID NO: 430 - protein, 2084 aa, synthetic construct
MPAAKRVKLDGGDKKYSIGLDIGTNSVGWAVITDEYKVPSKKFKVLGNTDRHSIKKNLIGALLFDSGETAEATRLKRTARRRYTRRKNRICYLQEIFSNEMAKVDDSFFHRLEESFLVEEDKKHERHPIFGNIVDEVAYHEKYPTIYHLRKKLVDSTDKADLRLIYLALAHMIKFRGHFLIEGDLNPDNSDVDKLFIQLVQTYNQLFEENPINASGVDAKAILSARLSKSRRLENLIAQLPGEKKNGLFGNLIALSLGLTPNFKSNFDLAEDAKLQLSKDTYDDDLDNLLAQIGDQYADLFLAAKNLSDAILLSDILRVNTEITKAPLSASMIKRYDEHHQDLTLLKALVRQQLPEKYKEIFFDQSKNGYAGYIDGGASQEEFYKFIKPILEKMDGTEELLVKLNREDLLRKQRTFDNGSIPHQIHLGELHAILRRQEDFYPFLKDNREKIEKILTFRIPYYVGPLARGNSRFAWMTRKSEETITPWNFEEVVDKGASAQSFIERMTNFDKNLPNEKVLPKHSLLYEYFTVYNELTKVKYVTEGMRKPAFLSGEQKKAIVDLLFKTNRKVTVKQLKEDYFKKIECFDSVEISGVEDRFNASLGTYHDLLKIIKDKDFLDNEENEDILEDIVLTLTLFEDREMIEERLKTYAHLFDDKVMKQLKRRRYTGWGRLSRKLINGIRDKQSGKTILDFLKSDGFANRNFMQLIHDDSLTFKEDIQKAQVSGQGDSLHEHIANLAGSPAIKKGILQTVKVVDELVKVMGRHKPENIVIEMARENQTTQKGQKNSRERMKRIEEGIKELGSQILKEHPVENTQLQNEKLYLYYLQNGRDMYVDQELDINRLSDYDVDHIVPQSFLKDDSIDNKVLTRSDKARGKSDNVPSEEVVKKMKNYWRQLLNAKLITQRKFDNLTKAERGGLSELDKAGFIKRQLVETRQITKHVAQILDSRMNTKYDENDKLIREVKVITLKSKLVSDFRKDFQFYKVREINNYHHAHDAYLNAVVGTALIKKYPKLESEFVYGDYKVYDVRKMIAKSEQEIGKATAKYFFYSNIMNFFKTEITLANGEIRKRPLIETNGETGEIVWDKGRDFATVRKVLSMPQVNIVKKTEVQTGGFSKESILPKRNSDKLIARKKDWDPKKYGGFDSPTVAYSVLVVAKVEKGKSKKLKSVKELLGITIMERSSFEKNPIDFLEAKGYKEVKKDLIIKLPKYSLFELENGRKRMLASAGELQKGNELALPSKYVNFLYLASHYEKLKGSPEDNEQKQLFVEQHKHYLDEIIEQISEFSKRVILADANLDKVLSAYNKHRDKPIREQAENIIHLFTLTNLGAPAAFKYFDTTIDRKRYTSTKEVLDATLIHQSITGLYETRIDLSQLGGDGGPAPEAAAKGGVPWLMKKPLQLTVLVPLHEYQERLLQQTALPKEQKELLQKLFLKYDALWQHWENQVGHRRIKPHNIATGTLAPRPQKQYPINPKAKPSIQIVIDDLLKQGVLIQQNSTMNTPVYPVPKPDGKWRMVLDYREVNKTIPLIAAQNQHSAGILSSIYRGKYKTTLDLTNGFWAHPITPESYWLTAFTWQGKQYCWTRLPQGFLNSPALFTADVVDLLKEIPNVQAYVDDIYISHDDPQEHLEQLEKIFSILLNAGYVVSLKKSEIAQREVEFLGFNITKEGRGLTDTFKQKLLNITPPKDLKQLQSILGLLNFARNFIPNYSELVKPLYTIVANANGKFISWTEDNSNQLQHIISVLNQADNLEERNPETRLIIKVNSSPSAGYIRYYNEGSKRPIMYVNYIFSKAEAKFTQTEKLLTTMHKGLIKAMDLAMGQEILVYSPIVSMTKIQRTPLPERKALPVRWITWMTYLEDPRIQFHYDKSLPELQQIPNVTEDVIAKTKHPSEFAMVFYTDGSAIKHPDVNKSHSAGMGIAQVQFIPEYKIVHQWSIPLGDHTAQLAEIAAVEFACKKALKISGPVLIVTDSFYVAESANKELPYWKSNGFLNNKKKPLRHVSKWKSIAECLQLKPDIIIMHEKGHQQPMTTLHTEGNNLADKLATQGSYVVHAGKRTADGSEFEKRTADGSEFESPKKKAKVE

SEQ ID NO: 431 - protein, 2082 aa, synthetic construct
MPAAKRVKLDGGDKKYSIGLDIGTNSVGWAVITDEYKVPSKKFKVLGNTDRHSIKKNLIGALLFDSGETAEATRLKRTARRRYTRRKNRICYLQEIFSNEMAKVDDSFFHRLEESFLVEEDKKHERHPIFGNIVDEVAYHEKYPTIYHLRKKLVDSTDKADLRLIYLALAHMIKFRGHFLIEGDLNPDNSDVDKLFIQLVQTYNQLFEENPINASGVDAKAILSARLSKSRRLENLIAQLPGEKKNGLFGNLIALSLGLTPNFKSNFDLAEDAKLQLSKDTYDDDLDNLLAQIGDQYADLFLAAKNLSDAILLSDILRVNTEITKAPLSASMIKRYDEHHQDLTLLKALVRQQLPEKYKEIFFDQSKNGYAGYIDGGASQEEFYKFIKPILEKMDGTEELLVKLNREDLLRKQRTFDNGSIPHQIHLGELHAILRRQEDFYPFLKDNREKIEKILTFRIPYYVGPLARGNSRFAWMTRKSEETITPWNFEEVVDKGASAQSFIERMTNFDKNLPNEKVLPKHSLLYEYFTVYNELTKVKYVTEGMRKPAFLSGEQKKAIVDLLFKTNRKVTVKQLKEDYFKKIECFDSVEISGVEDRFNASLGTYHDLLKIIKDKDFLDNEENEDILEDIVLTLTLFEDREMIEERLKTYAHLFDDKVMKQLKRRRYTGWGRLSRKLINGIRDKQSGKTILDFLKSDGFANRNFMQLIHDDSLTFKEDIQKAQVSGQGDSLHEHIANLAGSPAIKKGILQTVKVVDELVKVMGRHKPENIVIEMARENQTTQKGQKNSRERMKRIEEGIKELGSQILKEHPVENTQLQNEKLYLYYLQNGRDMYVDQELDINRLSDYDVDHIVPQSFLKDDSIDNKVLTRSDKARGKSDNVPSEEVVKKMKNYWRQLLNAKLITQRKFDNLTKAERGGLSELDKAGFIKRQLVETRQITKHVAQILDSRMNTKYDENDKLIREVKVITLKSKLVSDFRKDFQFYKVREINNYHHAHDAYLNAVVGTALIKKYPKLESEFVYGDYKVYDVRKMIAKSEQEIGKATAKYFFYSNIMNFFKTEITLANGEIRKRPLIETNGETGEIVWDKGRDFATVRKVLSMPQVNIVKKTEVQTGGFSKESILPKRNSDKLIARKKDWDPKKYGGFDSPTVAYSVLVVAKVEKGKSKKLKSVKELLGITIMERSSFEKNPIDFLEAKGYKEVKKDLIIKLPKYSLFELENGRKRMLASAGELQKGNELALPSKYVNFLYLASHYEKLKGSPEDNEQKQLFVEQHKHYLDEIIEQISEFSKRVILADANLDKVLSAYNKHRDKPIREQAENIIHLFTLTNLGAPAAFKYFDTTIDRKRYTSTKEVLDATLIHQSITGLYETRIDLSQLGGDGGGGGGGGGGVPWLMKKPLQLTVLVPLHEYQERLLQQTALPKEQKELLQKLFLKYDALWQHWENQVGHRRIKPHNIATGTLAPRPQKQYPINPKAKPSIQIVIDDLLKQGVLIQQNSTMNTPVYPVPKPDGKWRMVLDYREVNKTIPLIAAQNQHSAGILSSIYRGKYKTTLDLTNGFWAHPITPESYWLTAFTWQGKQYCWTRLPQGFLNSPALFTADVVDLLKEIPNVQAYVDDIYISHDDPQEHLEQLEKIFSILLNAGYVVSLKKSEIAQREVEFLGFNITKEGRGLTDTFKQKLLNITPPKDLKQLQSILGLLNFARNFIPNYSELVKPLYTIVANANGKFISWTEDNSNQLQHIISVLNQADNLEERNPETRLIIKVNSSPSAGYIRYYNEGSKRPIMYVNYIFSKAEAKFTQTEKLLTTMHKGLIKAMDLAMGQEILVYSPIVSMTKIQRTPLPERKALPVRWITWMTYLEDPRIQFHYDKSLPELQQIPNVTEDVIAKTKHPSEFAMVFYTDGSAIKHPDVNKSHSAGMGIAQVQFIPEYKIVHQWSIPLGDHTAQLAEIAAVEFACKKALKISGPVLIVTDSFYVAESANKELPYWKSNGFLNNKKKPLRHVSKWKSIAECLQLKPDIIIMHEKGHQQPMTTLHTEGNNLADKLATQGSYVVHAGKRTADGSEFEKRTADGSEFESPKKKAKVE

SEQ ID NO: 432 - protein, 2087 aa, synthetic construct
MPAAKRVKLDGGDKKYSIGLDIGTNSVGWAVITDEYKVPSKKFKVLGNTDRHSIKKNLIGALLFDSGETAEATRLKRTARRRYTRRKNRICYLQEIFSNEMAKVDDSFFHRLEESFLVEEDKKHERHPIFGNIVDEVAYHEKYPTIYHLRKKLVDSTDKADLRLIYLALAHMIKFRGHFLIEGDLNPDNSDVDKLFIQLVQTYNQLFEENPINASGVDAKAILSARLSKSRRLENLIAQLPGEKKNGLFGNLIALSLGLTPNFKSNFDLAEDAKLQLSKDTYDDDLDNLLAQIGDQYADLFLAAKNLSDAILLSDILRVNTEITKAPLSASMIKRYDEHHQDLTLLKALVRQQLPEKYKEIFFDQSKNGYAGYIDGGASQEEFYKFIKPILEKMDGTEELLVKLNREDLLRKQRTFDNGSIPHQIHLGELHAILRRQEDFYPFLKDNREKIEKILTFRIPYYVGPLARGNSRFAWMTRKSEETITPWNFEEVVDKGASAQSFIERMTNFDKNLPNEKVLPKHSLLYEYFTVYNELTKVKYVTEGMRKPAFLSGEQKKAIVDLLFKTNRKVTVKQLKEDYFKKIECFDSVEISGVEDRFNASLGTYHDLLKIIKDKDFLDNEENEDILEDIVLTLTLFEDREMIEERLKTYAHLFDDKVMKQLKRRRYTGWGRLSRKLINGIRDKQSGKTILDFLKSDGFANRNFMQLIHDDSLTFKEDIQKAQVSGQGDSLHEHIANLAGSPAIKKGILQTVKVVDELVKVMGRHKPENIVIEMARENQTTQKGQKNSRERMKRIEEGIKELGSQILKEHPVENTQLQNEKLYLYYLQNGRDMYVDQELDINRLSDYDVDHIVPQSFLKDDSIDNKVLTRSDKARGKSDNVPSEEVVKKMKNYWRQLLNAKLITQRKFDNLTKAERGGLSELDKAGFIKRQLVETRQITKHVAQILDSRMNTKYDENDKLIREVKVITLKSKLVSDFRKDFQFYKVREINNYHHAHDAYLNAVVGTALIKKYPKLESEFVYGDYKVYDVRKMIAKSEQEIGKATAKYFFYSNIMNFFKTEITLANGEIRKRPLIETNGETGEIVWDKGRDFATVRKVLSMPQVNIVKKTEVQTGGFSKESILPKRNSDKLIARKKDWDPKKYGGFDSPTVAYSVLVVAKVEKGKSKKLKSVKELLGITIMERSSFEKNPIDFLEAKGYKEVKKDLIIKLPKYSLFELENGRKRMLASAGELQKGNELALPSKYVNFLYLASHYEKLKGSPEDNEQKQLFVEQHKHYLDEIIEQISEFSKRVILADANLDKVLSAYNKHRDKPIREQAENIIHLFTLTNLGAPAAFKYFDTTIDRKRYTSTKEVLDATLIHQSITGLYETRIDLSQLGGDGGGGSEAAAKPAPGGVPWLMKKPLQLTVLVPLHEYQERLLQQTALPKEQKELLQKLFLKYDALWQHWENQVGHRRIKPHNIATGTLAPRPQKQYPINPKAKPSIQIVIDDLLKQGVLIQQNSTMNTPVYPVPKPDGKWRMVLDYREVNKTIPLIAAQNQHSAGILSSIYRGKYKTTLDLTNGFWAHPITPESYWLTAFTWQGKQYCWTRLPQGFLNSPALFTADVVDLLKEIPNVQAYVDDIYISHDDPQEHLEQLEKIFSILLNAGYVVSLKKSEIAQREVEFLGFNITKEGRGLTDTFKQKLLNITPPKDLKQLQSILGLLNFARNFIPNYSELVKPLYTIVANANGKFISWTEDNSNQLQHIISVLNQADNLEERNPETRLIIKVNSSPSAGYIRYYNEGSKRPIMYVNYIFSKAEAKFTQTEKLLTTMHKGLIKAMDLAMGQEILVYSPIVSMTKIQRTPLPERKALPVRWITWMTYLEDPRIQFHYDKSLPELQQIPNVTEDVIAKTKHPSEFAMVFYTDGSAIKHPDVNKSHSAGMGIAQVQFIPEYKIVHQWSIPLGDHTAQLAEIAAVEFACKKALKISGPVLIVTDSFYVAESANKELPYWKSNGFLNNKKKPLRHVSKWKSIAECLQLKPDIIIMHEKGHQQPMTTLHTEGNNLADKLATQGSYVVHAGKRTADGSEFEKRTADGSEFESPKKKAKVE

SEQ ID NO: 433 - protein, 2087 aa, synthetic construct
MPAAKRVKLDGGDKKYSIGLDIGTNSVGWAVITDEYKVPSKKFKVLGNTDRHSIKKNLIGALLFDSGETAEATRLKRTARRRYTRRKNRICYLQEIFSNEMAKVDDSFFHRLEESFLVEEDKKHERHPIFGNIVDEVAYHEKYPTIYHLRKKLVDSTDKADLRLIYLALAHMIKFRGHFLIEGDLNPDNSDVDKLFIQLVQTYNQLFEENPINASGVDAKAILSARLSKSRRLENLIAQLPGEKKNGLFGNLIALSLGLTPNFKSNFDLAEDAKLQLSKDTYDDDLDNLLAQIGDQYADLFLAAKNLSDAILLSDILRVNTEITKAPLSASMIKRYDEHHQDLTLLKALVRQQLPEKYKEIFFDQSKNGYAGYIDGGASQEEFYKFIKPILEKMDGTEELLVKLNREDLLRKQRTFDNGSIPHQIHLGELHAILRRQEDFYPFLKDNREKIEKILTFRIPYYVGPLARGNSRFAWMTRKSEETITPWNFEEVVDKGASAQSFIERMTNFDKNLPNEKVLPKHSLLYEYFTVYNELTKVKYVTEGMRKPAFLSGEQKKAIVDLLFKTNRKVTVKQLKEDYFKKIECFDSVEISGVEDRFNASLGTYHDLLKIIKDKDFLDNEENEDILEDIVLTLTLFEDREMIEERLKTYAHLFDDKVMKQLKRRRYTGWGRLSRKLINGIRDKQSGKTILDFLKSDGFANRNFMQLIHDDSLTFKEDIQKAQVSGQGDSLHEHIANLAGSPAIKKGILQTVKVVDELVKVMGRHKPENIVIEMARENQTTQKGQKNSRERMKRIEEGIKELGSQILKEHPVENTQLQNEKLYLYYLQNGRDMYVDQELDINRLSDYDVDHIVPQSFLKDDSIDNKVLTRSDKARGKSDNVPSEEVVKKMKNYWRQLLNAKLITQRKFDNLTKAERGGLSELDKAGFIKRQLVETRQITKHVAQILDSRMNTKYDENDKLIREVKVITLKSKLVSDFRKDFQFYKVREINNYHHAHDAYLNAVVGTALIKKYPKLESEFVYGDYKVYDVRKMIAKSEQEIGKATAKYFFYSNIMNFFKTEITLANGEIRKRPLIETNGETGEIVWDKGRDFATVRKVLSMPQVNIVKKTEVQTGGFSKESILPKRNSDKLIARKKDWDPKKYGGFDSPTVAYSVLVVAKVEKGKSKKLKSVKELLGITIMERSSFEKNPIDFLEAKGYKEVKKDLIIKLPKYSLFELENGRKRMLASAGELQKGNELALPSKYVNFLYLASHYEKLKGSPEDNEQKQLFVEQHKHYLDEIIEQISEFSKRVILADANLDKVLSAYNKHRDKPIREQAENIIHLFTLTNLGAPAAFKYFDTTIDRKRYTSTKEVLDATLIHQSITGLYETRIDLSQLGGDGGGGGEAAAKGSSGGVPWLMKKPLQLTVLVPLHEYQERLLQQTALPKEQKELLQKLFLKYDALWQHWENQVGHRRIKPHNIATGTLAPRPQKQYPINPKAKPSIQIVIDDLLKQGVLIQQNSTMNTPVYPVPKPDGKWRMVLDYREVNKTIPLIAAQNQHSAGILSSIYRGKYKTTLDLTNGFWAHPITPESYWLTAFTWQGKQYCWTRLPQGFLNSPALFTADVVDLLKEIPNVQAYVDDIYISHDDPQEHLEQLEKIFSILLNAGYVVSLKKSEIAQREVEFLGFNITKEGRGLTDTFKQKLLNITPPKDLKQLQSILGLLNFARNFIPNYSELVKPLYTIVANANGKFISWTEDNSNQLQHIISVLNQADNLEERNPETRLIIKVNSSPSAGYIRYYNEGSKRPIMYVNYIFSKAEAKFTQTEKLLTTMHKGLIKAMDLAMGQEILVYSPIVSMTKIQRTPLPERKALPVRWITWMTYLEDPRIQFHYDKSLPELQQIPNVTEDVIAKTKHPSEFAMVFYTDGSAIKHPDVNKSHSAGMGIAQVQFIPEYKIVHQWSIPLGDHTAQLAEIAAVEFACKKALKISGPVLIVTDSFYVAESANKELPYWKSNGFLNNKKKPLRHVSKWKSIAECLQLKPDIIIMHEKGHQQPMTTLHTEGNNLADKLATQGSYVVHAGKRTADGSEFEKRTADGSEFESPKKKAKVE

SEQ ID NO: 434 - protein, 2082 aa, synthetic construct
MPAAKRVKLDGGDKKYSIGLDIGTNSVGWAVITDEYKVPSKKFKVLGNTDRHSIKKNLIGALLFDSGETAEATRLKRTARRRYTRRKNRICYLQEIFSNEMAKVDDSFFHRLEESFLVEEDKKHERHPIFGNIVDEVAYHEKYPTIYHLRKKLVDSTDKADLRLIYLALAHMIKFRGHFLIEGDLNPDNSDVDKLFIQLVQTYNQLFEENPINASGVDAKAILSARLSKSRRLENLIAQLPGEKKNGLFGNLIALSLGLTPNFKSNFDLAEDAKLQLSKDTYDDDLDNLLAQIGDQYADLFLAAKNLSDAILLSDILRVNTEITKAPLSASMIKRYDEHHQDLTLLKALVRQQLPEKYKEIFFDQSKNGYAGYIDGGASQEEFYKFIKPILEKMDGTEELLVKLNREDLLRKQRTFDNGSIPHQIHLGELHAILRRQEDFYPFLKDNREKIEKILTFRIPYYVGPLARGNSRFAWMTRKSEETITPWNFEEVVDKGASAQSFIERMTNFDKNLPNEKVLPKHSLLYEYFTVYNELTKVKYVTEGMRKPAFLSGEQKKAIVDLLFKTNRKVTVKQLKEDYFKKIECFDSVEISGVEDRFNASLGTYHDLLKIIKDKDFLDNEENEDILEDIVLTLTLFEDREMIEERLKTYAHLFDDKVMKQLKRRRYTGWGRLSRKLINGIRDKQSGKTILDFLKSDGFANRNFMQLIHDDSLTFKEDIQKAQVSGQGDSLHEHIANLAGSPAIKKGILQTVKVVDELVKVMGRHKPENIVIEMARENQTTQKGQKNSRERMKRIEEGIKELGSQILKEHPVENTQLQNEKLYLYYLQNGRDMYVDQELDINRLSDYDVDHIVPQSFLKDDSIDNKVLTRSDKARGKSDNVPSEEVVKKMKNYWRQLLNAKLITQRKFDNLTKAERGGLSELDKAGFIKRQLVETRQITKHVAQILDSRMNTKYDENDKLIREVKVITLKSKLVSDFRKDFQFYKVREINNYHHAHDAYLNAVVGTALIKKYPKLESEFVYGDYKVYDVRKMIAKSEQEIGKATAKYFFYSNIMNFFKTEITLANGEIRKRPLIETNGETGEIVWDKGRDFATVRKVLSMPQVNIVKKTEVQTGGFSKESILPKRNSDKLIARKKDWDPKKYGGFDSPTVAYSVLVVAKVEKGKSKKLKSVKELLGITIMERSSFEKNPIDFLEAKGYKEVKKDLIIKLPKYSLFELENGRKRMLASAGELQKGNELALPSKYVNFLYLASHYEKLKGSPEDNEQKQLFVEQHKHYLDEIIEQISEFSKRVILADANLDKVLSAYNKHRDKPIREQAENIIHLFTLTNLGAPAAFKYFDTTIDRKRYTSTKEVLDATLIHQSITGLYETRIDLSQLGGDGGGSSGSSGGVPWLMKKPLQLTVLVPLHEYQERLLQQTALPKEQKELLQKLFLKYDALWQHWENQVGHRRIKPHNIATGTLAPRPQKQYPINPKAKPSIQIVIDDLLKQGVLIQQNSTMNTPVYPVPKPDGKWRMVLDYREVNKTIPLIAAQNQHSAGILSSIYRGKYKTTLDLTNGFWAHPITPESYWLTAFTWQGKQYCWTRLPQGFLNSPALFTADVVDLLKEIPNVQAYVDDIYISHDDPQEHLEQLEKIFSILLNAGYVVSLKKSEIAQREVEFLGFNITKEGRGLTDTFKQKLLNITPPKDLKQLQSILGLLNFARNFIPNYSELVKPLYTIVANANGKFISWTEDNSNQLQHIISVLNQADNLEERNPETRLIIKVNSSPSAGYIRYYNEGSKRPIMYVNYIFSKAEAKFTQTEKLLTTMHKGLIKAMDLAMGQEILVYSPIVSMTKIQRTPLPERKALPVRWITWMTYLEDPRIQFHYDKSLPELQQIPNVTEDVIAKTKHPSEFAMVFYTDGSAIKHPDVNKSHSAGMGIAQVQFIPEYKIVHQWSIPLGDHTAQLAEIAAVEFACKKALKISGPVLIVTDSFYVAESANKELPYWKSNGFLNNKKKPLRHVSKWKSIAECLQLKPDIIIMHEKGHQQPMTTLHTEGNNLADKLATQGSYVVHAGKRTADGSEFEKRTADGSEFESPKKKAKVE

SEQ ID NO: 435 - protein, 2084 aa, synthetic construct
MPAAKRVKLDGGDKKYSIGLDIGTNSVGWAVITDEYKVPSKKFKVLGNTDRHSIKKNLIGALLFDSGETAEATRLKRTARRRYTRRKNRICYLQEIFSNEMAKVDDSFFHRLEESFLVEEDKKHERHPIFGNIVDEVAYHEKYPTIYHLRKKLVDSTDKADLRLIYLALAHMIKFRGHFLIEGDLNPDNSDVDKLFIQLVQTYNQLFEENPINASGVDAKAILSARLSKSRRLENLIAQLPGEKKNGLFGNLIALSLGLTPNFKSNFDLAEDAKLQLSKDTYDDDLDNLLAQIGDQYADLFLAAKNLSDAILLSDILRVNTEITKAPLSASMIKRYDEHHQDLTLLKALVRQQLPEKYKEIFFDQSKNGYAGYIDGGASQEEFYKFIKPILEKMDGTEELLVKLNREDLLRKQRTFDNGSIPHQIHLGELHAILRRQEDFYPFLKDNREKIEKILTFRIPYYVGPLARGNSRFAWMTRKSEETITPWNFEEVVDKGASAQSFIERMTNFDKNLPNEKVLPKHSLLYEYFTVYNELTKVKYVTEGMRKPAFLSGEQKKAIVDLLFKTNRKVTVKQLKEDYFKKIECFDSVEISGVEDRFNASLGTYHDLLKIIKDKDFLDNEENEDILEDIVLTLTLFEDREMIEERLKTYAHLFDDKVMKQLKRRRYTGWGRLSRKLINGIRDKQSGKTILDFLKSDGFANRNFMQLIHDDSLTFKEDIQKAQVSGQGDSLHEHIANLAGSPAIKKGILQTVKVVDELVKVMGRHKPENIVIEMARENQTTQKGQKNSRERMKRIEEGIKELGSQILKEHPVENTQLQNEKLYLYYLQNGRDMYVDQELDINRLSDYDVDHIVPQSFLKDDSIDNKVLTRSDKARGKSDNVPSEEVVKKMKNYWRQLLNAKLITQRKFDNLTKAERGGLSELDKAGFIKRQLVETRQITKHVAQILDSRMNTKYDENDKLIREVKVITLKSKLVSDFRKDFQFYKVREINNYHHAHDAYLNAVVGTALIKKYPKLESEFVYGDYKVYDVRKMIAKSEQEIGKATAKYFFYSNIMNFFKTEITLANGEIRKRPLIETNGETGEIVWDKGRDFATVRKVLSMPQVNIVKKTEVQTGGFSKESILPKRNSDKLIARKKDWDPKKYGGFDSPTVAYSVLVVAKVEKGKSKKLKSVKELLGITIMERSSFEKNPIDFLEAKGYKEVKKDLIIKLPKYSLFELENGRKRMLASAGELQKGNELALPSKYVNFLYLASHYEKLKGSPEDNEQKQLFVEQHKHYLDEIIEQISEFSKRVILADANLDKVLSAYNKHRDKPIREQAENIIHLFTLTNLGAPAAFKYFDTTIDRKRYTSTKEVLDATLIHQSITGLYETRIDLSQLGGDGGGGGEAAAKGGVPWLMKKPLQLTVLVPLHEYQERLLQQTALPKEQKELLQKLFLKYDALWQHWENQVGHRRIKPHNIATGTLAPRPQKQYPINPKAKPSIQIVIDDLLKQGVLIQQNSTMNTPVYPVPKPDGKWRMVLDYREVNKTIPLIAAQNQHSAGILSSIYRGKYKTTLDLTNGFWAHPITPESYWLTAFTWQGKQYCWTRLPQGFLNSPALFTADVVDLLKEIPNVQAYVDDIYISHDDPQEHLEQLEKIFSILLNAGYVVSLKKSEIAQREVEFLGFNITKEGRGLTDTFKQKLLNITPPKDLKQLQSILGLLNFARNFIPNYSELVKPLYTIVANANGKFISWTEDNSNQLQHIISVLNQADNLEERNPETRLIIKVNSSPSAGYIRYYNEGSKRPIMYVNYIFSKAEAKFTQTEKLLTTMHKGLIKAMDLAMGQEILVYSPIVSMTKIQRTPLPERKALPVRWITWMTYLEDPRIQFHYDKSLPELQQIPNVTEDVIAKTKHPSEFAMVFYTDGSAIKHPDVNKSHSAGMGIAQVQFIPEYKIVHQWSIPLGDHTAQLAEIAAVEFACKKALKISGPVLIVTDSFYVAESANKELPYWKSNGFLNNKKKPLRHVSKWKSIAECLQLKPDIIIMHEKGHQQPMTTLHTEGNNLADKLATQGSYVVHAGKRTADGSEFEKRTADGSEFESPKKKAKVE

SEQ ID NO: 436 - protein, 2087 aa, synthetic construct
MPAAKRVKLDGGDKKYSIGLDIGTNSVGWAVITDEYKVPSKKFKVLGNTDRHSIKKNLIGALLFDSGETAEATRLKRTARRRYTRRKNRICYLQEIFSNEMAKVDDSFFHRLEESFLVEEDKKHERHPIFGNIVDEVAYHEKYPTIYHLRKKLVDSTDKADLRLIYLALAHMIKFRGHFLIEGDLNPDNSDVDKLFIQLVQTYNQLFEENPINASGVDAKAILSARLSKSRRLENLIAQLPGEKKNGLFGNLIALSLGLTPNFKSNFDLAEDAKLQLSKDTYDDDLDNLLAQIGDQYADLFLAAKNLSDAILLSDILRVNTEITKAPLSASMIKRYDEHHQDLTLLKALVRQQLPEKYKEIFFDQSKNGYAGYIDGGASQEEFYKFIKPILEKMDGTEELLVKLNREDLLRKQRTFDNGSIPHQIHLGELHAILRRQEDFYPFLKDNREKIEKILTFRIPYYVGPLARGNSRFAWMTRKSEETITPWNFEEVVDKGASAQSFIERMTNFDKNLPNEKVLPKHSLLYEYFTVYNELTKVKYVTEGMRKPAFLSGEQKKAIVDLLFKTNRKVTVKQLKEDYFKKIECFDSVEISGVEDRFNASLGTYHDLLKIIKDKDFLDNEENEDILEDIVLTLTLFEDREMIEERLKTYAHLFDDKVMKQLKRRRYTGWGRLSRKLINGIRDKQSGKTILDFLKSDGFANRNFMQLIHDDSLTFKEDIQKAQVSGQGDSLHEHIANLAGSPAIKKGILQTVKVVDELVKVMGRHKPENIVIEMARENQTTQKGQKNSRERMKRIEEGIKELGSQILKEHPVENTQLQNEKLYLYYLQNGRDMYVDQELDINRLSDYDVDHIVPQSFLKDDSIDNKVLTRSDKARGKSDNVPSEEVVKKMKNYWRQLLNAKLITQRKFDNLTKAERGGLSELDKAGFIKRQLVETRQITKHVAQILDSRMNTKYDENDKLIREVKVITLKSKLVSDFRKDFQFYKVREINNYHHAHDAYLNAVVGTALIKKYPKLESEFVYGDYKVYDVRKMIAKSEQEIGKATAKYFFYSNIMNFFKTEITLANGEIRKRPLIETNGETGEIVWDKGRDFATVRKVLSMPQVNIVKKTEVQTGGFSKESILPKRNSDKLIARKKDWDPKKYGGFDSPTVAYSVLVVAKVEKGKSKKLKSVKELLGITIMERSSFEKNPIDFLEAKGYKEVKKDLIIKLPKYSLFELENGRKRMLASAGELQKGNELALPSKYVNFLYLASHYEKLKGSPEDNEQKQLFVEQHKHYLDEIIEQISEFSKRVILADANLDKVLSAYNKHRDKPIREQAENIIHLFTLTNLGAPAAFKYFDTTIDRKRYTSTKEVLDATLIHQSITGLYETRIDLSQLGGDGGPAPGGGEAAAKGGVPWLMKKPLQLTVLVPLHEYQERLLQQTALPKEQKELLQKLFLKYDALWQHWENQVGHRRIKPHNIATGTLAPRPQKQYPINPKAKPSIQIVIDDLLKQGVLIQQNSTMNTPVYPVPKPDGKWRMVLDYREVNKTIPLIAAQNQHSAGILSSIYRGKYKTTLDLTNGFWAHPITPESYWLTAFTWQGKQYCWTRLPQGFLNSPALFTADVVDLLKEIPNVQAYVDDIYISHDDPQEHLEQLEKIFSILLNAGYVVSLKKSEIAQREVEFLGFNITKEGRGLTDTFKQKLLNITPPKDLKQLQSILGLLNFARNFIPNYSELVKPLYTIVANANGKFISWTEDNSNQLQHIISVLNQADNLEERNPETRLIIKVNSSPSAGYIRYYNEGSKRPIMYVNYIFSKAEAKFTQTEKLLTTMHKGLIKAMDLAMGQEILVYSPIVSMTKIQRTPLPERKALPVRWITWMTYLEDPRIQFHYDKSLPELQQIPNVTEDVIAKTKHPSEFAMVFYTDGSAIKHPDVNKSHSAGMGIAQVQFIPEYKIVHQWSIPLGDHTAQLAEIAAVEFACKKALKISGPVLIVTDSFYVAESANKELPYWKSNGFLNNKKKPLRHVSKWKSIAECLQLKPDIIIMHEKGHQQPMTTLHTEGNNLADKLATQGSYVVHAGKRTADGSEFEKRTADGSEFESPKKKAKVE

SEQ ID NO: 437 - protein, 2094 aa, synthetic construct
MPAAKRVKLDGGDKKYSIGLDIGTNSVGWAVITDEYKVPSKKFKVLGNTDRHSIKKNLIGALLFDSGETAEATRLKRTARRRYTRRKNRICYLQEIFSNEMAKVDDSFFHRLEESFLVEEDKKHERHPIFGNIVDEVAYHEKYPTIYHLRKKLVDSTDKADLRLIYLALAHMIKFRGHFLIEGDLNPDNSDVDKLFIQLVQTYNQLFEENPINASGVDAKAILSARLSKSRRLENLIAQLPGEKKNGLFGNLIALSLGLTPNFKSNFDLAEDAKLQLSKDTYDDDLDNLLAQIGDQYADLFLAAKNLSDAILLSDILRVNTEITKAPLSASMIKRYDEHHQDLTLLKALVRQQLPEKYKEIFFDQSKNGYAGYIDGGASQEEFYKFIKPILEKMDGTEELLVKLNREDLLRKQRTFDNGSIPHQIHLGELHAILRRQEDFYPFLKDNREKIEKILTFRIPYYVGPLARGNSRFAWMTRKSEETITPWNFEEVVDKGASAQSFIERMTNFDKNLPNEKVLPKHSLLYEYFTVYNELTKVKYVTEGMRKPAFLSGEQKKAIVDLLFKTNRKVTVKQLKEDYFKKIECFDSVEISGVEDRFNASLGTYHDLLKIIKDKDFLDNEENEDILEDIVLTLTLFEDREMIEERLKTYAHLFDDKVMKQLKRRRYTGWGRLSRKLINGIRDKQSGKTILDFLKSDGFANRNFMQLIHDDSLTFKEDIQKAQVSGQGDSLHEHIANLAGSPAIKKGILQTVKVVDELVKVMGRHKPENIVIEMARENQTTQKGQKNSRERMKRIEEGIKELGSQILKEHPVENTQLQNEKLYLYYLQNGRDMYVDQELDINRLSDYDVDHIVPQSFLKDDSIDNKVLTRSDKARGKSDNVPSEEVVKKMKNYWRQLLNAKLITQRKFDNLTKAERGGLSELDKAGFIKRQLVETRQITKHVAQILDSRMNTKYDENDKLIREVKVITLKSKLVSDFRKDFQFYKVREINNYHHAHDAYLNAVVGTALIKKYPKLESEFVYGDYKVYDVRKMIAKSEQEIGKATAKYFFYSNIMNFFKTEITLANGEIRKRPLIETNGETGEIVWDKGRDFATVRKVLSMPQVNIVKKTEVQTGGFSKESILPKRNSDKLIARKKDWDPKKYGGFDSPTVAYSVLVVAKVEKGKSKKLKSVKELLGITIMERSSFEKNPIDFLEAKGYKEVKKDLIIKLPKYSLFELENGRKRMLASAGELQKGNELALPSKYVNFLYLASHYEKLKGSPEDNEQKQLFVEQHKHYLDEIIEQISEFSKRVILADANLDKVLSAYNKHRDKPIREQAENIIHLFTLTNLGAPAAFKYFDTTIDRKRYTSTKEVLDATLIHQSITGLYETRIDLSQLGGDGGGSSGSSGSSGSSGSSGSSGGVPWLMKKPLQLTVLVPLHEYQERLLQQTALPKEQKELLQKLFLKYDALWQHWENQVGHRRIKPHNIATGTLAPRPQKQYPINPKAKPSIQIVIDDLLKQGVLIQQNSTMNTPVYPVPKPDGKWRMVLDYREVNKTIPLIAAQNQHSAGILSSIYRGKYKTTLDLTNGFWAHPITPESYWLTAFTWQGKQYCWTRLPQGFLNSPALFNADVVDLLKEIPNVQAYVDDIYISHDDPQEHLEQLEKIFSILLNAGYVVSLKKSEIAQREVEFLGFNITKEGRGLTDTFKQKLLNITPPKDLKQLQSILGLLNFARNFIPNYSELVKPLYTIVAPANGKFISWTEDNSNQLQHIISVLNQADNLEERNPETRLIIKVNSSPSAGYIRYYNEGSKRPIMYVNYIFSKAEAKFTQTEKLLTTMHKGLIKAMDLAMGQEILVYSPIVSMTKIQRTPLPERKALPVRWITWMTYLEDPRIQFHYDKSLPELQQIPNVTEDVIAKTKHPSEFAMVFYTDGSAIKHPDVNKSHSAGMGIAQVQFIPEYKIVHQWSIPLGDHTAQLAEIAAVEFACKKALKISGPVLIVTDSFYVAESANKELPYWKSNGFLNNKKKPLRHVSKWKSIAECLQLKPDIIIMHEKGHQQPMTTLHTEGNNLADKLATQGSYVVHAGKRTADGSEFEKRTADGSEFESPKKKAKVE

SEQ ID NO: 438 - protein, 2087 aa, synthetic construct
MPAAKRVKLDGGDKKYSIGLDIGTNSVGWAVITDEYKVPSKKFKVLGNTDRHSIKKNLIGALLFDSGETAEATRLKRTARRRYTRRKNRICYLQEIFSNEMAKVDDSFFHRLEESFLVEEDKKHERHPIFGNIVDEVAYHEKYPTIYHLRKKLVDSTDKADLRLIYLALAHMIKFRGHFLIEGDLNPDNSDVDKLFIQLVQTYNQLFEENPINASGVDAKAILSARLSKSRRLENLIAQLPGEKKNGLFGNLIALSLGLTPNFKSNFDLAEDAKLQLSKDTYDDDLDNLLAQIGDQYADLFLAAKNLSDAILLSDILRVNTEITKAPLSASMIKRYDEHHQDLTLLKALVRQQLPEKYKEIFFDQSKNGYAGYIDGGASQEEFYKFIKPILEKMDGTEELLVKLNREDLLRKQRTFDNGSIPHQIHLGELHAILRRQEDFYPFLKDNREKIEKILTFRIPYYVGPLARGNSRFAWMTRKSEETITPWNFEEVVDKGASAQSFIERMTNFDKNLPNEKVLPKHSLLYEYFTVYNELTKVKYVTEGMRKPAFLSGEQKKAIVDLLFKTNRKVTVKQLKEDYFKKIECFDSVEISGVEDRFNASLGTYHDLLKIIKDKDFLDNEENEDILEDIVLTLTLFEDREMIEERLKTYAHLFDDKVMKQLKRRRYTGWGRLSRKLINGIRDKQSGKTILDFLKSDGFANRNFMQLIHDDSLTFKEDIQKAQVSGQGDSLHEHIANLAGSPAIKKGILQTVKVVDELVKVMGRHKPENIVIEMARENQTTQKGQKNSRERMKRIEEGIKELGSQILKEHPVENTQLQNEKLYLYYLQNGRDMYVDQELDINRLSDYDVDHIVPQSFLKDDSIDNKVLTRSDKARGKSDNVPSEEVVKKMKNYWRQLLNAKLITQRKFDNLTKAERGGLSELDKAGFIKRQLVETRQITKHVAQILDSRMNTKYDENDKLIREVKVITLKSKLVSDFRKDFQFYKVREINNYHHAHDAYLNAVVGTALIKKYPKLESEFVYGDYKVYDVRKMIAKSEQEIGKATAKYFFYSNIMNFFKTEITLANGEIRKRPLIETNGETGEIVWDKGRDFATVRKVLSMPQVNIVKKTEVQTGGFSKESILPKRNSDKLIARKKDWDPKKYGGFDSPTVAYSVLVVAKVEKGKSKKLKSVKELLGITIMERSSFEKNPIDFLEAKGYKEVKKDLIIKLPKYSLFELENGRKRMLASAGELQKGNELALPSKYVNFLYLASHYEKLKGSPEDNEQKQLFVEQHKHYLDEIIEQISEFSKRVILADANLDKVLSAYNKHRDKPIREQAENIIHLFTLTNLGAPAAFKYFDTTIDRKRYTSTKEVLDATLIHQSITGLYETRIDLSQLGGDGGGSSGGGEAAAKGGVPWLMKKPLQLTVLVPLHEYQERLLQQTALPKEQKELLQKLFLKYDALWQHWENQVGHRRIKPHNIATGTLAPRPQKQYPINPKAKPSIQIVIDDLLKQGVLIQQNSTMNTPVYPVPKPDGKWRMVLDYREVNKTIPLIAAQNQHSAGILSSIYRGKYKTTLDLTNGFWAHPITPESYWLTAFTWQGKQYCWTRLPQGFLNSPALFNADVVDLLKEIPNVQAYVDDIYISHDDPQEHLEQLEKIFSILLNAGYVVSLKKSEIAQREVEFLGFNITKEGRGLTDTFKQKLLNITPPKDLKQLQSILGLLNFARNFIPNYSELVKPLYTIVAPANGKFISWTEDNSNQLQHIISVLNQADNLEERNPETRLIIKVNSSPSAGYIRYYNEGSKRPIMYVNYIFSKAEAKFTQTEKLLTTMHKGLIKAMDLAMGQEILVYSPIVSMTKIQRTPLPERKALPVRWITWMTYLEDPRIQFHYDKSLPELQQIPNVTEDVIAKTKHPSEFAMVFYTDGSAIKHPDVNKSHSAGMGIAQVQFIPEYKIVHQWSIPLGDHTAQLAEIAAVEFACKKALKISGPVLIVTDSFYVAESANKELPYWKSNGFLNNKKKPLRHVSKWKSIAECLQLKPDIIIMHEKGHQQPMTTLHTEGNNLADKLATQGSYVVHAGKRTADGSEFEKRTADGSEFESPKKKAKVE

SEQ ID NO: 439 - protein, 2091 aa, synthetic construct
MPAAKRVKLDGGDKKYSIGLDIGTNSVGWAVITDEYKVPSKKFKVLGNTDRHSIKKNLIGALLFDSGETAEATRLKRTARRRYTRRKNRICYLQEIFSNEMAKVDDSFFHRLEESFLVEEDKKHERHPIFGNIVDEVAYHEKYPTIYHLRKKLVDSTDKADLRLIYLALAHMIKFRGHFLIEGDLNPDNSDVDKLFIQLVQTYNQLFEENPINASGVDAKAILSARLSKSRRLENLIAQLPGEKKNGLFGNLIALSLGLTPNFKSNFDLAEDAKLQLSKDTYDDDLDNLLAQIGDQYADLFLAAKNLSDAILLSDILRVNTEITKAPLSASMIKRYDEHHQDLTLLKALVRQQLPEKYKEIFFDQSKNGYAGYIDGGASQEEFYKFIKPILEKMDGTEELLVKLNREDLLRKQRTFDNGSIPHQIHLGELHAILRRQEDFYPFLKDNREKIEKILTFRIPYYVGPLARGNSRFAWMTRKSEETITPWNFEEVVDKGASAQSFIERMTNFDKNLPNEKVLPKHSLLYEYFTVYNELTKVKYVTEGMRKPAFLSGEQKKAIVDLLFKTNRKVTVKQLKEDYFKKIECFDSVEISGVEDRFNASLGTYHDLLKIIKDKDFLDNEENEDILEDIVLTLTLFEDREMIEERLKTYAHLFDDKVMKQLKRRRYTGWGRLSRKLINGIRDKQSGKTILDFLKSDGFANRNFMQLIHDDSLTFKEDIQKAQVSGQGDSLHEHIANLAGSPAIKKGILQTVKVVDELVKVMGRHKPENIVIEMARENQTTQKGQKNSRERMKRIEEGIKELGSQILKEHPVENTQLQNEKLYLYYLQNGRDMYVDQELDINRLSDYDVDHIVPQSFLKDDSIDNKVLTRSDKARGKSDNVPSEEVVKKMKNYWRQLLNAKLITQRKFDNLTKAERGGLSELDKAGFIKRQLVETRQITKHVAQILDSRMNTKYDENDKLIREVKVITLKSKLVSDFRKDFQFYKVREINNYHHAHDAYLNAVVGTALIKKYPKLESEFVYGDYKVYDVRKMIAKSEQEIGKATAKYFFYSNIMNFFKTEITLANGEIRKRPLIETNGETGEIVWDKGRDFATVRKVLSMPQVNIVKKTEVQTGGFSKESILPKRNSDKLIARKKDWDPKKYGGFDSPTVAYSVLVVAKVEKGKSKKLKSVKELLGITIMERSSFEKNPIDFLEAKGYKEVKKDLIIKLPKYSLFELENGRKRMLASAGELQKGNELALPSKYVNFLYLASHYEKLKGSPEDNEQKQLFVEQHKHYLDEIIEQISEFSKRVILADANLDKVLSAYNKHRDKPIREQAENIIHLFTLTNLGAPAAFKYFDTTIDRKRYTSTKEVLDATLIHQSITGLYETRIDLSQLGGDGGGGGGSEAAAKGGGGSGGVPWLMKKPLQLTVLVPLHEYQERLLQQTALPKEQKELLQKLFLKYDALWQHWENQVGHRRIKPHNIATGTLAPRPQKQYPINPKAKPSIQIVIDDLLKQGVLIQQNSTMNTPVYPVPKPDGKWRMVLDYREVNKTIPLIAAQNQHSAGILSSIYRGKYKTTLDLTNGFWAHPITPESYWLTAFTWQGKQYCWTRLPQGFLNSPALFNADVVDLLKEIPNVQAYVDDIYISHDDPQEHLEQLEKIFSILLNAGYVVSLKKSEIAQREVEFLGFNITKEGRGLTDTFKQKLLNITPPKDLKQLQSILGLLNFARNFIPNYSELVKPLYTIVAPANGKFISWTEDNSNQLQHIISVLNQADNLEERNPETRLIIKVNSSPSAGYIRYYNEGSKRPIMYVNYIFSKAEAKFTQTEKLLTTMHKGLIKAMDLAMGQEILVYSPIVSMTKIQRTPLPERKALPVRWITWMTYLEDPRIQFHYDKSLPELQQIPNVTEDVIAKTKHPSEFAMVFYTDGSAIKHPDVNKSHSAGMGIAQVQFIPEYKIVHQWSIPLGDHTAQLAEIAAVEFACKKALKISGPVLIVTDSFYVAESANKELPYWKSNGFLNNKKKPLRHVSKWKSIAECLQLKPDIIIMHEKGHQQPMTTLHTEGNNLADKLATQGSYVVHAGKRTADGSEFEKRTADGSEFESPKKKAKVE

SEQ ID NO: 440 - protein, 2085 aa, synthetic construct
MPAAKRVKLDGGDKKYSIGLDIGTNSVGWAVITDEYKVPSKKFKVLGNTDRHSIKKNLIGALLFDSGETAEATRLKRTARRRYTRRKNRICYLQEIFSNEMAKVDDSFFHRLEESFLVEEDKKHERHPIFGNIVDEVAYHEKYPTIYHLRKKLVDSTDKADLRLIYLALAHMIKFRGHFLIEGDLNPDNSDVDKLFIQLVQTYNQLFEENPINASGVDAKAILSARLSKSRRLENLIAQLPGEKKNGLFGNLIALSLGLTPNFKSNFDLAEDAKLQLSKDTYDDDLDNLLAQIGDQYADLFLAAKNLSDAILLSDILRVNTEITKAPLSASMIKRYDEHHQDLTLLKALVRQQLPEKYKEIFFDQSKNGYAGYIDGGASQEEFYKFIKPILEKMDGTEELLVKLNREDLLRKQRTFDNGSIPHQIHLGELHAILRRQEDFYPFLKDNREKIEKILTFRIPYYVGPLARGNSRFAWMTRKSEETITPWNFEEVVDKGASAQSFIERMTNFDKNLPNEKVLPKHSLLYEYFTVYNELTKVKYVTEGMRKPAFLSGEQKKAIVDLLFKTNRKVTVKQLKEDYFKKIECFDSVEISGVEDRFNASLGTYHDLLKIIKDKDFLDNEENEDILEDIVLTLTLFEDREMIEERLKTYAHLFDDKVMKQLKRRRYTGWGRLSRKLINGIRDKQSGKTILDFLKSDGFANRNFMQLIHDDSLTFKEDIQKAQVSGQGDSLHEHIANLAGSPAIKKGILQTVKVVDELVKVMGRHKPENIVIEMARENQTTQKGQKNSRERMKRIEEGIKELGSQILKEHPVENTQLQNEKLYLYYLQNGRDMYVDQELDINRLSDYDVDHIVPQSFLKDDSIDNKVLTRSDKARGKSDNVPSEEVVKKMKNYWRQLLNAKLITQRKFDNLTKAERGGLSELDKAGFIKRQLVETRQITKHVAQILDSRMNTKYDENDKLIREVKVITLKSKLVSDFRKDFQFYKVREINNYHHAHDAYLNAVVGTALIKKYPKLESEFVYGDYKVYDVRKMIAKSEQEIGKATAKYFFYSNIMNFFKTEITLANGEIRKRPLIETNGETGEIVWDKGRDFATVRKVLSMPQVNIVKKTEVQTGGFSKESILPKRNSDKLIARKKDWDPKKYGGFDSPTVAYSVLVVAKVEKGKSKKLKSVKELLGITIMERSSFEKNPIDFLEAKGYKEVKKDLIIKLPKYSLFELENGRKRMLASAGELQKGNELALPSKYVNFLYLASHYEKLKGSPEDNEQKQLFVEQHKHYLDEIIEQISEFSKRVILADANLDKVLSAYNKHRDKPIREQAENIIHLFTLTNLGAPAAFKYFDTTIDRKRYTSTKEVLDATLIHQSITGLYETRIDLSQLGGDGGPAPGSSGGSGGVPWLMKKPLQLTVLVPLHEYQERLLQQTALPKEQKELLQKLFLKYDALWQHWENQVGHRRIKPHNIATGTLAPRPQKQYPINPKAKPSIQIVIDDLLKQGVLIQQNSTMNTPVYPVPKPDGKWRMVLDYREVNKTIPLIAAQNQHSAGILSSIYRGKYKTTLDLTNGFWAHPITPESYWLTAFTWQGKQYCWTRLPQGFLNSPALFNADVVDLLKEIPNVQAYVDDIYISHDDPQEHLEQLEKIFSILLNAGYVVSLKKSEIAQREVEFLGFNITKEGRGLTDTFKQKLLNITPPKDLKQLQSILGLLNFARNFIPNYSELVKPLYTIVAPANGKFISWTEDNSNQLQHIISVLNQADNLEERNPETRLIIKVNSSPSAGYIRYYNEGSKRPIMYVNYIFSKAEAKFTQTEKLLTTMHKGLIKAMDLAMGQEILVYSPIVSMTKIQRTPLPERKALPVRWITWMTYLEDPRIQFHYDKSLPELQQIPNVTEDVIAKTKHPSEFAMVFYTDGSAIKHPDVNKSHSAGMGIAQVQFIPEYKIVHQWSIPLGDHTAQLAEIAAVEFACKKALKISGPVLIVTDSFYVAESANKELPYWKSNGFLNNKKKPLRHVSKWKSIAECLQLKPDIIIMHEKGHQQPMTTLHTEGNNLADKLATQGSYVVHAGKRTADGSEFEKRTADGSEFESPKKKAKVE

SEQ ID NO: 441 - protein, 2087 aa, synthetic construct
MPAAKRVKLDGGDKKYSIGLDIGTNSVGWAVITDEYKVPSKKFKVLGNTDRHSIKKNLIGALLFDSGETAEATRLKRTARRRYTRRKNRICYLQEIFSNEMAKVDDSFFHRLEESFLVEEDKKHERHPIFGNIVDEVAYHEKYPTIYHLRKKLVDSTDKADLRLIYLALAHMIKFRGHFLIEGDLNPDNSDVDKLFIQLVQTYNQLFEENPINASGVDAKAILSARLSKSRRLENLIAQLPGEKKNGLFGNLIALSLGLTPNFKSNFDLAEDAKLQLSKDTYDDDLDNLLAQIGDQYADLFLAAKNLSDAILLSDILRVNTEITKAPLSASMIKRYDEHHQDLTLLKALVRQQLPEKYKEIFFDQSKNGYAGYIDGGASQEEFYKFIKPILEKMDGTEELLVKLNREDLLRKQRTFDNGSIPHQIHLGELHAILRRQEDFYPFLKDNREKIEKILTFRIPYYVGPLARGNSRFAWMTRKSEETITPWNFEEVVDKGASAQSFIERMTNFDKNLPNEKVLPKHSLLYEYFTVYNELTKVKYVTEGMRKPAFLSGEQKKAIVDLLFKTNRKVTVKQLKEDYFKKIECFDSVEISGVEDRFNASLGTYHDLLKIIKDKDFLDNEENEDILEDIVLTLTLFEDREMIEERLKTYAHLFDDKVMKQLKRRRYTGWGRLSRKLINGIRDKQSGKTILDFLKSDGFANRNFMQLIHDDSLTFKEDIQKAQVSGQGDSLHEHIANLAGSPAIKKGILQTVKVVDELVKVMGRHKPENIVIEMARENQTTQKGQKNSRERMKRIEEGIKELGSQILKEHPVENTQLQNEKLYLYYLQNGRDMYVDQELDINRLSDYDVDHIVPQSFLKDDSIDNKVLTRSDKARGKSDNVPSEEVVKKMKNYWRQLLNAKLITQRKFDNLTKAERGGLSELDKAGFIKRQLVETRQITKHVAQILDSRMNTKYDENDKLIREVKVITLKSKLVSDFRKDFQFYKVREINNYHHAHDAYLNAVVGTALIKKYPKLESEFVYGDYKVYDVRKMIAKSEQEIGKATAKYFFYSNIMNFFKTEITLANGEIRKRPLIETNGETGEIVWDKGRDFATVRKVLSMPQVNIVKKTEVQTGGFSKESILPKRNSDKLIARKKDWDPKKYGGFDSPTVAYSVLVVAKVEKGKSKKLKSVKELLGITIMERSSFEKNPIDFLEAKGYKEVKKDLIIKLPKYSLFELENGRKRMLASAGELQKGNELALPSKYVNFLYLASHYEKLKGSPEDNEQKQLFVEQHKHYLDEIIEQISEFSKRVILADANLDKVLSAYNKHRDKPIREQAENIIHLFTLTNLGAPAAFKYFDTTIDRKRYTSTKEVLDATLIHQSITGLYETRIDLSQLGGDGGGGGEAAAKPAPGGVPWLMKKPLQLTVLVPLHEYQERLLQQTALPKEQKELLQKLFLKYDALWQHWENQVGHRRIKPHNIATGTLAPRPQKQYPINPKAKPSIQIVIDDLLKQGVLIQQNSTMNTPVYPVPKPDGKWRMVLDYREVNKTIPLIAAQNQHSAGILSSIYRGKYKTTLDLTNGFWAHPITPESYWLTAFTWQGKQYCWTRLPQGFLNSPALFNADVVDLLKEIPNVQAYVDDIYISHDDPQEHLEQLEKIFSILLNAGYVVSLKKSEIAQREVEFLGFNITKEGRGLTDTFKQKLLNITPPKDLKQLQSILGLLNFARNFIPNYSELVKPLYTIVAPANGKFISWTEDNSNQLQHIISVLNQADNLEERNPETRLIIKVNSSPSAGYIRYYNEGSKRPIMYVNYIFSKAEAKFTQTEKLLTTMHKGLIKAMDLAMGQEILVYSPIVSMTKIQRTPLPERKALPVRWITWMTYLEDPRIQFHYDKSLPELQQIPNVTEDVIAKTKHPSEFAMVFYTDGSAIKHPDVNKSHSAGMGIAQVQFIPEYKIVHQWSIPLGDHTAQLAEIAAVEFACKKALKISGPVLIVTDSFYVAESANKELPYWKSNGFLNNKKKPLRHVSKWKSIAECLQLKPDIIIMHEKGHQQPMTTLHTEGNNLADKLATQGSYVVHAGKRTADGSEFEKRTADGSEFESPKKKAKVE

SEQ ID NO: 442 - protein, 2087 aa, synthetic construct
MPAAKRVKLDGGDKKYSIGLDIGTNSVGWAVITDEYKVPSKKFKVLGNTDRHSIKKNLIGALLFDSGETAEATRLKRTARRRYTRRKNRICYLQEIFSNEMAKVDDSFFHRLEESFLVEEDKKHERHPIFGNIVDEVAYHEKYPTIYHLRKKLVDSTDKADLRLIYLALAHMIKFRGHFLIEGDLNPDNSDVDKLFIQLVQTYNQLFEENPINASGVDAKAILSARLSKSRRLENLIAQLPGEKKNGLFGNLIALSLGLTPNFKSNFDLAEDAKLQLSKDTYDDDLDNLLAQIGDQYADLFLAAKNLSDAILLSDILRVNTEITKAPLSASMIKRYDEHHQDLTLLKALVRQQLPEKYKEIFFDQSKNGYAGYIDGGASQEEFYKFIKPILEKMDGTEELLVKLNREDLLRKQRTFDNGSIPHQIHLGELHAILRRQEDFYPFLKDNREKIEKILTFRIPYYVGPLARGNSRFAWMTRKSEETITPWNFEEVVDKGASAQSFIERMTNFDKNLPNEKVLPKHSLLYEYFTVYNELTKVKYVTEGMRKPAFLSGEQKKAIVDLLFKTNRKVTVKQLKEDYFKKIECFDSVEISGVEDRFNASLGTYHDLLKIIKDKDFLDNEENEDILEDIVLTLTLFEDREMIEERLKTYAHLFDDKVMKQLKRRRYTGWGRLSRKLINGIRDKQSGKTILDFLKSDGFANRNFMQLIHDDSLTFKEDIQKAQVSGQGDSLHEHIANLAGSPAIKKGILQTVKVVDELVKVMGRHKPENIVIEMARENQTTQKGQKNSRERMKRIEEGIKELGSQILKEHPVENTQLQNEKLYLYYLQNGRDMYVDQELDINRLSDYDVDHIVPQSFLKDDSIDNKVLTRSDKARGKSDNVPSEEVVKKMKNYWRQLLNAKLITQRKFDNLTKAERGGLSELDKAGFIKRQLVETRQITKHVAQILDSRMNTKYDENDKLIREVKVITLKSKLVSDFRKDFQFYKVREINNYHHAHDAYLNAVVGTALIKKYPKLESEFVYGDYKVYDVRKMIAKSEQEIGKATAKYFFYSNIMNFFKTEITLANGEIRKRPLIETNGETGEIVWDKGRDFATVRKVLSMPQVNIVKKTEVQTGGFSKESILPKRNSDKLIARKKDWDPKKYGGFDSPTVAYSVLVVAKVEKGKSKKLKSVKELLGITIMERSSFEKNPIDFLEAKGYKEVKKDLIIKLPKYSLFELENGRKRMLASAGELQKGNELALPSKYVNFLYLASHYEKLKGSPEDNEQKQLFVEQHKHYLDEIIEQISEFSKRVILADANLDKVLSAYNKHRDKPIREQAENIIHLFTLTNLGAPAAFKYFDTTIDRKRYTSTKEVLDATLIHQSITGLYETRIDLSQLGGDGGGGSPAPEAAAKGGVPWLMKKPLQLTVLVPLHEYQERLLQQTALPKEQKELLQKLFLKYDALWQHWENQVGHRRIKPHNIATGTLAPRPQKQYPINPKAKPSIQIVIDDLLKQGVLIQQNSTMNTPVYPVPKPDGKWRMVLDYREVNKTIPLIAAQNQHSAGILSSIYRGKYKTTLDLTNGFWAHPITPESYWLTAFTWQGKQYCWTRLPQGFLNSPALFNADVVDLLKEIPNVQAYVDDIYISHDDPQEHLEQLEKIFSILLNAGYVVSLKKSEIAQREVEFLGFNITKEGRGLTDTFKQKLLNITPPKDLKQLQSILGLLNFARNFIPNYSELVKPLYTIVAPANGKFISWTEDNSNQLQHIISVLNQADNLEERNPETRLIIKVNSSPSAGYIRYYNEGSKRPIMYVNYIFSKAEAKFTQTEKLLTTMHKGLIKAMDLAMGQEILVYSPIVSMTKIQRTPLPERKALPVRWITWMTYLEDPRIQFHYDKSLPELQQIPNVTEDVIAKTKHPSEFAMVFYTDGSAIKHPDVNKSHSAGMGIAQVQFIPEYKIVHQWSIPLGDHTAQLAEIAAVEFACKKALKISGPVLIVTDSFYVAESANKELPYWKSNGFLNNKKKPLRHVSKWKSIAECLQLKPDIIIMHEKGHQQPMTTLHTEGNNLADKLATQGSYVVHAGKRTADGSEFEKRTADGSEFESPKKKAKVE

SEQ ID NO: 443 - protein, 2084 aa, synthetic construct
MPAAKRVKLDGGDKKYSIGLDIGTNSVGWAVITDEYKVPSKKFKVLGNTDRHSIKKNLIGALLFDSGETAEATRLKRTARRRYTRRKNRICYLQEIFSNEMAKVDDSFFHRLEESFLVEEDKKHERHPIFGNIVDEVAYHEKYPTIYHLRKKLVDSTDKADLRLIYLALAHMIKFRGHFLIEGDLNPDNSDVDKLFIQLVQTYNQLFEENPINASGVDAKAILSARLSKSRRLENLIAQLPGEKKNGLFGNLIALSLGLTPNFKSNFDLAEDAKLQLSKDTYDDDLDNLLAQIGDQYADLFLAAKNLSDAILLSDILRVNTEITKAPLSASMIKRYDEHHQDLTLLKALVRQQLPEKYKEIFFDQSKNGYAGYIDGGASQEEFYKFIKPILEKMDGTEELLVKLNREDLLRKQRTFDNGSIPHQIHLGELHAILRRQEDFYPFLKDNREKIEKILTFRIPYYVGPLARGNSRFAWMTRKSEETITPWNFEEVVDKGASAQSFIERMTNFDKNLPNEKVLPKHSLLYEYFTVYNELTKVKYVTEGMRKPAFLSGEQKKAIVDLLFKTNRKVTVKQLKEDYFKKIECFDSVEISGVEDRFNASLGTYHDLLKIIKDKDFLDNEENEDILEDIVLTLTLFEDREMIEERLKTYAHLFDDKVMKQLKRRRYTGWGRLSRKLINGIRDKQSGKTILDFLKSDGFANRNFMQLIHDDSLTFKEDIQKAQVSGQGDSLHEHIANLAGSPAIKKGILQTVKVVDELVKVMGRHKPENIVIEMARENQTTQKGQKNSRERMKRIEEGIKELGSQILKEHPVENTQLQNEKLYLYYLQNGRDMYVDQELDINRLSDYDVDHIVPQSFLKDDSIDNKVLTRSDKARGKSDNVPSEEVVKKMKNYWRQLLNAKLITQRKFDNLTKAERGGLSELDKAGFIKRQLVETRQITKHVAQILDSRMNTKYDENDKLIREVKVITLKSKLVSDFRKDFQFYKVREINNYHHAHDAYLNAVVGTALIKKYPKLESEFVYGDYKVYDVRKMIAKSEQEIGKATAKYFFYSNIMNFFKTEITLANGEIRKRPLIETNGETGEIVWDKGRDFATVRKVLSMPQVNIVKKTEVQTGGFSKESILPKRNSDKLIARKKDWDPKKYGGFDSPTVAYSVLVVAKVEKGKSKKLKSVKELLGITIMERSSFEKNPIDFLEAKGYKEVKKDLIIKLPKYSLFELENGRKRMLASAGELQKGNELALPSKYVNFLYLASHYEKLKGSPEDNEQKQLFVEQHKHYLDEIIEQISEFSKRVILADANLDKVLSAYNKHRDKPIREQAENIIHLFTLTNLGAPAAFKYFDTTIDRKRYTSTKEVLDATLIHQSITGLYETRIDLSQLGGDGGEAAAKGGGGGVPWLMKKPLQLTVLVPLHEYQERLLQQTALPKEQKELLQKLFLKYDALWQHWENQVGHRRIKPHNIATGTLAPRPQKQYPINPKAKPSIQIVIDDLLKQGVLIQQNSTMNTPVYPVPKPDGKWRMVLDYREVNKTIPLIAAQNQHSAGILSSIYRGKYKTTLDLTNGFWAHPITPESYWLTAFTWQGKQYCWTRLPQGFLNSPALFNADVVDLLKEIPNVQAYVDDIYISHDDPQEHLEQLEKIFSILLNAGYVVSLKKSEIAQREVEFLGFNITKEGRGLTDTFKQKLLNITPPKDLKQLQSILGLLNFARNFIPNYSELVKPLYTIVAPANGKFISWTEDNSNQLQHIISVLNQADNLEERNPETRLIIKVNSSPSAGYIRYYNEGSKRPIMYVNYIFSKAEAKFTQTEKLLTTMHKGLIKAMDLAMGQEILVYSPIVSMTKIQRTPLPERKALPVRWITWMTYLEDPRIQFHYDKSLPELQQIPNVTEDVIAKTKHPSEFAMVFYTDGSAIKHPDVNKSHSAGMGIAQVQFIPEYKIVHQWSIPLGDHTAQLAEIAAVEFACKKALKISGPVLIVTDSFYVAESANKELPYWKSNGFLNNKKKPLRHVSKWKSIAECLQLKPDIIIMHEKGHQQPMTTLHTEGNNLADKLATQGSYVVHAGKRTADGSEFEKRTADGSEFESPKKKAKVE

SEQ ID NO: 444 - protein, 2087 aa, synthetic construct
MPAAKRVKLDGGDKKYSIGLDIGTNSVGWAVITDEYKVPSKKFKVLGNTDRHSIKKNLIGALLFDSGETAEATRLKRTARRRYTRRKNRICYLQEIFSNEMAKVDDSFFHRLEESFLVEEDKKHERHPIFGNIVDEVAYHEKYPTIYHLRKKLVDSTDKADLRLIYLALAHMIKFRGHFLIEGDLNPDNSDVDKLFIQLVQTYNQLFEENPINASGVDAKAILSARLSKSRRLENLIAQLPGEKKNGLFGNLIALSLGLTPNFKSNFDLAEDAKLQLSKDTYDDDLDNLLAQIGDQYADLFLAAKNLSDAILLSDILRVNTEITKAPLSASMIKRYDEHHQDLTLLKALVRQQLPEKYKEIFFDQSKNGYAGYIDGGASQEEFYKFIKPILEKMDGTEELLVKLNREDLLRKQRTFDNGSIPHQIHLGELHAILRRQEDFYPFLKDNREKIEKILTFRIPYYVGPLARGNSRFAWMTRKSEETITPWNFEEVVDKGASAQSFIERMTNFDKNLPNEKVLPKHSLLYEYFTVYNELTKVKYVTEGMRKPAFLSGEQKKAIVDLLFKTNRKVTVKQLKEDYFKKIECFDSVEISGVEDRFNASLGTYHDLLKIIKDKDFLDNEENEDILEDIVLTLTLFEDREMIEERLKTYAHLFDDKVMKQLKRRRYTGWGRLSRKLINGIRDKQSGKTILDFLKSDGFANRNFMQLIHDDSLTFKEDIQKAQVSGQGDSLHEHIANLAGSPAIKKGILQTVKVVDELVKVMGRHKPENIVIEMARENQTTQKGQKNSRERMKRIEEGIKELGSQILKEHPVENTQLQNEKLYLYYLQNGRDMYVDQELDINRLSDYDVDHIVPQSFLKDDSIDNKVLTRSDKARGKSDNVPSEEVVKKMKNYWRQLLNAKLITQRKFDNLTKAERGGLSELDKAGFIKRQLVETRQITKHVAQILDSRMNTKYDENDKLIREVKVITLKSKLVSDFRKDFQFYKVREINNYHHAHDAYLNAVVGTALIKKYPKLESEFVYGDYKVYDVRKMIAKSEQEIGKATAKYFFYSNIMNFFKTEITLANGEIRKRPLIETNGETGEIVWDKGRDFATVRKVLSMPQVNIVKKTEVQTGGFSKESILPKRNSDKLIARKKDWDPKKYGGFDSPTVAYSVLVVAKVEKGKSKKLKSVKELLGITIMERSSFEKNPIDFLEAKGYKEVKKDLIIKLPKYSLFELENGRKRMLASAGELQKGNELALPSKYVNFLYLASHYEKLKGSPEDNEQKQLFVEQHKHYLDEIIEQISEFSKRVILADANLDKVLSAYNKHRDKPIREQAENIIHLFTLTNLGAPAAFKYFDTTIDRKRYTSTKEVLDATLIHQSITGLYETRIDLSQLGGDGGPAPGGSEAAAKGGVPWLMKKPLQLTVLVPLHEYQERLLQQTALPKEQKELLQKLFLKYDALWQHWENQVGHRRIKPHNIATGTLAPRPQKQYPINPKAKPSIQIVIDDLLKQGVLIQQNSTMNTPVYPVPKPDGKWRMVLDYREVNKTIPLIAAQNQHSAGILSSIYRGKYKTTLDLTNGFWAHPITPESYWLTAFTWQGKQYCWTRLPQGFLNSPALFNADVVDLLKEIPNVQAYVDDIYISHDDPQEHLEQLEKIFSILLNAGYVVSLKKSEIAQREVEFLGFNITKEGRGLTDTFKQKLLNITPPKDLKQLQSILGLLNFARNFIPNYSELVKPLYTIVAPANGKFISWTEDNSNQLQHIISVLNQADNLEERNPETRLIIKVNSSPSAGYIRYYNEGSKRPIMYVNYIFSKAEAKFTQTEKLLTTMHKGLIKAMDLAMGQEILVYSPIVSMTKIQRTPLPERKALPVRWITWMTYLEDPRIQFHYDKSLPELQQIPNVTEDVIAKTKHPSEFAMVFYTDGSAIKHPDVNKSHSAGMGIAQVQFIPEYKIVHQWSIPLGDHTAQLAEIAAVEFACKKALKISGPVLIVTDSFYVAESANKELPYWKSNGFLNNKKKPLRHVSKWKSIAECLQLKPDIIIMHEKGHQQPMTTLHTEGNNLADKLATQGSYVVHAGKRTADGSEFEKRTADGSEFESPKKKAKVE

SEQ ID NO: 445 - protein, 2091 aa, synthetic construct
MPAAKRVKLDGGDKKYSIGLDIGTNSVGWAVITDEYKVPSKKFKVLGNTDRHSIKKNLIGALLFDSGETAEATRLKRTARRRYTRRKNRICYLQEIFSNEMAKVDDSFFHRLEESFLVEEDKKHERHPIFGNIVDEVAYHEKYPTIYHLRKKLVDSTDKADLRLIYLALAHMIKFRGHFLIEGDLNPDNSDVDKLFIQLVQTYNQLFEENPINASGVDAKAILSARLSKSRRLENLIAQLPGEKKNGLFGNLIALSLGLTPNFKSNFDLAEDAKLQLSKDTYDDDLDNLLAQIGDQYADLFLAAKNLSDAILLSDILRVNTEITKAPLSASMIKRYDEHHQDLTLLKALVRQQLPEKYKEIFFDQSKNGYAGYIDGGASQEEFYKFIKPILEKMDGTEELLVKLNREDLLRKQRTFDNGSIPHQIHLGELHAILRRQEDFYPFLKDNREKIEKILTFRIPYYVGPLARGNSRFAWMTRKSEETITPWNFEEVVDKGASAQSFIERMTNFDKNLPNEKVLPKHSLLYEYFTVYNELTKVKYVTEGMRKPAFLSGEQKKAIVDLLFKTNRKVTVKQLKEDYFKKIECFDSVEISGVEDRFNASLGTYHDLLKIIKDKDFLDNEENEDILEDIVLTLTLFEDREMIEERLKTYAHLFDDKVMKQLKRRRYTGWGRLSRKLINGIRDKQSGKTILDFLKSDGFANRNFMQLIHDDSLTFKEDIQKAQVSGQGDSLHEHIANLAGSPAIKKGILQTVKVVDELVKVMGRHKPENIVIEMARENQTTQKGQKNSRERMKRIEEGIKELGSQILKEHPVENTQLQNEKLYLYYLQNGRDMYVDQELDINRLSDYDVDHIVPQSFLKDDSIDNKVLTRSDKARGKSDNVPSEEVVKKMKNYWRQLLNAKLITQRKFDNLTKAERGGLSELDKAGFIKRQLVETRQITKHVAQILDSRMNTKYDENDKLIREVKVITLKSKLVSDFRKDFQFYKVREINNYHHAHDAYLNAVVGTALIKKYPKLESEFVYGDYKVYDVRKMIAKSEQEIGKATAKYFFYSNIMNFFKTEITLANGEIRKRPLIETNGETGEIVWDKGRDFATVRKVLSMPQVNIVKKTEVQTGGFSKESILPKRNSDKLIARKKDWDPKKYGGFDSPTVAYSVLVVAKVEKGKSKKLKSVKELLGITIMERSSFEKNPIDFLEAKGYKEVKKDLIIKLPKYSLFELENGRKRMLASAGELQKGNELALPSKYVNFLYLASHYEKLKGSPEDNEQKQLFVEQHKHYLDEIIEQISEFSKRVILADANLDKVLSAYNKHRDKPIREQAENIIHLFTLTNLGAPAAFKYFDTTIDRKRYTSTKEVLDATLIHQSITGLYETRIDLSQLGGDGGGGGGSEAAAKGGGGSGGVPWLMKKPLQLTVLVPLHEYQERLLQQTALPKEQKELLQKLFLKYDALWQHWENQVGHRRIKPHNIATGTLAPRPQKQYPINPKAKPSIQIVIDDLLKQGVLIQQNSTMNTPVYPVPKPDGKWRMVLDYREVNKTIPLIAAQNQHSAGILSSIYRGKYKTTLDLTNGFWAHPITPESYWLTAFTWQGKQYCWTRLPQGFLNSPALFNADVVDLLKEIPNVQAYVDDIYISHDDPQEHLEQLEKIFSILLNAGYVVSLKKSEIAQREVEFLGFNITKEGRGLTDTFKQKLLNITPPKDLKQLQSILGKLNFARNFIPNYSELVKPLYTIVAPANGKFISWTEDNSNQLQHIISVLNQADNLEERNPETRLIIKVNSSPSAGYIRYYNEGSKRPIMYVNYIFSKAEAKFTQTEKLLTTMHKGLIKAMDLAMGQEILVYSPIVSMTKIQRTPLPERKALPVRWITWMTYLEDPRIQFHYDKSLPELQQIPNVTEDVIAKTKHPSEFAMVFYTDGSAIKHPDVNKSHSAGMGIAQVQFIPEYKIVHQWSIPLGDHTAQLAEIAAVEFACKKALKISGPVLIVTDSFYVAESANKELPYWKSNGFLNNKKKPLRHVSKWKSIAECLQLKPDIIIMHEKGHQQPMTTLHTEGNNLADKLATQGSYVVHAGKRTADGSEFEKRTADGSEFESPKKKAKVE

SEQ ID NO: 446 - protein, 2082 aa, synthetic construct
MPAAKRVKLDGGDKKYSIGLDIGTNSVGWAVITDEYKVPSKKFKVLGNTDRHSIKKNLIGALLFDSGETAEATRLKRTARRRYTRRKNRICYLQEIFSNEMAKVDDSFFHRLEESFLVEEDKKHERHPIFGNIVDEVAYHEKYPTIYHLRKKLVDSTDKADLRLIYLALAHMIKFRGHFLIEGDLNPDNSDVDKLFIQLVQTYNQLFEENPINASGVDAKAILSARLSKSRRLENLIAQLPGEKKNGLFGNLIALSLGLTPNFKSNFDLAEDAKLQLSKDTYDDDLDNLLAQIGDQYADLFLAAKNLSDAILLSDILRVNTEITKAPLSASMIKRYDEHHQDLTLLKALVRQQLPEKYKEIFFDQSKNGYAGYIDGGASQEEFYKFIKPILEKMDGTEELLVKLNREDLLRKQRTFDNGSIPHQIHLGELHAILRRQEDFYPFLKDNREKIEKILTFRIPYYVGPLARGNSRFAWMTRKSEETITPWNFEEVVDKGASAQSFIERMTNFDKNLPNEKVLPKHSLLYEYFTVYNELTKVKYVTEGMRKPAFLSGEQKKAIVDLLFKTNRKVTVKQLKEDYFKKIECFDSVEISGVEDRFNASLGTYHDLLKIIKDKDFLDNEENEDILEDIVLTLTLFEDREMIEERLKTYAHLFDDKVMKQLKRRRYTGWGRLSRKLINGIRDKQSGKTILDFLKSDGFANRNFMQLIHDDSLTFKEDIQKAQVSGQGDSLHEHIANLAGSPAIKKGILQTVKVVDELVKVMGRHKPENIVIEMARENQTTQKGQKNSRERMKRIEEGIKELGSQILKEHPVENTQLQNEKLYLYYLQNGRDMYVDQELDINRLSDYDVDHIVPQSFLKDDSIDNKVLTRSDKARGKSDNVPSEEVVKKMKNYWRQLLNAKLITQRKFDNLTKAERGGLSELDKAGFIKRQLVETRQITKHVAQILDSRMNTKYDENDKLIREVKVITLKSKLVSDFRKDFQFYKVREINNYHHAHDAYLNAVVGTALIKKYPKLESEFVYGDYKVYDVRKMIAKSEQEIGKATAKYFFYSNIMNFFKTEITLANGEIRKRPLIETNGETGEIVWDKGRDFATVRKVLSMPQVNIVKKTEVQTGGFSKESILPKRNSDKLIARKKDWDPKKYGGFDSPTVAYSVLVVAKVEKGKSKKLKSVKELLGITIMERSSFEKNPIDFLEAKGYKEVKKDLIIKLPKYSLFELENGRKRMLASAGELQKGNELALPSKYVNFLYLASHYEKLKGSPEDNEQKQLFVEQHKHYLDEIIEQISEFSKRVILADANLDKVLSAYNKHRDKPIREQAENIIHLFTLTNLGAPAAFKYFDTTIDRKRYTSTKEVLDATLIHQSITGLYETRIDLSQLGGDGGGGGGSSGGVPWLMKKPLQLTVLVPLHEYQERLLQQTALPKEQKELLQKLFLKYDALWQHWENQVGHRRIKPHNIATGTLAPRPQKQYPINPKAKPSIQIVIDDLLKQGVLIQQNSTMNTPVYPVPKPDGKWRMVLDYREVNKTIPLIAAQNQHSAGILSSIYRGKYKTTLDLTNGFWAHPITPESYWLTAFTWQGKQYCWTRLPQGFLNSPALFNADVVDLLKEIPNVQAYVDDIYISHDDPQEHLEQLEKIFSILLNAGYVVSLKKSEIAQREVEFLGFNITKEGRGLTDTFKQKLLNITPPKDLKQLQSILGKLNFARNFIPNYSELVKPLYTIVAPANGKFISWTEDNSNQLQHIISVLNQADNLEERNPETRLIIKVNSSPSAGYIRYYNEGSKRPIMYVNYIFSKAEAKFTQTEKLLTTMHKGLIKAMDLAMGQEILVYSPIVSMTKIQRTPLPERKALPVRWITWMTYLEDPRIQFHYDKSLPELQQIPNVTEDVIAKTKHPSEFAMVFYTDGSAIKHPDVNKSHSAGMGIAQVQFIPEYKIVHQWSIPLGDHTAQLAEIAAVEFACKKALKISGPVLIVTDSFYVAESANKELPYWKSNGFLNNKKKPLRHVSKWKSIAECLQLKPDIIIMHEKGHQQPMTTLHTEGNNLADKLATQGSYVVHAGKRTADGSEFEKRTADGSEFESPKKKAKVE

SEQ ID NO: 447 - protein, 2101 aa, synthetic construct
MPAAKRVKLDGGDKKYSIGLDIGTNSVGWAVITDEYKVPSKKFKVLGNTDRHSIKKNLIGALLFDSGETAEATRLKRTARRRYTRRKNRICYLQEIFSNEMAKVDDSFFHRLEESFLVEEDKKHERHPIFGNIVDEVAYHEKYPTIYHLRKKLVDSTDKADLRLIYLALAHMIKFRGHFLIEGDLNPDNSDVDKLFIQLVQTYNQLFEENPINASGVDAKAILSARLSKSRRLENLIAQLPGEKKNGLFGNLIALSLGLTPNFKSNFDLAEDAKLQLSKDTYDDDLDNLLAQIGDQYADLFLAAKNLSDAILLSDILRVNTEITKAPLSASMIKRYDEHHQDLTLLKALVRQQLPEKYKEIFFDQSKNGYAGYIDGGASQEEFYKFIKPILEKMDGTEELLVKLNREDLLRKQRTFDNGSIPHQIHLGELHAILRRQEDFYPFLKDNREKIEKILTFRIPYYVGPLARGNSRFAWMTRKSEETITPWNFEEVVDKGASAQSFIERMTNFDKNLPNEKVLPKHSLLYEYFTVYNELTKVKYVTEGMRKPAFLSGEQKKAIVDLLFKTNRKVTVKQLKEDYFKKIECFDSVEISGVEDRFNASLGTYHDLLKIIKDKDFLDNEENEDILEDIVLTLTLFEDREMIEERLKTYAHLFDDKVMKQLKRRRYTGWGRLSRKLINGIRDKQSGKTILDFLKSDGFANRNFMQLIHDDSLTFKEDIQKAQVSGQGDSLHEHIANLAGSPAIKKGILQTVKVVDELVKVMGRHKPENIVIEMARENQTTQKGQKNSRERMKRIEEGIKELGSQILKEHPVENTQLQNEKLYLYYLQNGRDMYVDQELDINRLSDYDVDHIVPQSFLKDDSIDNKVLTRSDKARGKSDNVPSEEVVKKMKNYWRQLLNAKLITQRKFDNLTKAERGGLSELDKAGFIKRQLVETRQITKHVAQILDSRMNTKYDENDKLIREVKVITLKSKLVSDFRKDFQFYKVREINNYHHAHDAYLNAVVGTALIKKYPKLESEFVYGDYKVYDVRKMIAKSEQEIGKATAKYFFYSNIMNFFKTEITLANGEIRKRPLIETNGETGEIVWDKGRDFATVRKVLSMPQVNIVKKTEVQTGGFSKESILPKRNSDKLIARKKDWDPKKYGGFDSPTVAYSVLVVAKVEKGKSKKLKSVKELLGITIMERSSFEKNPIDFLEAKGYKEVKKDLIIKLPKYSLFELENGRKRMLASAGELQKGNELALPSKYVNFLYLASHYEKLKGSPEDNEQKQLFVEQHKHYLDEIIEQISEFSKRVILADANLDKVLSAYNKHRDKPIREQAENIIHLFTLTNLGAPAAFKYFDTTIDRKRYTSTKEVLDATLIHQSITGLYETRIDLSQLGGDGGEAAAKEAAAKEAAAKEAAAKEAAAKGGVPWLMKKPLQLTVLVPLHEYQERLLQQTALPKEQKELLQKLFLKYDALWQHWENQVGHRRIKPHNIATGTLAPRPQKQYPINPKAKPSIQIVIDDLLKQGVLIQQNSTMNTPVYPVPKPDGKWRMVLDYREVNKTIPLIAAQNQHSAGILSSIYRGKYKTTLDLTNGFWAHPITPESYWLTAFTWQGKQYCWTRLPQGFLNSPALFNADVVDLLKEIPNVQAYVDDIYISHDDPQEHLEQLEKIFSILLNAGYVVSLKKSEIAQREVEFLGFNITKEGRGLTDTFKQKLLNITPPKDLKQLQSILGKLNFARNFIPNYSELVKPLYTIVAPANGKFISWTEDNSNQLQHIISVLNQADNLEERNPETRLIIKVNSSPSAGYIRYYNEGSKRPIMYVNYIFSKAEAKFTQTEKLLTTMHKGLIKAMDLAMGQEILVYSPIVSMTKIQRTPLPERKALPVRWITWMTYLEDPRIQFHYDKSLPELQQIPNVTEDVIAKTKHPSEFAMVFYTDGSAIKHPDVNKSHSAGMGIAQVQFIPEYKIVHQWSIPLGDHTAQLAEIAAVEFACKKALKISGPVLIVTDSFYVAESANKELPYWKSNGFLNNKKKPLRHVSKWKSIAECLQLKPDIIIMHEKGHQQPMTTLHTEGNNLADKLATQGSYVVHAGKRTADGSEFEKRTADGSEFESPKKKAKVE

SEQ ID NO: 448 - protein, 2085 aa, synthetic construct
MPAAKRVKLDGGDKKYSIGLDIGTNSVGWAVITDEYKVPSKKFKVLGNTDRHSIKKNLIGALLFDSGETAEATRLKRTARRRYTRRKNRICYLQEIFSNEMAKVDDSFFHRLEESFLVEEDKKHERHPIFGNIVDEVAYHEKYPTIYHLRKKLVDSTDKADLRLIYLALAHMIKFRGHFLIEGDLNPDNSDVDKLFIQLVQTYNQLFEENPINASGVDAKAILSARLSKSRRLENLIAQLPGEKKNGLFGNLIALSLGLTPNFKSNFDLAEDAKLQLSKDTYDDDLDNLLAQIGDQYADLFLAAKNLSDAILLSDILRVNTEITKAPLSASMIKRYDEHHQDLTLLKALVRQQLPEKYKEIFFDQSKNGYAGYIDGGASQEEFYKFIKPILEKMDGTEELLVKLNREDLLRKQRTFDNGSIPHQIHLGELHAILRRQEDFYPFLKDNREKIEKILTFRIPYYVGPLARGNSRFAWMTRKSEETITPWNFEEVVDKGASAQSFIERMTNFDKNLPNEKVLPKHSLLYEYFTVYNELTKVKYVTEGMRKPAFLSGEQKKAIVDLLFKTNRKVTVKQLKEDYFKKIECFDSVEISGVEDRFNASLGTYHDLLKIIKDKDFLDNEENEDILEDIVLTLTLFEDREMIEERLKTYAHLFDDKVMKQLKRRRYTGWGRLSRKLINGIRDKQSGKTILDFLKSDGFANRNFMQLIHDDSLTFKEDIQKAQVSGQGDSLHEHIANLAGSPAIKKGILQTVKVVDELVKVMGRHKPENIVIEMARENQTTQKGQKNSRERMKRIEEGIKELGSQILKEHPVENTQLQNEKLYLYYLQNGRDMYVDQELDINRLSDYDVDHIVPQSFLKDDSIDNKVLTRSDKARGKSDNVPSEEVVKKMKNYWRQLLNAKLITQRKFDNLTKAERGGLSELDKAGFIKRQLVETRQITKHVAQILDSRMNTKYDENDKLIREVKVITLKSKLVSDFRKDFQFYKVREINNYHHAHDAYLNAVVGTALIKKYPKLESEFVYGDYKVYDVRKMIAKSEQEIGKATAKYFFYSNIMNFFKTEITLANGEIRKRPLIETNGETGEIVWDKGRDFATVRKVLSMPQVNIVKKTEVQTGGFSKESILPKRNSDKLIARKKDWDPKKYGGFDSPTVAYSVLVVAKVEKGKSKKLKSVKELLGITIMERSSFEKNPIDFLEAKGYKEVKKDLIIKLPKYSLFELENGRKRMLASAGELQKGNELALPSKYVNFLYLASHYEKLKGSPEDNEQKQLFVEQHKHYLDEIIEQISEFSKRVILADANLDKVLSAYNKHRDKPIREQAENIIHLFTLTNLGAPAAFKYFDTTIDRKRYTSTKEVLDATLIHQSITGLYETRIDLSQLGGDGGGGGPAPGGSGGVPWLMKKPLQLTVLVPLHEYQERLLQQTALPKEQKELLQKLFLKYDALWQHWENQVGHRRIKPHNIATGTLAPRPQKQYPINPKAKPSIQIVIDDLLKQGVLIQQNSTMNTPVYPVPKPDGKWRMVLDYREVNKTIPLIAAQNQHSAGILSSIYRGKYKTTLDLTNGFWAHPITPESYWLTAFTWQGKQYCWTRLPQGFLNSPALFNADVVDLLKEIPNVQAYVDDIYISHDDPQEHLEQLEKIFSILLNAGYVVSLKKSEIAQREVEFLGFNITKEGRGLTDTFKQKLLNITPPKDLKQLQSILGKLNFARNFIPNYSELVKPLYTIVAPANGKFISWTEDNSNQLQHIISVLNQADNLEERNPETRLIIKVNSSPSAGYIRYYNEGSKRPIMYVNYIFSKAEAKFTQTEKLLTTMHKGLIKAMDLAMGQEILVYSPIVSMTKIQRTPLPERKALPVRWITWMTYLEDPRIQFHYDKSLPELQQIPNVTEDVIAKTKHPSEFAMVFYTDGSAIKHPDVNKSHSAGMGIAQVQFIPEYKIVHQWSIPLGDHTAQLAEIAAVEFACKKALKISGPVLIVTDSFYVAESANKELPYWKSNGFLNNKKKPLRHVSKWKSIAECLQLKPDIIIMHEKGHQQPMTTLHTEGNNLADKLATQGSYVVHAGKRTADGSEFEKRTADGSEFESPKKKAKVE

SEQ ID NO: 449 - protein, 2088 aa, synthetic construct
MPAAKRVKLDGGDKKYSIGLDIGTNSVGWAVITDEYKVPSKKFKVLGNTDRHSIKKNLIGALLFDSGETAEATRLKRTARRRYTRRKNRICYLQEIFSNEMAKVDDSFFHRLEESFLVEEDKKHERHPIFGNIVDEVAYHEKYPTIYHLRKKLVDSTDKADLRLIYLALAHMIKFRGHFLIEGDLNPDNSDVDKLFIQLVQTYNQLFEENPINASGVDAKAILSARLSKSRRLENLIAQLPGEKKNGLFGNLIALSLGLTPNFKSNFDLAEDAKLQLSKDTYDDDLDNLLAQIGDQYADLFLAAKNLSDAILLSDILRVNTEITKAPLSASMIKRYDEHHQDLTLLKALVRQQLPEKYKEIFFDQSKNGYAGYIDGGASQEEFYKFIKPILEKMDGTEELLVKLNREDLLRKQRTFDNGSIPHQIHLGELHAILRRQEDFYPFLKDNREKIEKILTFRIPYYVGPLARGNSRFAWMTRKSEETITPWNFEEVVDKGASAQSFIERMTNFDKNLPNEKVLPKHSLLYEYFTVYNELTKVKYVTEGMRKPAFLSGEQKKAIVDLLFKTNRKVTVKQLKEDYFKKIECFDSVEISGVEDRFNASLGTYHDLLKIIKDKDFLDNEENEDILEDIVLTLTLFEDREMIEERLKTYAHLFDDKVMKQLKRRRYTGWGRLSRKLINGIRDKQSGKTILDFLKSDGFANRNFMQLIHDDSLTFKEDIQKAQVSGQGDSLHEHIANLAGSPAIKKGILQTVKVVDELVKVMGRHKPENIVIEMARENQTTQKGQKNSRERMKRIEEGIKELGSQILKEHPVENTQLQNEKLYLYYLQNGRDMYVDQELDINRLSDYDVDHIVPQSFLKDDSIDNKVLTRSDKARGKSDNVPSEEVVKKMKNYWRQLLNAKLITQRKFDNLTKAERGGLSELDKAGFIKRQLVETRQITKHVAQILDSRMNTKYDENDKLIREVKVITLKSKLVSDFRKDFQFYKVREINNYHHAHDAYLNAVVGTALIKKYPKLESEFVYGDYKVYDVRKMIAKSEQEIGKATAKYFFYSNIMNFFKTEITLANGEIRKRPLIETNGETGEIVWDKGRDFATVRKVLSMPQVNIVKKTEVQTGGFSKESILPKRNSDKLIARKKDWDPKKYGGFDSPTVAYSVLVVAKVEKGKSKKLKSVKELLGITIMERSSFEKNPIDFLEAKGYKEVKKDLIIKLPKYSLFELENGRKRMLASAGELQKGNELALPSKYVNFLYLASHYEKLKGSPEDNEQKQLFVEQHKHYLDEIIEQISEFSKRVILADANLDKVLSAYNKHRDKPIREQAENIIHLFTLTNLGAPAAFKYFDTTIDRKRYTSTKEVLDATLIHQSITGLYETRIDLSQLGGDGGGSSGSSGSSGSSGGVPWLMKKPLQLTVLVPLHEYQERLLQQTALPKEQKELLQKLFLKYDALWQHWENQVGHRRIKPHNIATGTLAPRPQKQYPINPKAKPSIQIVIDDLLKQGVLIQQNSTMNTPVYPVPKPDGKWRMVLDYREVNKTIPLIAAQNQHSAGILSSIYRGKYKTTLDLTNGFWAHPITPESYWLTAFTWQGKQYCWTRLPQGFLNSPALFNADVVDLLKEIPNVQAYVDDIYISHDDPQEHLEQLEKIFSILLNAGYVVSLKKSEIAQREVEFLGFNITKEGRGLTDTFKQKLLNITPPKDLKQLQSILGKLNFARNFIPNYSELVKPLYTIVAPANGKFISWTEDNSNQLQHIISVLNQADNLEERNPETRLIIKVNSSPSAGYIRYYNEGSKRPIMYVNYIFSKAEAKFTQTEKLLTTMHKGLIKAMDLAMGQEILVYSPIVSMTKIQRTPLPERKALPVRWITWMTYLEDPRIQFHYDKSLPELQQIPNVTEDVIAKTKHPSEFAMVFYTDGSAIKHPDVNKSHSAGMGIAQVQFIPEYKIVHQWSIPLGDHTAQLAEIAAVEFACKKALKISGPVLIVTDSFYVAESANKELPYWKSNGFLNNKKKPLRHVSKWKSIAECLQLKPDIIIMHEKGHQQPMTTLHTEGNNLADKLATQGSYVVHAGKRTADGSEFEKRTADGSEFESPKKKAKVE

SEQ ID NO: 450 - protein, 2094 aa, synthetic construct
MPAAKRVKLDGGDKKYSIGLDIGTNSVGWAVITDEYKVPSKKFKVLGNTDRHSIKKNLIGALLFDSGETAEATRLKRTARRRYTRRKNRICYLQEIFSNEMAKVDDSFFHRLEESFLVEEDKKHERHPIFGNIVDEVAYHEKYPTIYHLRKKLVDSTDKADLRLIYLALAHMIKFRGHFLIEGDLNPDNSDVDKLFIQLVQTYNQLFEENPINASGVDAKAILSARLSKSRRLENLIAQLPGEKKNGLFGNLIALSLGLTPNFKSNFDLAEDAKLQLSKDTYDDDLDNLLAQIGDQYADLFLAAKNLSDAILLSDILRVNTEITKAPLSASMIKRYDEHHQDLTLLKALVRQQLPEKYKEIFFDQSKNGYAGYIDGGASQEEFYKFIKPILEKMDGTEELLVKLNREDLLRKQRTFDNGSIPHQIHLGELHAILRRQEDFYPFLKDNREKIEKILTFRIPYYVGPLARGNSRFAWMTRKSEETITPWNFEEVVDKGASAQSFIERMTNFDKNLPNEKVLPKHSLLYEYFTVYNELTKVKYVTEGMRKPAFLSGEQKKAIVDLLFKTNRKVTVKQLKEDYFKKIECFDSVEISGVEDRFNASLGTYHDLLKIIKDKDFLDNEENEDILEDIVLTLTLFEDREMIEERLKTYAHLFDDKVMKQLKRRRYTGWGRLSRKLINGIRDKQSGKTILDFLKSDGFANRNFMQLIHDDSLTFKEDIQKAQVSGQGDSLHEHIANLAGSPAIKKGILQTVKVVDELVKVMGRHKPENIVIEMARENQTTQKGQKNSRERMKRIEEGIKELGSQILKEHPVENTQLQNEKLYLYYLQNGRDMYVDQELDINRLSDYDVDHIVPQSFLKDDSIDNKVLTRSDKARGKSDNVPSEEVVKKMKNYWRQLLNAKLITQRKFDNLTKAERGGLSELDKAGFIKRQLVETRQITKHVAQILDSRMNTKYDENDKLIREVKVITLKSKLVSDFRKDFQFYKVREINNYHHAHDAYLNAVVGTALIKKYPKLESEFVYGDYKVYDVRKMIAKSEQEIGKATAKYFFYSNIMNFFKTEITLANGEIRKRPLIETNGETGEIVWDKGRDFATVRKVLSMPQVNIVKKTEVQTGGFSKESILPKRNSDKLIARKKDWDPKKYGGFDSPTVAYSVLVVAKVEKGKSKKLKSVKELLGITIMERSSFEKNPIDFLEAKGYKEVKKDLIIKLPKYSLFELENGRKRMLASAGELQKGNELALPSKYVNFLYLASHYEKLKGSPEDNEQKQLFVEQHKHYLDEIIEQISEFSKRVILADANLDKVLSAYNKHRDKPIREQAENIIHLFTLTNLGAPAAFKYFDTTIDRKRYTSTKEVLDATLIHQSITGLYETRIDLSQLGGDGGGSSGSSGSSGSSGSSGSSGGVPWLMKKPLQLTVLVPLHEYQERLLQQTALPKEQKELLQKLFLKYDALWQHWENQVGHRRIKPHNIATGTLAPRPQKQYPINPKAKPSIQIVIDDLLKQGVLIQQNSTMNTPVYPVPKPDGKWRMVLDYREVNKTIPLIAAQNQHSAGILSSIYRGKYKTTLDLTNGFWAHPITPESYWLTAFTWQGKQYCWTRLPQGFLNSPALFNADVVDLLKEIPNVQAYVDDIYISHDDPQEHLEQLEKIFSILLNAGYVVSLKKSEIAQREVEFLGFNITKEGRGLTDTFKQKLLNITPPKDLKQLQSILGKLNFARNFIPNYSELVKPLYTIVAPANGKFISWTEDNSNQLQHIISVLNQADNLEERNPETRLIIKVNSSPSAGYIRYYNEGSKRPIMYVNYIFSKAEAKFTQTEKLLTTMHKGLIKAMDLAMGQEILVYSPIVSMTKIQRTPLPERKALPVRWITWMTYLEDPRIQFHYDKSLPELQQIPNVTEDVIAKTKHPSEFAMVFYTDGSAIKHPDVNKSHSAGMGIAQVQFIPEYKIVHQWSIPLGDHTAQLAEIAAVEFACKKALKISGPVLIVTDSFYVAESANKELPYWKSNGFLNNKKKPLRHVSKWKSIAECLQLKPDIIIMHEKGHQQPMTTLHTEGNNLADKLATQGSYVVHAGKRTADGSEFEKRTADGSEFESPKKKAKVE

SEQ ID NO: 451 - protein, 2087 aa, synthetic construct
MPAAKRVKLDGGDKKYSIGLDIGTNSVGWAVITDEYKVPSKKFKVLGNTDRHSIKKNLIGALLFDSGETAEATRLKRTARRRYTRRKNRICYLQEIFSNEMAKVDDSFFHRLEESFLVEEDKKHERHPIFGNIVDEVAYHEKYPTIYHLRKKLVDSTDKADLRLIYLALAHMIKFRGHFLIEGDLNPDNSDVDKLFIQLVQTYNQLFEENPINASGVDAKAILSARLSKSRRLENLIAQLPGEKKNGLFGNLIALSLGLTPNFKSNFDLAEDAKLQLSKDTYDDDLDNLLAQIGDQYADLFLAAKNLSDAILLSDILRVNTEITKAPLSASMIKRYDEHHQDLTLLKALVRQQLPEKYKEIFFDQSKNGYAGYIDGGASQEEFYKFIKPILEKMDGTEELLVKLNREDLLRKQRTFDNGSIPHQIHLGELHAILRRQEDFYPFLKDNREKIEKILTFRIPYYVGPLARGNSRFAWMTRKSEETITPWNFEEVVDKGASAQSFIERMTNFDKNLPNEKVLPKHSLLYEYFTVYNELTKVKYVTEGMRKPAFLSGEQKKAIVDLLFKTNRKVTVKQLKEDYFKKIECFDSVEISGVEDRFNASLGTYHDLLKIIKDKDFLDNEENEDILEDIVLTLTLFEDREMIEERLKTYAHLFDDKVMKQLKRRRYTGWGRLSRKLINGIRDKQSGKTILDFLKSDGFANRNFMQLIHDDSLTFKEDIQKAQVSGQGDSLHEHIANLAGSPAIKKGILQTVKVVDELVKVMGRHKPENIVIEMARENQTTQKGQKNSRERMKRIEEGIKELGSQILKEHPVENTQLQNEKLYLYYLQNGRDMYVDQELDINRLSDYDVDHIVPQSFLKDDSIDNKVLTRSDKARGKSDNVPSEEVVKKMKNYWRQLLNAKLITQRKFDNLTKAERGGLSELDKAGFIKRQLVETRQITKHVAQILDSRMNTKYDENDKLIREVKVITLKSKLVSDFRKDFQFYKVREINNYHHAHDAYLNAVVGTALIKKYPKLESEFVYGDYKVYDVRKMIAKSEQEIGKATAKYFFYSNIMNFFKTEITLANGEIRKRPLIETNGETGEIVWDKGRDFATVRKVLSMPQVNIVKKTEVQTGGFSKESILPKRNSDKLIARKKDWDPKKYGGFDSPTVAYSVLVVAKVEKGKSKKLKSVKELLGITIMERSSFEKNPIDFLEAKGYKEVKKDLIIKLPKYSLFELENGRKRMLASAGELQKGNELALPSKYVNFLYLASHYEKLKGSPEDNEQKQLFVEQHKHYLDEIIEQISEFSKRVILADANLDKVLSAYNKHRDKPIREQAENIIHLFTLTNLGAPAAFKYFDTTIDRKRYTSTKEVLDATLIHQSITGLYETRIDLSQLGGDGGPAPGGGEAAAKGGVPWLMKKPLQLTVLVPLHEYQERLLQQTALPKEQKELLQKLFLKYDALWQHWENQVGHRRIKPHNIATGTLAPRPQKQYPINPKAKPSIQIVIDDLLKQGVLIQQNSTMNTPVYPVPKPDGKWRMVLDYREVNKTIPLIAAQNQHSAGILSSIYRGKYKTTLDLTNGFWAHPITPESYWLTAFTWQGKQYCWTRLPQGFLNSPALFNADVVDLLKEIPNVQAYVDDIYISHDDPQEHLEQLEKIFSILLNAGYVVSLKKSEIAQREVEFLGFNITKEGRGLTDTFKQKLLNITPPKDLKQLQSILGKLNFARNFIPNYSELVKPLYTIVAPANGKFISWTEDNSNQLQHIISVLNQADNLEERNPETRLIIKVNSSPSAGYIRYYNEGSKRPIMYVNYIFSKAEAKFTQTEKLLTTMHKGLIKAMDLAMGQEILVYSPIVSMTKIQRTPLPERKALPVRWITWMTYLEDPRIQFHYDKSLPELQQIPNVTEDVIAKTKHPSEFAMVFYTDGSAIKHPDVNKSHSAGMGIAQVQFIPEYKIVHQWSIPLGDHTAQLAEIAAVEFACKKALKISGPVLIVTDSFYVAESANKELPYWKSNGFLNNKKKPLRHVSKWKSIAECLQLKPDIIIMHEKGHQQPMTTLHTEGNNLADKLATQGSYVVHAGKRTADGSEFEKRTADGSEFESPKKKAKVE

SEQ ID NO: 452 - protein, 2081 aa, synthetic construct
MPAAKRVKLDGGDKKYSIGLDIGTNSVGWAVITDEYKVPSKKFKVLGNTDRHSIKKNLIGALLFDSGETAEATRLKRTARRRYTRRKNRICYLQEIFSNEMAKVDDSFFHRLEESFLVEEDKKHERHPIFGNIVDEVAYHEKYPTIYHLRKKLVDSTDKADLRLIYLALAHMIKFRGHFLIEGDLNPDNSDVDKLFIQLVQTYNQLFEENPINASGVDAKAILSARLSKSRRLENLIAQLPGEKKNGLFGNLIALSLGLTPNFKSNFDLAEDAKLQLSKDTYDDDLDNLLAQIGDQYADLFLAAKNLSDAILLSDILRVNTEITKAPLSASMIKRYDEHHQDLTLLKALVRQQLPEKYKEIFFDQSKNGYAGYIDGGASQEEFYKFIKPILEKMDGTEELLVKLNREDLLRKQRTFDNGSIPHQIHLGELHAILRRQEDFYPFLKDNREKIEKILTFRIPYYVGPLARGNSRFAWMTRKSEETITPWNFEEVVDKGASAQSFIERMTNFDKNLPNEKVLPKHSLLYEYFTVYNELTKVKYVTEGMRKPAFLSGEQKKAIVDLLFKTNRKVTVKQLKEDYFKKIECFDSVEISGVEDRFNASLGTYHDLLKIIKDKDFLDNEENEDILEDIVLTLTLFEDREMIEERLKTYAHLFDDKVMKQLKRRRYTGWGRLSRKLINGIRDKQSGKTILDFLKSDGFANRNFMQLIHDDSLTFKEDIQKAQVSGQGDSLHEHIANLAGSPAIKKGILQTVKVVDELVKVMGRHKPENIVIEMARENQTTQKGQKNSRERMKRIEEGIKELGSQILKEHPVENTQLQNEKLYLYYLQNGRDMYVDQELDINRLSDYDVDHIVPQSFLKDDSIDNKVLTRSDKARGKSDNVPSEEVVKKMKNYWRQLLNAKLITQRKFDNLTKAERGGLSELDKAGFIKRQLVETRQITKHVAQILDSRMNTKYDENDKLIREVKVITLKSKLVSDFRKDFQFYKVREINNYHHAHDAYLNAVVGTALIKKYPKLESEFVYGDYKVYDVRKMIAKSEQEIGKATAKYFFYSNIMNFFKTEITLANGEIRKRPLIETNGETGEIVWDKGRDFATVRKVLSMPQVNIVKKTEVQTGGFSKESILPKRNSDKLIARKKDWDPKKYGGFDSPTVAYSVLVVAKVEKGKSKKLKSVKELLGITIMERSSFEKNPIDFLEAKGYKEVKKDLIIKLPKYSLFELENGRKRMLASAGELQKGNELALPSKYVNFLYLASHYEKLKGSPEDNEQKQLFVEQHKHYLDEIIEQISEFSKRVILADANLDKVLSAYNKHRDKPIREQAENIIHLFTLTNLGAPAAFKYFDTTIDRKRYTSTKEVLDATLIHQSITGLYETRIDLSQLGGDGGGGGGSGGVPWLMKKPLQLTVLVPLHEYQERLLQQTALPKEQKELLQKLFLKYDALWQHWENQVGHRRIKPHNIATGTLAPRPQKQYPINPKAKPSIQIVIDDLLKQGVLIQQNSTMNTPVYPVPKPDGKWRMVLDYREVNKTIPLIAAQNQHSAGILSSIYRGKYKTTLDLTNGFWAHPITPESYWLTAFTWQGKQYCWTRLPQGFLNSPALFNADVVDLLKEIPNVQAYVDDIYISHDDPQEHLEQLEKIFSILLNAGYVVSLKKSEIAQREVEFLGFNITKEGRGLTDTFKQKLLNITPPKDLKQLQSILGKLNFARNFIPNYSELVKPLYTIVAPANGKFISWTEDNSNQLQHIISVLNQADNLEERNPETRLIIKVNSSPSAGYIRYYNEGSKRPIMYVNYIFSKAEAKFTQTEKLLTTMHKGLIKAMDLAMGQEILVYSPIVSMTKIQRTPLPERKALPVRWITWMTYLEDPRIQFHYDKSLPELQQIPNVTEDVIAKTKHPSEFAMVFYTDGSAIKHPDVNKSHSAGMGIAQVQFIPEYKIVHQWSIPLGDHTAQLAEIAAVEFACKKALKISGPVLIVTDSFYVAESANKELPYWKSNGFLNNKKKPLRHVSKWKSIAECLQLKPDIIIMHEKGHQQPMTTLHTEGNNLADKLATQGSYVVHAGKRTADGSEFEKRTADGSEFESPKKKAKVE

SEQ ID NO: 453 - protein, 2084 aa, synthetic construct
MPAAKRVKLDGGDKKYSIGLDIGTNSVGWAVITDEYKVPSKKFKVLGNTDRHSIKKNLIGALLFDSGETAEATRLKRTARRRYTRRKNRICYLQEIFSNEMAKVDDSFFHRLEESFLVEEDKKHERHPIFGNIVDEVAYHEKYPTIYHLRKKLVDSTDKADLRLIYLALAHMIKFRGHFLIEGDLNPDNSDVDKLFIQLVQTYNQLFEENPINASGVDAKAILSARLSKSRRLENLIAQLPGEKKNGLFGNLIALSLGLTPNFKSNFDLAEDAKLQLSKDTYDDDLDNLLAQIGDQYADLFLAAKNLSDAILLSDILRVNTEITKAPLSASMIKRYDEHHQDLTLLKALVRQQLPEKYKEIFFDQSKNGYAGYIDGGASQEEFYKFIKPILEKMDGTEELLVKLNREDLLRKQRTFDNGSIPHQIHLGELHAILRRQEDFYPFLKDNREKIEKILTFRIPYYVGPLARGNSRFAWMTRKSEETITPWNFEEVVDKGASAQSFIERMTNFDKNLPNEKVLPKHSLLYEYFTVYNELTKVKYVTEGMRKPAFLSGEQKKAIVDLLFKTNRKVTVKQLKEDYFKKIECFDSVEISGVEDRFNASLGTYHDLLKIIKDKDFLDNEENEDILEDIVLTLTLFEDREMIEERLKTYAHLFDDKVMKQLKRRRYTGWGRLSRKLINGIRDKQSGKTILDFLKSDGFANRNFMQLIHDDSLTFKEDIQKAQVSGQGDSLHEHIANLAGSPAIKKGILQTVKVVDELVKVMGRHKPENIVIEMARENQTTQKGQKNSRERMKRIEEGIKELGSQILKEHPVENTQLQNEKLYLYYLQNGRDMYVDQELDINRLSDYDVDHIVPQSFLKDDSIDNKVLTRSDKARGKSDNVPSEEVVKKMKNYWRQLLNAKLITQRKFDNLTKAERGGLSELDKAGFIKRQLVETRQITKHVAQILDSRMNTKYDENDKLIREVKVITLKSKLVSDFRKDFQFYKVREINNYHHAHDAYLNAVVGTALIKKYPKLESEFVYGDYKVYDVRKMIAKSEQEIGKATAKYFFYSNIMNFFKTEITLANGEIRKRPLIETNGETGEIVWDKGRDFATVRKVLSMPQVNIVKKTEVQTGGFSKESILPKRNSDKLIARKKDWDPKKYGGFDSPTVAYSVLVVAKVEKGKSKKLKSVKELLGITIMERSSFEKNPIDFLEAKGYKEVKKDLIIKLPKYSLFELENGRKRMLASAGELQKGNELALPSKYVNFLYLASHYEKLKGSPEDNEQKQLFVEQHKHYLDEIIEQISEFSKRVILADANLDKVLSAYNKHRDKPIREQAENIIHLFTLTNLGAPAAFKYFDTTIDRKRYTSTKEVLDATLIHQSITGLYETRIDLSQLGGDGGEAAAKPAPGGVPWLMKKPLQLTVLVPLHEYQERLLQQTALPKEQKELLQKLFLKYDALWQHWENQVGHRRIKPHNIATGTLAPRPQKQYPINPKAKPSIQIVIDDLLKQGVLIQQNSTMNTPVYPVPKPDGKWRMVLDYREVNKTIPLIAAQNQHSAGILSSIYRGKYKTTLDLTNGFWAHPITPESYWLTAFTWQGKQYCWTRLPQGFLNSPALFNADVVDLLKEIPNVQAYVDDIYISHDDPQEHLEQLEKIFSILLNAGYVVSLKKSEIAQREVEFLGFNITKEGRGLTDTFKQKLLNITPPKDLKQLQSILGKLNFARNFIPNYSELVKPLYTIVAPANGKFISWTEDNSNQLQHIISVLNQADNLEERNPETRLIIKVNSSPSAGYIRYYNEGSKRPIMYVNYIFSKAEAKFTQTEKLLTTMHKGLIKAMDLAMGQEILVYSPIVSMTKIQRTPLPERKALPVRWITWMTYLEDPRIQFHYDKSLPELQQIPNVTEDVIAKTKHPSEFAMVFYTDGSAIKHPDVNKSHSAGMGIAQVQFIPEYKIVHQWSIPLGDHTAQLAEIAAVEFACKKALKISGPVLIVTDSFYVAESANKELPYWKSNGFLNNKKKPLRHVSKWKSIAECLQLKPDIIIMHEKGHQQPMTTLHTEGNNLADKLATQGSYVVHAGKRTADGSEFEKRTADGSEFESPKKKAKVE

SEQ ID NO: 454 - protein, 2085 aa, synthetic construct
MPAAKRVKLDGGDKKYSIGLDIGTNSVGWAVITDEYKVPSKKFKVLGNTDRHSIKKNLIGALLFDSGETAEATRLKRTARRRYTRRKNRICYLQEIFSNEMAKVDDSFFHRLEESFLVEEDKKHERHPIFGNIVDEVAYHEKYPTIYHLRKKLVDSTDKADLRLIYLALAHMIKFRGHFLIEGDLNPDNSDVDKLFIQLVQTYNQLFEENPINASGVDAKAILSARLSKSRRLENLIAQLPGEKKNGLFGNLIALSLGLTPNFKSNFDLAEDAKLQLSKDTYDDDLDNLLAQIGDQYADLFLAAKNLSDAILLSDILRVNTEITKAPLSASMIKRYDEHHQDLTLLKALVRQQLPEKYKEIFFDQSKNGYAGYIDGGASQEEFYKFIKPILEKMDGTEELLVKLNREDLLRKQRTFDNGSIPHQIHLGELHAILRRQEDFYPFLKDNREKIEKILTFRIPYYVGPLARGNSRFAWMTRKSEETITPWNFEEVVDKGASAQSFIERMTNFDKNLPNEKVLPKHSLLYEYFTVYNELTKVKYVTEGMRKPAFLSGEQKKAIVDLLFKTNRKVTVKQLKEDYFKKIECFDSVEISGVEDRFNASLGTYHDLLKIIKDKDFLDNEENEDILEDIVLTLTLFEDREMIEERLKTYAHLFDDKVMKQLKRRRYTGWGRLSRKLINGIRDKQSGKTILDFLKSDGFANRNFMQLIHDDSLTFKEDIQKAQVSGQGDSLHEHIANLAGSPAIKKGILQTVKVVDELVKVMGRHKPENIVIEMARENQTTQKGQKNSRERMKRIEEGIKELGSQILKEHPVENTQLQNEKLYLYYLQNGRDMYVDQELDINRLSDYDVDHIVPQSFLKDDSIDNKVLTRSDKARGKSDNVPSEEVVKKMKNYWRQLLNAKLITQRKFDNLTKAERGGLSELDKAGFIKRQLVETRQITKHVAQILDSRMNTKYDENDKLIREVKVITLKSKLVSDFRKDFQFYKVREINNYHHAHDAYLNAVVGTALIKKYPKLESEFVYGDYKVYDVRKMIAKSEQEIGKATAKYFFYSNIMNFFKTEITLANGEIRKRPLIETNGETGEIVWDKGRDFATVRKVLSMPQVNIVKKTEVQTGGFSKESILPKRNSDKLIARKKDWDPKKYGGFDSPTVAYSVLVVAKVEKGKSKKLKSVKELLGITIMERSSFEKNPIDFLEAKGYKEVKKDLIIKLPKYSLFELENGRKRMLASAGELQKGNELALPSKYVNFLYLASHYEKLKGSPEDNEQKQLFVEQHKHYLDEIIEQISEFSKRVILADANLDKVLSAYNKHRDKPIREQAENIIHLFTLTNLGAPAAFKYFDTTIDRKRYTSTKEVLDATLIHQSITGLYETRIDLSQLGGDGGGGGGSSGGSGGVPWLMKKPLQLTVLVPLHEYQERLLQQTALPKEQKELLQKLFLKYDALWQHWENQVGHRRIKPHNIATGTLAPRPQKQYPINPKAKPSIQIVIDDLLKQGVLIQQNSTMNTPVYPVPKPDGKWRMVLDYREVNKTIPLIAAQNQHSAGILSSIYRGKYKTTLDLTNGFWAHPITPESYWLTAFTWQGKQYCWTRLPQGFLNSPALFNADVVDLLKEIPNVQAYVDDIYISHDDPQEHLEQLEKIFSILLNAGYVVSLKKSEIAQREVEFLGFNITKEGRGLTDTFKQKLLNITPPKDLKQLQSILGKLNFARNFIPNYSELVKPLYTIVAPANGKFISWTEDNSNQLQHIISVLNQADNLEERNPETRLIIKVNSSPSAGYIRYYNEGSKRPIMYVNYIFSKAEAKFTQTEKLLTTMHKGLIKAMDLAMGQEILVYSPIVSMTKIQRTPLPERKALPVRWITWMTYLEDPRIQFHYDKSLPELQQIPNVTEDVIAKTKHPSEFAMVFYTDGSAIKHPDVNKSHSAGMGIAQVQFIPEYKIVHQWSIPLGDHTAQLAEIAAVEFACKKALKISGPVLIVTDSFYVAESANKELPYWKSNGFLNNKKKPLRHVSKWKSIAECLQLKPDIIIMHEKGHQQPMTTLHTEGNNLADKLATQGSYVVHAGKRTADGSEFEKRTADGSEFESPKKKAKVE

SEQ ID NO: 455 - protein, 2085 aa, synthetic construct
MPAAKRVKLDGGDKKYSIGLDIGTNSVGWAVITDEYKVPSKKFKVLGNTDRHSIKKNLIGALLFDSGETAEATRLKRTARRRYTRRKNRICYLQEIFSNEMAKVDDSFFHRLEESFLVEEDKKHERHPIFGNIVDEVAYHEKYPTIYHLRKKLVDSTDKADLRLIYLALAHMIKFRGHFLIEGDLNPDNSDVDKLFIQLVQTYNQLFEENPINASGVDAKAILSARLSKSRRLENLIAQLPGEKKNGLFGNLIALSLGLTPNFKSNFDLAEDAKLQLSKDTYDDDLDNLLAQIGDQYADLFLAAKNLSDAILLSDILRVNTEITKAPLSASMIKRYDEHHQDLTLLKALVRQQLPEKYKEIFFDQSKNGYAGYIDGGASQEEFYKFIKPILEKMDGTEELLVKLNREDLLRKQRTFDNGSIPHQIHLGELHAILRRQEDFYPFLKDNREKIEKILTFRIPYYVGPLARGNSRFAWMTRKSEETITPWNFEEVVDKGASAQSFIERMTNFDKNLPNEKVLPKHSLLYEYFTVYNELTKVKYVTEGMRKPAFLSGEQKKAIVDLLFKTNRKVTVKQLKEDYFKKIECFDSVEISGVEDRFNASLGTYHDLLKIIKDKDFLDNEENEDILEDIVLTLTLFEDREMIEERLKTYAHLFDDKVMKQLKRRRYTGWGRLSRKLINGIRDKQSGKTILDFLKSDGFANRNFMQLIHDDSLTFKEDIQKAQVSGQGDSLHEHIANLAGSPAIKKGILQTVKVVDELVKVMGRHKPENIVIEMARENQTTQKGQKNSRERMKRIEEGIKELGSQILKEHPVENTQLQNEKLYLYYLQNGRDMYVDQELDINRLSDYDVDHIVPQSFLKDDSIDNKVLTRSDKARGKSDNVPSEEVVKKMKNYWRQLLNAKLITQRKFDNLTKAERGGLSELDKAGFIKRQLVETRQITKHVAQILDSRMNTKYDENDKLIREVKVITLKSKLVSDFRKDFQFYKVREINNYHHAHDAYLNAVVGTALIKKYPKLESEFVYGDYKVYDVRKMIAKSEQEIGKATAKYFFYSNIMNFFKTEITLANGEIRKRPLIETNGETGEIVWDKGRDFATVRKVLSMPQVNIVKKTEVQTGGFSKESILPKRNSDKLIARKKDWDPKKYGGFDSPTVAYSVLVVAKVEKGKSKKLKSVKELLGITIMERSSFEKNPIDFLEAKGYKEVKKDLIIKLPKYSLFELENGRKRMLASAGELQKGNELALPSKYVNFLYLASHYEKLKGSPEDNEQKQLFVEQHKHYLDEIIEQISEFSKRVILADANLDKVLSAYNKHRDKPIREQAENIIHLFTLTNLGAPAAFKYFDTTIDRKRYTSTKEVLDATLIHQSITGLYETRIDLSQLGGDGGGSSPAPGGSGGVPWLMKKPLQLTVLVPLHEYQERLLQQTALPKEQKELLQKLFLKYDALWQHWENQVGHRRIKPHNIATGTLAPRPQKQYPINPKAKPSIQIVIDDLLKQGVLIQQNSTMNTPVYPVPKPDGKWRMVLDYREVNKTIPLIAAQNQHSAGILSSIYRGKYKTTLDLTNGFWAHPITPESYWLTAFTWQGKQYCWTRLPQGFLNSPALFNADVVDLLKEIPNVQAYVDDIYISHDDPQEHLEQLEKIFSILLNAGYVVSLKKSEIAQREVEFLGFNITKEGRGLTDTFKQKLLNITPPKDLKQLQSILGKLNFARNFIPNYSELVKPLYTIVAPANGKFISWTEDNSNQLQHIISVLNQADNLEERNPETRLIIKVNSSPSAGYIRYYNEGSKRPIMYVNYIFSKAEAKFTQTEKLLTTMHKGLIKAMDLAMGQEILVYSPIVSMTKIQRTPLPERKALPVRWITWMTYLEDPRIQFHYDKSLPELQQIPNVTEDVIAKTKHPSEFAMVFYTDGSAIKHPDVNKSHSAGMGIAQVQFIPEYKIVHQWSIPLGDHTAQLAEIAAVEFACKKALKISGPVLIVTDSFYVAESANKELPYWKSNGFLNNKKKPLRHVSKWKSIAECLQLKPDIIIMHEKGHQQPMTTLHTEGNNLADKLATQGSYVVHAGKRTADGSEFEKRTADGSEFESPKKKAKVE

SEQ ID NO: 456 - protein, 2085 aa, synthetic construct
MPAAKRVKLDGGDKKYSIGLDIGTNSVGWAVITDEYKVPSKKFKVLGNTDRHSIKKNLIGALLFDSGETAEATRLKRTARRRYTRRKNRICYLQEIFSNEMAKVDDSFFHRLEESFLVEEDKKHERHPIFGNIVDEVAYHEKYPTIYHLRKKLVDSTDKADLRLIYLALAHMIKFRGHFLIEGDLNPDNSDVDKLFIQLVQTYNQLFEENPINASGVDAKAILSARLSKSRRLENLIAQLPGEKKNGLFGNLIALSLGLTPNFKSNFDLAEDAKLQLSKDTYDDDLDNLLAQIGDQYADLFLAAKNLSDAILLSDILRVNTEITKAPLSASMIKRYDEHHQDLTLLKALVRQQLPEKYKEIFFDQSKNGYAGYIDGGASQEEFYKFIKPILEKMDGTEELLVKLNREDLLRKQRTFDNGSIPHQIHLGELHAILRRQEDFYPFLKDNREKIEKILTFRIPYYVGPLARGNSRFAWMTRKSEETITPWNFEEVVDKGASAQSFIERMTNFDKNLPNEKVLPKHSLLYEYFTVYNELTKVKYVTEGMRKPAFLSGEQKKAIVDLLFKTNRKVTVKQLKEDYFKKIECFDSVEISGVEDRFNASLGTYHDLLKIIKDKDFLDNEENEDILEDIVLTLTLFEDREMIEERLKTYAHLFDDKVMKQLKRRRYTGWGRLSRKLINGIRDKQSGKTILDFLKSDGFANRNFMQLIHDDSLTFKEDIQKAQVSGQGDSLHEHIANLAGSPAIKKGILQTVKVVDELVKVMGRHKPENIVIEMARENQTTQKGQKNSRERMKRIEEGIKELGSQILKEHPVENTQLQNEKLYLYYLQNGRDMYVDQELDINRLSDYDVDHIVPQSFLKDDSIDNKVLTRSDKARGKSDNVPSEEVVKKMKNYWRQLLNAKLITQRKFDNLTKAERGGLSELDKAGFIKRQLVETRQITKHVAQILDSRMNTKYDENDKLIREVKVITLKSKLVSDFRKDFQFYKVREINNYHHAHDAYLNAVVGTALIKKYPKLESEFVYGDYKVYDVRKMIAKSEQEIGKATAKYFFYSNIMNFFKTEITLANGEIRKRPLIETNGETGEIVWDKGRDFATVRKVLSMPQVNIVKKTEVQTGGFSKESILPKRNSDKLIARKKDWDPKKYGGFDSPTVAYSVLVVAKVEKGKSKKLKSVKELLGITIMERSSFEKNPIDFLEAKGYKEVKKDLIIKLPKYSLFELENGRKRMLASAGELQKGNELALPSKYVNFLYLASHYEKLKGSPEDNEQKQLFVEQHKHYLDEIIEQISEFSKRVILADANLDKVLSAYNKHRDKPIREQAENIIHLFTLTNLGAPAAFKYFDTTIDRKRYTSTKEVLDATLIHQSITGLYETRIDLSQLGGDGGPAPGSSGGGGGVPWLMKKPLQLTVLVPLHEYQERLLQQTALPKEQKELLQKLFLKYDALWQHWENQVGHRRIKPHNIATGTLAPRPQKQYPINPKAKPSIQIVIDDLLKQGVLIQQNSTMNTPVYPVPKPDGKWRMVLDYREVNKTIPLIAAQNQHSAGILSSIYRGKYKTTLDLTNGFWAHPITPESYWLTAFTWQGKQYCWTRLPQGFLNSPALFNADVVDLLKEIPNVQAYVDDIYISHDDPQEHLEQLEKIFSILLNAGYVVSLKKSEIAQREVEFLGFNITKEGRGLTDTFKQKLLNITPPKDLKQLQSILGKLNFARNFIPNYSELVKPLYTIVAPANGKFISWTEDNSNQLQHIISVLNQADNLEERNPETRLIIKVNSSPSAGYIRYYNEGSKRPIMYVNYIFSKAEAKFTQTEKLLTTMHKGLIKAMDLAMGQEILVYSPIVSMTKIQRTPLPERKALPVRWITWMTYLEDPRIQFHYDKSLPELQQIPNVTEDVIAKTKHPSEFAMVFYTDGSAIKHPDVNKSHSAGMGIAQVQFIPEYKIVHQWSIPLGDHTAQLAEIAAVEFACKKALKISGPVLIVTDSFYVAESANKELPYWKSNGFLNNKKKPLRHVSKWKSIAECLQLKPDIIIMHEKGHQQPMTTLHTEGNNLADKLATQGSYVVHAGKRTADGSEFEKRTADGSEFESPKKKAKVE

SEQ ID NO: 457 - protein, 2082 aa, synthetic construct
MPAAKRVKLDGGDKKYSIGLDIGTNSVGWAVITDEYKVPSKKFKVLGNTDRHSIKKNLIGALLFDSGETAEATRLKRTARRRYTRRKNRICYLQEIFSNEMAKVDDSFFHRLEESFLVEEDKKHERHPIFGNIVDEVAYHEKYPTIYHLRKKLVDSTDKADLRLIYLALAHMIKFRGHFLIEGDLNPDNSDVDKLFIQLVQTYNQLFEENPINASGVDAKAILSARLSKSRRLENLIAQLPGEKKNGLFGNLIALSLGLTPNFKSNFDLAEDAKLQLSKDTYDDDLDNLLAQIGDQYADLFLAAKNLSDAILLSDILRVNTEITKAPLSASMIKRYDEHHQDLTLLKALVRQQLPEKYKEIFFDQSKNGYAGYIDGGASQEEFYKFIKPILEKMDGTEELLVKLNREDLLRKQRTFDNGSIPHQIHLGELHAILRRQEDFYPFLKDNREKIEKILTFRIPYYVGPLARGNSRFAWMTRKSEETITPWNFEEVVDKGASAQSFIERMTNFDKNLPNEKVLPKHSLLYEYFTVYNELTKVKYVTEGMRKPAFLSGEQKKAIVDLLFKTNRKVTVKQLKEDYFKKIECFDSVEISGVEDRFNASLGTYHDLLKIIKDKDFLDNEENEDILEDIVLTLTLFEDREMIEERLKTYAHLFDDKVMKQLKRRRYTGWGRLSRKLINGIRDKQSGKTILDFLKSDGFANRNFMQLIHDDSLTFKEDIQKAQVSGQGDSLHEHIANLAGSPAIKKGILQTVKVVDELVKVMGRHKPENIVIEMARENQTTQKGQKNSRERMKRIEEGIKELGSQILKEHPVENTQLQNEKLYLYYLQNGRDMYVDQELDINRLSDYDVDHIVPQSFLKDDSIDNKVLTRSDKARGKSDNVPSEEVVKKMKNYWRQLLNAKLITQRKFDNLTKAERGGLSELDKAGFIKRQLVETRQITKHVAQILDSRMNTKYDENDKLIREVKVITLKSKLVSDFRKDFQFYKVREINNYHHAHDAYLNAVVGTALIKKYPKLESEFVYGDYKVYDVRKMIAKSEQEIGKATAKYFFYSNIMNFFKTEITLANGEIRKRPLIETNGETGEIVWDKGRDFATVRKVLSMPQVNIVKKTEVQTGGFSKESILPKRNSDKLIARKKDWDPKKYGGFDSPTVAYSVLVVAKVEKGKSKKLKSVKELLGITIMERSSFEKNPIDFLEAKGYKEVKKDLIIKLPKYSLFELENGRKRMLASAGELQKGNELALPSKYVNFLYLASHYEKLKGSPEDNEQKQLFVEQHKHYLDEIIEQISEFSKRVILADANLDKVLSAYNKHRDKPIREQAENIIHLFTLTNLGAPAAFKYFDTTIDRKRYTSTKEVLDATLIHQSITGLYETRIDLSQLGGDGGGGSGGSGGVPWLMKKPLQLTVLVPLHEYQERLLQQTALPKEQKELLQKLFLKYDALWQHWENQVGHRRIKPHNIATGTLAPRPQKQYPINPKAKPSIQIVIDDLLKQGVLIQQNSTMNTPVYPVPKPDGKWRMVLDYREVNKTIPLIAAQNQHSAGILSSIYRGKYKTTLDLTNGFWAHPITPESYWLTAFTWQGKQYCWTRLPQGFLNSPALFNADVVDLLKEIPNVQAYVDDIYISHDDPQEHLEQLEKIFSILLNAGYVVSLKKSEIAQREVEFLGFNITKEGRGLTDTFKQKLLNITPPKDLKQLQSILGKLNFARNFIPNYSELVKPLYTIVAPANGKFISWTEDNSNQLQHIISVLNQADNLEERNPETRLIIKVNSSPSAGYIRYYNEGSKRPIMYVNYIFSKAEAKFTQTEKLLTTMHKGLIKAMDLAMGQEILVYSPIVSMTKIQRTPLPERKALPVRWITWMTYLEDPRIQFHYDKSLPELQQIPNVTEDVIAKTKHPSEFAMVFYTDGSAIKHPDVNKSHSAGMGIAQVQFIPEYKIVHQWSIPLGDHTAQLAEIAAVEFACKKALKISGPVLIVTDSFYVAESANKELPYWKSNGFLNNKKKPLRHVSKWKSIAECLQLKPDIIIMHEKGHQQPMTTLHTEGNNLADKLATQGSYVVHAGKRTADGSEFEKRTADGSEFESPKKKAKVE

SEQ ID NO: 458 - protein, 2087 aa, synthetic construct
MPAAKRVKLDGGDKKYSIGLDIGTNSVGWAVITDEYKVPSKKFKVLGNTDRHSIKKNLIGALLFDSGETAEATRLKRTARRRYTRRKNRICYLQEIFSNEMAKVDDSFFHRLEESFLVEEDKKHERHPIFGNIVDEVAYHEKYPTIYHLRKKLVDSTDKADLRLIYLALAHMIKFRGHFLIEGDLNPDNSDVDKLFIQLVQTYNQLFEENPINASGVDAKAILSARLSKSRRLENLIAQLPGEKKNGLFGNLIALSLGLTPNFKSNFDLAEDAKLQLSKDTYDDDLDNLLAQIGDQYADLFLAAKNLSDAILLSDILRVNTEITKAPLSASMIKRYDEHHQDLTLLKALVRQQLPEKYKEIFFDQSKNGYAGYIDGGASQEEFYKFIKPILEKMDGTEELLVKLNREDLLRKQRTFDNGSIPHQIHLGELHAILRRQEDFYPFLKDNREKIEKILTFRIPYYVGPLARGNSRFAWMTRKSEETITPWNFEEVVDKGASAQSFIERMTNFDKNLPNEKVLPKHSLLYEYFTVYNELTKVKYVTEGMRKPAFLSGEQKKAIVDLLFKTNRKVTVKQLKEDYFKKIECFDSVEISGVEDRFNASLGTYHDLLKIIKDKDFLDNEENEDILEDIVLTLTLFEDREMIEERLKTYAHLFDDKVMKQLKRRRYTGWGRLSRKLINGIRDKQSGKTILDFLKSDGFANRNFMQLIHDDSLTFKEDIQKAQVSGQGDSLHEHIANLAGSPAIKKGILQTVKVVDELVKVMGRHKPENIVIEMARENQTTQKGQKNSRERMKRIEEGIKELGSQILKEHPVENTQLQNEKLYLYYLQNGRDMYVDQELDINRLSDYDVDHIVPQSFLKDDSIDNKVLTRSDKARGKSDNVPSEEVVKKMKNYWRQLLNAKLITQRKFDNLTKAERGGLSELDKAGFIKRQLVETRQITKHVAQILDSRMNTKYDENDKLIREVKVITLKSKLVSDFRKDFQFYKVREINNYHHAHDAYLNAVVGTALIKKYPKLESEFVYGDYKVYDVRKMIAKSEQEIGKATAKYFFYSNIMNFFKTEITLANGEIRKRPLIETNGETGEIVWDKGRDFATVRKVLSMPQVNIVKKTEVQTGGFSKESILPKRNSDKLIARKKDWDPKKYGGFDSPTVAYSVLVVAKVEKGKSKKLKSVKELLGITIMERSSFEKNPIDFLEAKGYKEVKKDLIIKLPKYSLFELENGRKRMLASAGELQKGNELALPSKYVNFLYLASHYEKLKGSPEDNEQKQLFVEQHKHYLDEIIEQISEFSKRVILADANLDKVLSAYNKHRDKPIREQAENIIHLFTLTNLGAPAAFKYFDTTIDRKRYTSTKEVLDATLIHQSITGLYETRIDLSQLGGDGGGGGEAAAKGSSGGVPWLMKKPLQLTVLVPLHEYQERLLQQTALPKEQKELLQKLFLKYDALWQHWENQVGHRRIKPHNIATGTLAPRPQKQYPINPKAKPSIQIVIDDLLKQGVLIQQNSTMNTPVYPVPKPDGKWRMVLDYREVNKTIPLIAAQNQHSAGILSSIYRGKYKTTLDLTNGFWAHPITPESYWLTAFTWQGKQYCWTRLPQGFLNSPALFNADVVDLLKEIPNVQAYVDDIYISHDDPQEHLEQLEKIFSILLNAGYVVSLKKSEIAQREVEFLGFNITKEGRGLTDTFKQKLLNITPPKDLKQLQSILGKLNFARNFIPNYSELVKPLYTIVAPANGKFISWTEDNSNQLQHIISVLNQADNLEERNPETRLIIKVNSSPSAGYIRYYNEGSKRPIMYVNYIFSKAEAKFTQTEKLLTTMHKGLIKAMDLAMGQEILVYSPIVSMTKIQRTPLPERKALPVRWITWMTYLEDPRIQFHYDKSLPELQQIPNVTEDVIAKTKHPSEFAMVFYTDGSAIKHPDVNKSHSAGMGIAQVQFIPEYKIVHQWSIPLGDHTAQLAEIAAVEFACKKALKISGPVLIVTDSFYVAESANKELPYWKSNGFLNNKKKPLRHVSKWKSIAECLQLKPDIIIMHEKGHQQPMTTLHTEGNNLADKLATQGSYVVHAGKRTADGSEFEKRTADGSEFESPKKKAKVE

SEQ ID NO: 459 - protein, 2087 aa, synthetic construct
MPAAKRVKLDGGDKKYSIGLDIGTNSVGWAVITDEYKVPSKKFKVLGNTDRHSIKKNLIGALLFDSGETAEATRLKRTARRRYTRRKNRICYLQEIFSNEMAKVDDSFFHRLEESFLVEEDKKHERHPIFGNIVDEVAYHEKYPTIYHLRKKLVDSTDKADLRLIYLALAHMIKFRGHFLIEGDLNPDNSDVDKLFIQLVQTYNQLFEENPINASGVDAKAILSARLSKSRRLENLIAQLPGEKKNGLFGNLIALSLGLTPNFKSNFDLAEDAKLQLSKDTYDDDLDNLLAQIGDQYADLFLAAKNLSDAILLSDILRVNTEITKAPLSASMIKRYDEHHQDLTLLKALVRQQLPEKYKEIFFDQSKNGYAGYIDGGASQEEFYKFIKPILEKMDGTEELLVKLNREDLLRKQRTFDNGSIPHQIHLGELHAILRRQEDFYPFLKDNREKIEKILTFRIPYYVGPLARGNSRFAWMTRKSEETITPWNFEEVVDKGASAQSFIERMTNFDKNLPNEKVLPKHSLLYEYFTVYNELTKVKYVTEGMRKPAFLSGEQKKAIVDLLFKTNRKVTVKQLKEDYFKKIECFDSVEISGVEDRFNASLGTYHDLLKIIKDKDFLDNEENEDILEDIVLTLTLFEDREMIEERLKTYAHLFDDKVMKQLKRRRYTGWGRLSRKLINGIRDKQSGKTILDFLKSDGFANRNFMQLIHDDSLTFKEDIQKAQVSGQGDSLHEHIANLAGSPAIKKGILQTVKVVDELVKVMGRHKPENIVIEMARENQTTQKGQKNSRERMKRIEEGIKELGSQILKEHPVENTQLQNEKLYLYYLQNGRDMYVDQELDINRLSDYDVDHIVPQSFLKDDSIDNKVLTRSDKARGKSDNVPSEEVVKKMKNYWRQLLNAKLITQRKFDNLTKAERGGLSELDKAGFIKRQLVETRQITKHVAQILDSRMNTKYDENDKLIREVKVITLKSKLVSDFRKDFQFYKVREINNYHHAHDAYLNAVVGTALIKKYPKLESEFVYGDYKVYDVRKMIAKSEQEIGKATAKYFFYSNIMNFFKTEITLANGEIRKRPLIETNGETGEIVWDKGRDFATVRKVLSMPQVNIVKKTEVQTGGFSKESILPKRNSDKLIARKKDWDPKKYGGFDSPTVAYSVLVVAKVEKGKSKKLKSVKELLGITIMERSSFEKNPIDFLEAKGYKEVKKDLIIKLPKYSLFELENGRKRMLASAGELQKGNELALPSKYVNFLYLASHYEKLKGSPEDNEQKQLFVEQHKHYLDEIIEQISEFSKRVILADANLDKVLSAYNKHRDKPIREQAENIIHLFTLTNLGAPAAFKYFDTTIDRKRYTSTKEVLDATLIHQSITGLYETRIDLSQLGGDGGGGSGGGEAAAKGGVPWLMKKPLQLTVLVPLHEYQERLLQQTALPKEQKELLQKLFLKYDALWQHWENQVGHRRIKPHNIATGTLAPRPQKQYPINPKAKPSIQIVIDDLLKQGVLIQQNSTMNTPVYPVPKPDGKWRMVLDYREVNKTIPLIAAQNQHSAGILSSIYRGKYKTTLDLTNGFWAHPITPESYWLTAFTWQGKQYCWTRLPQGFLNSPALFNADVVDLLKEIPNVQAYVDDIYISHDDPQEHLEQLEKIFSILLNAGYVVSLKKSEIAQREVEFLGFNITKEGRGLTDTFKQKLLNITPPKDLKQLQSILGKLNFARNFIPNYSELVKPLYTIVAPANGKFISWTEDNSNQLQHIISVLNQADNLEERNPETRLIIKVNSSPSAGYIRYYNEGSKRPIMYVNYIFSKAEAKFTQTEKLLTTMHKGLIKAMDLAMGQEILVYSPIVSMTKIQRTPLPERKALPVRWITWMTYLEDPRIQFHYDKSLPELQQIPNVTEDVIAKTKHPSEFAMVFYTDGSAIKHPDVNKSHSAGMGIAQVQFIPEYKIVHQWSIPLGDHTAQLAEIAAVEFACKKALKISGPVLIVTDSFYVAESANKELPYWKSNGFLNNKKKPLRHVSKWKSIAECLQLKPDIIIMHEKGHQQPMTTLHTEGNNLADKLATQGSYVVHAGKRTADGSEFEKRTADGSEFESPKKKAKVE

SEQ ID NO: 460 - protein, 2185 aa, synthetic construct
MPAAKRVKLDGGDKKYSIGLDIGTNSVGWAVITDEYKVPSKKFKVLGNTDRHSIKKNLIGALLFDSGETAEATRLKRTARRRYTRRKNRICYLQEIFSNEMAKVDDSFFHRLEESFLVEEDKKHERHPIFGNIVDEVAYHEKYPTIYHLRKKLVDSTDKADLRLIYLALAHMIKFRGHFLIEGDLNPDNSDVDKLFIQLVQTYNQLFEENPINASGVDAKAILSARLSKSRRLENLIAQLPGEKKNGLFGNLIALSLGLTPNFKSNFDLAEDAKLQLSKDTYDDDLDNLLAQIGDQYADLFLAAKNLSDAILLSDILRVNTEITKAPLSASMIKRYDEHHQDLTLLKALVRQQLPEKYKEIFFDQSKNGYAGYIDGGASQEEFYKFIKPILEKMDGTEELLVKLNREDLLRKQRTFDNGSIPHQIHLGELHAILRRQEDFYPFLKDNREKIEKILTFRIPYYVGPLARGNSRFAWMTRKSEETITPWNFEEVVDKGASAQSFIERMTNFDKNLPNEKVLPKHSLLYEYFTVYNELTKVKYVTEGMRKPAFLSGEQKKAIVDLLFKTNRKVTVKQLKEDYFKKIECFDSVEISGVEDRFNASLGTYHDLLKIIKDKDFLDNEENEDILEDIVLTLTLFEDREMIEERLKTYAHLFDDKVMKQLKRRRYTGWGRLSRKLINGIRDKQSGKTILDFLKSDGFANRNFMQLIHDDSLTFKEDIQKAQVSGQGDSLHEHIANLAGSPAIKKGILQTVKVVDELVKVMGRHKPENIVIEMARENQTTQKGQKNSRERMKRIEEGIKELGSQILKEHPVENTQLQNEKLYLYYLQNGRDMYVDQELDINRLSDYDVDHIVPQSFLKDDSIDNKVLTRSDKARGKSDNVPSEEVVKKMKNYWRQLLNAKLITQRKFDNLTKAERGGLSELDKAGFIKRQLVETRQITKHVAQILDSRMNTKYDENDKLIREVKVITLKSKLVSDFRKDFQFYKVREINNYHHAHDAYLNAVVGTALIKKYPKLESEFVYGDYKVYDVRKMIAKSEQEIGKATAKYFFYSNIMNFFKTEITLANGEIRKRPLIETNGETGEIVWDKGRDFATVRKVLSMPQVNIVKKTEVQTGGFSKESILPKRNSDKLIARKKDWDPKKYGGFDSPTVAYSVLVVAKVEKGKSKKLKSVKELLGITIMERSSFEKNPIDFLEAKGYKEVKKDLIIKLPKYSLFELENGRKRMLASAGELQKGNELALPSKYVNFLYLASHYEKLKGSPEDNEQKQLFVEQHKHYLDEIIEQISEFSKRVILADANLDKVLSAYNKHRDKPIREQAENIIHLFTLTNLGAPAAFKYFDTTIDRKRYTSTKEVLDATLIHQSITGLYETRIDLSQLGGDGGGGGGSGGGGSGGGGSGGGGSGGMDPLQLLQPLEAEIKGTKLKAHWNSGATITCVPEAFLEDERPIQTMLIKTIHGEKQQDVYYLTFKVQGRKVEAEVLASPYDYILLNPSDVPWLMKKPLQLTVLVPLHEYQERLLQQTALPKEQKELLQKLFLKYDALWQHWENQVGHRRIKPHNIATGTLAPRPQKQYPINPKAKPSIQIVIDDLLKQGVLIQQNSTMNTPVYPVPKPDGKWRMVLDYREVNKTIPLIAAQNQHSAGILSSIYRGKYKTTLDLTNGFWAHPITPESYWLTAFTWQGKQYCWTRLPQGFLNSPALFNADVVDLLKEIPNVQAYVDDIYISHDDPQEHLEQLEKIFSILLNAGYVVSLKKSEIAQREVEFLGFNITKEGRGLTDTFKQKLLNITPPKDLKQLQSILGLLNFARNFIPNYSELVKPLYTIVAPANGKFISWTEDNSNQLQHIISVLNQADNLEERNPETRLIIKVNSSPSAGYIRYYNEGSKRPIMYVNYIFSKAEAKFTQTEKLLTTMHKGLIKAMDLAMGQEILVYSPIVSMTKIQRTPLPERKALPVRWITWMTYLEDPRIQFHYDKSLPELQQIPNVTEDVIAKTKHPSEFAMVFYTDGSAIKHPDVNKSHSAGMGIAQVQFIPEYKIVHQWSIPLGDHTAQLAEIAAVEFACKKALKISGPVLIVTDSFYVAESANKELPYWKSNGFLNNKKKPLRHVSKWKSIAECLQLKPDIIIMHEKGHQQPMTTLHTEGNNLADKLATQGSYVVHAGKRTADGSEFEKRTADGSEFESPKKKAKVE

SEQ ID NO: 461 - protein, 2180 aa, synthetic construct
MPAAKRVKLDGGDKKYSIGLDIGTNSVGWAVITDEYKVPSKKFKVLGNTDRHSIKKNLIGALLFDSGETAEATRLKRTARRRYTRRKNRICYLQEIFSNEMAKVDDSFFHRLEESFLVEEDKKHERHPIFGNIVDEVAYHEKYPTIYHLRKKLVDSTDKADLRLIYLALAHMIKFRGHFLIEGDLNPDNSDVDKLFIQLVQTYNQLFEENPINASGVDAKAILSARLSKSRRLENLIAQLPGEKKNGLFGNLIALSLGLTPNFKSNFDLAEDAKLQLSKDTYDDDLDNLLAQIGDQYADLFLAAKNLSDAILLSDILRVNTEITKAPLSASMIKRYDEHHQDLTLLKALVRQQLPEKYKEIFFDQSKNGYAGYIDGGASQEEFYKFIKPILEKMDGTEELLVKLNREDLLRKQRTFDNGSIPHQIHLGELHAILRRQEDFYPFLKDNREKIEKILTFRIPYYVGPLARGNSRFAWMTRKSEETITPWNFEEVVDKGASAQSFIERMTNFDKNLPNEKVLPKHSLLYEYFTVYNELTKVKYVTEGMRKPAFLSGEQKKAIVDLLFKTNRKVTVKQLKEDYFKKIECFDSVEISGVEDRFNASLGTYHDLLKIIKDKDFLDNEENEDILEDIVLTLTLFEDREMIEERLKTYAHLFDDKVMKQLKRRRYTGWGRLSRKLINGIRDKQSGKTILDFLKSDGFANRNFMQLIHDDSLTFKEDIQKAQVSGQGDSLHEHIANLAGSPAIKKGILQTVKVVDELVKVMGRHKPENIVIEMARENQTTQKGQKNSRERMKRIEEGIKELGSQILKEHPVENTQLQNEKLYLYYLQNGRDMYVDQELDINRLSDYDVDHIVPQSFLKDDSIDNKVLTRSDKARGKSDNVPSEEVVKKMKNYWRQLLNAKLITQRKFDNLTKAERGGLSELDKAGFIKRQLVETRQITKHVAQILDSRMNTKYDENDKLIREVKVITLKSKLVSDFRKDFQFYKVREINNYHHAHDAYLNAVVGTALIKKYPKLESEFVYGDYKVYDVRKMIAKSEQEIGKATAKYFFYSNIMNFFKTEITLANGEIRKRPLIETNGETGEIVWDKGRDFATVRKVLSMPQVNIVKKTEVQTGGFSKESILPKRNSDKLIARKKDWDPKKYGGFDSPTVAYSVLVVAKVEKGKSKKLKSVKELLGITIMERSSFEKNPIDFLEAKGYKEVKKDLIIKLPKYSLFELENGRKRMLASAGELQKGNELALPSKYVNFLYLASHYEKLKGSPEDNEQKQLFVEQHKHYLDEIIEQISEFSKRVILADANLDKVLSAYNKHRDKPIREQAENIIHLFTLTNLGAPAAFKYFDTTIDRKRYTSTKEVLDATLIHQSITGLYETRIDLSQLGGDGGGSSGSSGSSGSSGSSGGMDPLQLLQPLEAEIKGTKLKAHWNSGATITCVPEAFLEDERPIQTMLIKTIHGEKQQDVYYLTFKVQGRKVEAEVLASPYDYILLNPSDVPWLMKKPLQLTVLVPLHEYQERLLQQTALPKEQKELLQKLFLKYDALWQHWENQVGHRRIKPHNIATGTLAPRPQKQYPINPKAKPSIQIVIDDLLKQGVLIQQNSTMNTPVYPVPKPDGKWRMVLDYREVNKTIPLIAAQNQHSAGILSSIYRGKYKTTLDLTNGFWAHPITPESYWLTAFTWQGKQYCWTRLPQGFLNSPALFNADVVDLLKEIPNVQAYVDDIYISHDDPQEHLEQLEKIFSILLNAGYVVSLKKSEIAQREVEFLGFNITKEGRGLTDTFKQKLLNITPPKDLKQLQSILGLLNFARNFIPNYSELVKPLYTIVAPANGKFISWTEDNSNQLQHIISVLNQADNLEERNPETRLIIKVNSSPSAGYIRYYNEGSKRPIMYVNYIFSKAEAKFTQTEKLLTTMHKGLIKAMDLAMGQEILVYSPIVSMTKIQRTPLPERKALPVRWITWMTYLEDPRIQFHYDKSLPELQQIPNVTEDVIAKTKHPSEFAMVFYTDGSAIKHPDVNKSHSAGMGIAQVQFIPEYKIVHQWSIPLGDHTAQLAEIAAVEFACKKALKISGPVLIVTDSFYVAESANKELPYWKSNGFLNNKKKPLRHVSKWKSIAECLQLKPDIIIMHEKGHQQPMTTLHTEGNNLADKLATQGSYVVHAGKRTADGSEFEKRTADGSEFESPKKKAKVE

SEQ ID NO: 462 - protein, 2176 aa, synthetic construct
MPAAKRVKLDGGDKKYSIGLDIGTNSVGWAVITDEYKVPSKKFKVLGNTDRHSIKKNLIGALLFDSGETAEATRLKRTARRRYTRRKNRICYLQEIFSNEMAKVDDSFFHRLEESFLVEEDKKHERHPIFGNIVDEVAYHEKYPTIYHLRKKLVDSTDKADLRLIYLALAHMIKFRGHFLIEGDLNPDNSDVDKLFIQLVQTYNQLFEENPINASGVDAKAILSARLSKSRRLENLIAQLPGEKKNGLFGNLIALSLGLTPNFKSNFDLAEDAKLQLSKDTYDDDLDNLLAQIGDQYADLFLAAKNLSDAILLSDILRVNTEITKAPLSASMIKRYDEHHQDLTLLKALVRQQLPEKYKEIFFDQSKNGYAGYIDGGASQEEFYKFIKPILEKMDGTEELLVKLNREDLLRKQRTFDNGSIPHQIHLGELHAILRRQEDFYPFLKDNREKIEKILTFRIPYYVGPLARGNSRFAWMTRKSEETITPWNFEEVVDKGASAQSFIERMTNFDKNLPNEKVLPKHSLLYEYFTVYNELTKVKYVTEGMRKPAFLSGEQKKAIVDLLFKTNRKVTVKQLKEDYFKKIECFDSVEISGVEDRFNASLGTYHDLLKIIKDKDFLDNEENEDILEDIVLTLTLFEDREMIEERLKTYAHLFDDKVMKQLKRRRYTGWGRLSRKLINGIRDKQSGKTILDFLKSDGFANRNFMQLIHDDSLTFKEDIQKAQVSGQGDSLHEHIANLAGSPAIKKGILQTVKVVDELVKVMGRHKPENIVIEMARENQTTQKGQKNSRERMKRIEEGIKELGSQILKEHPVENTQLQNEKLYLYYLQNGRDMYVDQELDINRLSDYDVDHIVPQSFLKDDSIDNKVLTRSDKARGKSDNVPSEEVVKKMKNYWRQLLNAKLITQRKFDNLTKAERGGLSELDKAGFIKRQLVETRQITKHVAQILDSRMNTKYDENDKLIREVKVITLKSKLVSDFRKDFQFYKVREINNYHHAHDAYLNAVVGTALIKKYPKLESEFVYGDYKVYDVRKMIAKSEQEIGKATAKYFFYSNIMNFFKTEITLANGEIRKRPLIETNGETGEIVWDKGRDFATVRKVLSMPQVNIVKKTEVQTGGFSKESILPKRNSDKLIARKKDWDPKKYGGFDSPTVAYSVLVVAKVEKGKSKKLKSVKELLGITIMERSSFEKNPIDFLEAKGYKEVKKDLIIKLPKYSLFELENGRKRMLASAGELQKGNELALPSKYVNFLYLASHYEKLKGSPEDNEQKQLFVEQHKHYLDEIIEQISEFSKRVILADANLDKVLSAYNKHRDKPIREQAENIIHLFTLTNLGAPAAFKYFDTTIDRKRYTSTKEVLDATLIHQSITGLYETRIDLSQLGGDGGGGGEAAAKGSSGGMDPLQLLQPLEAEIKGTKLKAHWNSGATITCVPEAFLEDERPIQTMLIKTIHGEKQQDVYYLTFKVQGRKVEAEVLASPYDYILLNPSDVPWLMKKPLQLTVLVPLHEYQERLLQQTALPKEQKELLQKLFLKYDALWQHWENQVGHRRIKPHNIATGTLAPRPQKQYPINPKAKPSIQIVIDDLLKQGVLIQQNSTMNTPVYPVPKPDGKWRMVLDYREVNKTIPLIAAQNQHSAGILSSIYRGKYKTTLDLTNGFWAHPITPESYWLTAFTWQGKQYCWTRLPQGFLNSPALFNADVVDLLKEIPNVQAYVDDIYISHDDPQEHLEQLEKIFSILLNAGYVVSLKKSEIAQREVEFLGFNITKEGRGLTDTFKQKLLNITPPKDLKQLQSILGLLNFARNFIPNYSELVKPLYTIVAPANGKFISWTEDNSNQLQHIISVLNQADNLEERNPETRLIIKVNSSPSAGYIRYYNEGSKRPIMYVNYIFSKAEAKFTQTEKLLTTMHKGLIKAMDLAMGQEILVYSPIVSMTKIQRTPLPERKALPVRWITWMTYLEDPRIQFHYDKSLPELQQIPNVTEDVIAKTKHPSEFAMVFYTDGSAIKHPDVNKSHSAGMGIAQVQFIPEYKIVHQWSIPLGDHTAQLAEIAAVEFACKKALKISGPVLIVTDSFYVAESANKELPYWKSNGFLNNKKKPLRHVSKWKSIAECLQLKPDIIIMHEKGHQQPMTTLHTEGNNLADKLATQGSYVVHAGKRTADGSEFEKRTADGSEFESPKKKAKVE

SEQ ID NO: 463 - protein, 2176 aa, synthetic construct
MPAAKRVKLDGGDKKYSIGLDIGTNSVGWAVITDEYKVPSKKFKVLGNTDRHSIKKNLIGALLFDSGETAEATRLKRTARRRYTRRKNRICYLQEIFSNEMAKVDDSFFHRLEESFLVEEDKKHERHPIFGNIVDEVAYHEKYPTIYHLRKKLVDSTDKADLRLIYLALAHMIKFRGHFLIEGDLNPDNSDVDKLFIQLVQTYNQLFEENPINASGVDAKAILSARLSKSRRLENLIAQLPGEKKNGLFGNLIALSLGLTPNFKSNFDLAEDAKLQLSKDTYDDDLDNLLAQIGDQYADLFLAAKNLSDAILLSDILRVNTEITKAPLSASMIKRYDEHHQDLTLLKALVRQQLPEKYKEIFFDQSKNGYAGYIDGGASQEEFYKFIKPILEKMDGTEELLVKLNREDLLRKQRTFDNGSIPHQIHLGELHAILRRQEDFYPFLKDNREKIEKILTFRIPYYVGPLARGNSRFAWMTRKSEETITPWNFEEVVDKGASAQSFIERMTNFDKNLPNEKVLPKHSLLYEYFTVYNELTKVKYVTEGMRKPAFLSGEQKKAIVDLLFKTNRKVTVKQLKEDYFKKIECFDSVEISGVEDRFNASLGTYHDLLKIIKDKDFLDNEENEDILEDIVLTLTLFEDREMIEERLKTYAHLFDDKVMKQLKRRRYTGWGRLSRKLINGIRDKQSGKTILDFLKSDGFANRNFMQLIHDDSLTFKEDIQKAQVSGQGDSLHEHIANLAGSPAIKKGILQTVKVVDELVKVMGRHKPENIVIEMARENQTTQKGQKNSRERMKRIEEGIKELGSQILKEHPVENTQLQNEKLYLYYLQNGRDMYVDQELDINRLSDYDVDHIVPQSFLKDDSIDNKVLTRSDKARGKSDNVPSEEVVKKMKNYWRQLLNAKLITQRKFDNLTKAERGGLSELDKAGFIKRQLVETRQITKHVAQILDSRMNTKYDENDKLIREVKVITLKSKLVSDFRKDFQFYKVREINNYHHAHDAYLNAVVGTALIKKYPKLESEFVYGDYKVYDVRKMIAKSEQEIGKATAKYFFYSNIMNFFKTEITLANGEIRKRPLIETNGETGEIVWDKGRDFATVRKVLSMPQVNIVKKTEVQTGGFSKESILPKRNSDKLIARKKDWDPKKYGGFDSPTVAYSVLVVAKVEKGKSKKLKSVKELLGITIMERSSFEKNPIDFLEAKGYKEVKKDLIIKLPKYSLFELENGRKRMLASAGELQKGNELALPSKYVNFLYLASHYEKLKGSPEDNEQKQLFVEQHKHYLDEIIEQISEFSKRVILADANLDKVLSAYNKHRDKPIREQAENIIHLFTLTNLGAPAAFKYFDTTIDRKRYTSTKEVLDATLIHQSITGLYETRIDLSQLGGDGGGGGEAAAKPAPGGMDPLQLLQPLEAEIKGTKLKAHWNSGATITCVPEAFLEDERPIQTMLIKTIHGEKQQDVYYLTFKVQGRKVEAEVLASPYDYILLNPSDVPWLMKKPLQLTVLVPLHEYQERLLQQTALPKEQKELLQKLFLKYDALWQHWENQVGHRRIKPHNIATGTLAPRPQKQYPINPKAKPSIQIVIDDLLKQGVLIQQNSTMNTPVYPVPKPDGKWRMVLDYREVNKTIPLIAAQNQHSAGILSSIYRGKYKTTLDLTNGFWAHPITPESYWLTAFTWQGKQYCWTRLPQGFLNSPALFNADVVDLLKEIPNVQAYVDDIYISHDDPQEHLEQLEKIFSILLNAGYVVSLKKSEIAQREVEFLGFNITKEGRGLTDTFKQKLLNITPPKDLKQLQSILGLLNFARNFIPNYSELVKPLYTIVAPANGKFISWTEDNSNQLQHIISVLNQADNLEERNPETRLIIKVNSSPSAGYIRYYNEGSKRPIMYVNYIFSKAEAKFTQTEKLLTTMHKGLIKAMDLAMGQEILVYSPIVSMTKIQRTPLPERKALPVRWITWMTYLEDPRIQFHYDKSLPELQQIPNVTEDVIAKTKHPSEFAMVFYTDGSAIKHPDVNKSHSAGMGIAQVQFIPEYKIVHQWSIPLGDHTAQLAEIAAVEFACKKALKISGPVLIVTDSFYVAESANKELPYWKSNGFLNNKKKPLRHVSKWKSIAECLQLKPDIIIMHEKGHQQPMTTLHTEGNNLADKLATQGSYVVHAGKRTADGSEFEKRTADGSEFESPKKKAKVE

SEQ ID NO: 464 - protein, 2176 aa, synthetic construct
MPAAKRVKLDGGDKKYSIGLDIGTNSVGWAVITDEYKVPSKKFKVLGNTDRHSIKKNLIGALLFDSGETAEATRLKRTARRRYTRRKNRICYLQEIFSNEMAKVDDSFFHRLEESFLVEEDKKHERHPIFGNIVDEVAYHEKYPTIYHLRKKLVDSTDKADLRLIYLALAHMIKFRGHFLIEGDLNPDNSDVDKLFIQLVQTYNQLFEENPINASGVDAKAILSARLSKSRRLENLIAQLPGEKKNGLFGNLIALSLGLTPNFKSNFDLAEDAKLQLSKDTYDDDLDNLLAQIGDQYADLFLAAKNLSDAILLSDILRVNTEITKAPLSASMIKRYDEHHQDLTLLKALVRQQLPEKYKEIFFDQSKNGYAGYIDGGASQEEFYKFIKPILEKMDGTEELLVKLNREDLLRKQRTFDNGSIPHQIHLGELHAILRRQEDFYPFLKDNREKIEKILTFRIPYYVGPLARGNSRFAWMTRKSEETITPWNFEEVVDKGASAQSFIERMTNFDKNLPNEKVLPKHSLLYEYFTVYNELTKVKYVTEGMRKPAFLSGEQKKAIVDLLFKTNRKVTVKQLKEDYFKKIECFDSVEISGVEDRFNASLGTYHDLLKIIKDKDFLDNEENEDILEDIVLTLTLFEDREMIEERLKTYAHLFDDKVMKQLKRRRYTGWGRLSRKLINGIRDKQSGKTILDFLKSDGFANRNFMQLIHDDSLTFKEDIQKAQVSGQGDSLHEHIANLAGSPAIKKGILQTVKVVDELVKVMGRHKPENIVIEMARENQTTQKGQKNSRERMKRIEEGIKELGSQILKEHPVENTQLQNEKLYLYYLQNGRDMYVDQELDINRLSDYDVDHIVPQSFLKDDSIDNKVLTRSDKARGKSDNVPSEEVVKKMKNYWRQLLNAKLITQRKFDNLTKAERGGLSELDKAGFIKRQLVETRQITKHVAQILDSRMNTKYDENDKLIREVKVITLKSKLVSDFRKDFQFYKVREINNYHHAHDAYLNAVVGTALIKKYPKLESEFVYGDYKVYDVRKMIAKSEQEIGKATAKYFFYSNIMNFFKTEITLANGEIRKRPLIETNGETGEIVWDKGRDFATVRKVLSMPQVNIVKKTEVQTGGFSKESILPKRNSDKLIARKKDWDPKKYGGFDSPTVAYSVLVVAKVEKGKSKKLKSVKELLGITIMERSSFEKNPIDFLEAKGYKEVKKDLIIKLPKYSLFELENGRKRMLASAGELQKGNELALPSKYVNFLYLASHYEKLKGSPEDNEQKQLFVEQHKHYLDEIIEQISEFSKRVILADANLDKVLSAYNKHRDKPIREQAENIIHLFTLTNLGAPAAFKYFDTTIDRKRYTSTKEVLDATLIHQSITGLYETRIDLSQLGGDGGGGSEAAAKPAPGGMDPLQLLQPLEAEIKGTKLKAHWNSGATITCVPEAFLEDERPIQTMLIKTIHGEKQQDVYYLTFKVQGRKVEAEVLASPYDYILLNPSDVPWLMKKPLQLTVLVPLHEYQERLLQQTALPKEQKELLQKLFLKYDALWQHWENQVGHRRIKPHNIATGTLAPRPQKQYPINPKAKPSIQIVIDDLLKQGVLIQQNSTMNTPVYPVPKPDGKWRMVLDYREVNKTIPLIAAQNQHSAGILSSIYRGKYKTTLDLTNGFWAHPITPESYWLTAFTWQGKQYCWTRLPQGFLNSPALFNADVVDLLKEIPNVQAYVDDIYISHDDPQEHLEQLEKIFSILLNAGYVVSLKKSEIAQREVEFLGFNITKEGRGLTDTFKQKLLNITPPKDLKQLQSILGLLNFARNFIPNYSELVKPLYTIVAPANGKFISWTEDNSNQLQHIISVLNQADNLEERNPETRLIIKVNSSPSAGYIRYYNEGSKRPIMYVNYIFSKAEAKFTQTEKLLTTMHKGLIKAMDLAMGQEILVYSPIVSMTKIQRTPLPERKALPVRWITWMTYLEDPRIQFHYDKSLPELQQIPNVTEDVIAKTKHPSEFAMVFYTDGSAIKHPDVNKSHSAGMGIAQVQFIPEYKIVHQWSIPLGDHTAQLAEIAAVEFACKKALKISGPVLIVTDSFYVAESANKELPYWKSNGFLNNKKKPLRHVSKWKSIAECLQLKPDIIIMHEKGHQQPMTTLHTEGNNLADKLATQGSYVVHAGKRTADGSEFEKRTADGSEFESPKKKAKVE

SEQ ID NO: 465 - protein, 2170 aa, synthetic construct
MPAAKRVKLDGGDKKYSIGLDIGTNSVGWAVITDEYKVPSKKFKVLGNTDRHSIKKNLIGALLFDSGETAEATRLKRTARRRYTRRKNRICYLQEIFSNEMAKVDDSFFHRLEESFLVEEDKKHERHPIFGNIVDEVAYHEKYPTIYHLRKKLVDSTDKADLRLIYLALAHMIKFRGHFLIEGDLNPDNSDVDKLFIQLVQTYNQLFEENPINASGVDAKAILSARLSKSRRLENLIAQLPGEKKNGLFGNLIALSLGLTPNFKSNFDLAEDAKLQLSKDTYDDDLDNLLAQIGDQYADLFLAAKNLSDAILLSDILRVNTEITKAPLSASMIKRYDEHHQDLTLLKALVRQQLPEKYKEIFFDQSKNGYAGYIDGGASQEEFYKFIKPILEKMDGTEELLVKLNREDLLRKQRTFDNGSIPHQIHLGELHAILRRQEDFYPFLKDNREKIEKILTFRIPYYVGPLARGNSRFAWMTRKSEETITPWNFEEVVDKGASAQSFIERMTNFDKNLPNEKVLPKHSLLYEYFTVYNELTKVKYVTEGMRKPAFLSGEQKKAIVDLLFKTNRKVTVKQLKEDYFKKIECFDSVEISGVEDRFNASLGTYHDLLKIIKDKDFLDNEENEDILEDIVLTLTLFEDREMIEERLKTYAHLFDDKVMKQLKRRRYTGWGRLSRKLINGIRDKQSGKTILDFLKSDGFANRNFMQLIHDDSLTFKEDIQKAQVSGQGDSLHEHIANLAGSPAIKKGILQTVKVVDELVKVMGRHKPENIVIEMARENQTTQKGQKNSRERMKRIEEGIKELGSQILKEHPVENTQLQNEKLYLYYLQNGRDMYVDQELDINRLSDYDVDHIVPQSFLKDDSIDNKVLTRSDKARGKSDNVPSEEVVKKMKNYWRQLLNAKLITQRKFDNLTKAERGGLSELDKAGFIKRQLVETRQITKHVAQILDSRMNTKYDENDKLIREVKVITLKSKLVSDFRKDFQFYKVREINNYHHAHDAYLNAVVGTALIKKYPKLESEFVYGDYKVYDVRKMIAKSEQEIGKATAKYFFYSNIMNFFKTEITLANGEIRKRPLIETNGETGEIVWDKGRDFATVRKVLSMPQVNIVKKTEVQTGGFSKESILPKRNSDKLIARKKDWDPKKYGGFDSPTVAYSVLVVAKVEKGKSKKLKSVKELLGITIMERSSFEKNPIDFLEAKGYKEVKKDLIIKLPKYSLFELENGRKRMLASAGELQKGNELALPSKYVNFLYLASHYEKLKGSPEDNEQKQLFVEQHKHYLDEIIEQISEFSKRVILADANLDKVLSAYNKHRDKPIREQAENIIHLFTLTNLGAPAAFKYFDTTIDRKRYTSTKEVLDATLIHQSITGLYETRIDLSQLGGDGGEAAAKGGMDPLQLLQPLEAEIKGTKLKAHWNSGATITCVPEAFLEDERPIQTMLIKTIHGEKQQDVYYLTFKVQGRKVEAEVLASPYDYILLNPSDVPWLMKKPLQLTVLVPLHEYQERLLQQTALPKEQKELLQKLFLKYDALWQHWENQVGHRRIKPHNIATGTLAPRPQKQYPINPKAKPSIQIVIDDLLKQGVLIQQNSTMNTPVYPVPKPDGKWRMVLDYREVNKTIPLIAAQNQHSAGILSSIYRGKYKTTLDLTNGFWAHPITPESYWLTAFTWQGKQYCWTRLPQGFLNSPALFNADVVDLLKEIPNVQAYVDDIYISHDDPQEHLEQLEKIFSILLNAGYVVSLKKSEIAQREVEFLGFNITKEGRGLTDTFKQKLLNITPPKDLKQLQSILGLLNFARNFIPNYSELVKPLYTIVAPANGKFISWTEDNSNQLQHIISVLNQADNLEERNPETRLIIKVNSSPSAGYIRYYNEGSKRPIMYVNYIFSKAEAKFTQTEKLLTTMHKGLIKAMDLAMGQEILVYSPIVSMTKIQRTPLPERKALPVRWITWMTYLEDPRIQFHYDKSLPELQQIPNVTEDVIAKTKHPSEFAMVFYTDGSAIKHPDVNKSHSAGMGIAQVQFIPEYKIVHQWSIPLGDHTAQLAEIAAVEFACKKALKISGPVLIVTDSFYVAESANKELPYWKSNGFLNNKKKPLRHVSKWKSIAECLQLKPDIIIMHEKGHQQPMTTLHTEGNNLADKLATQGSYVVHAGKRTADGSEFEKRTADGSEFESPKKKAKVE

SEQ ID NO: 466 - protein, 2176 aa, synthetic construct
MPAAKRVKLDGGDKKYSIGLDIGTNSVGWAVITDEYKVPSKKFKVLGNTDRHSIKKNLIGALLFDSGETAEATRLKRTARRRYTRRKNRICYLQEIFSNEMAKVDDSFFHRLEESFLVEEDKKHERHPIFGNIVDEVAYHEKYPTIYHLRKKLVDSTDKADLRLIYLALAHMIKFRGHFLIEGDLNPDNSDVDKLFIQLVQTYNQLFEENPINASGVDAKAILSARLSKSRRLENLIAQLPGEKKNGLFGNLIALSLGLTPNFKSNFDLAEDAKLQLSKDTYDDDLDNLLAQIGDQYADLFLAAKNLSDAILLSDILRVNTEITKAPLSASMIKRYDEHHQDLTLLKALVRQQLPEKYKEIFFDQSKNGYAGYIDGGASQEEFYKFIKPILEKMDGTEELLVKLNREDLLRKQRTFDNGSIPHQIHLGELHAILRRQEDFYPFLKDNREKIEKILTFRIPYYVGPLARGNSRFAWMTRKSEETITPWNFEEVVDKGASAQSFIERMTNFDKNLPNEKVLPKHSLLYEYFTVYNELTKVKYVTEGMRKPAFLSGEQKKAIVDLLFKTNRKVTVKQLKEDYFKKIECFDSVEISGVEDRFNASLGTYHDLLKIIKDKDFLDNEENEDILEDIVLTLTLFEDREMIEERLKTYAHLFDDKVMKQLKRRRYTGWGRLSRKLINGIRDKQSGKTILDFLKSDGFANRNFMQLIHDDSLTFKEDIQKAQVSGQGDSLHEHIANLAGSPAIKKGILQTVKVVDELVKVMGRHKPENIVIEMARENQTTQKGQKNSRERMKRIEEGIKELGSQILKEHPVENTQLQNEKLYLYYLQNGRDMYVDQELDINRLSDYDVDHIVPQSFLKDDSIDNKVLTRSDKARGKSDNVPSEEVVKKMKNYWRQLLNAKLITQRKFDNLTKAERGGLSELDKAGFIKRQLVETRQITKHVAQILDSRMNTKYDENDKLIREVKVITLKSKLVSDFRKDFQFYKVREINNYHHAHDAYLNAVVGTALIKKYPKLESEFVYGDYKVYDVRKMIAKSEQEIGKATAKYFFYSNIMNFFKTEITLANGEIRKRPLIETNGETGEIVWDKGRDFATVRKVLSMPQVNIVKKTEVQTGGFSKESILPKRNSDKLIARKKDWDPKKYGGFDSPTVAYSVLVVAKVEKGKSKKLKSVKELLGITIMERSSFEKNPIDFLEAKGYKEVKKDLIIKLPKYSLFELENGRKRMLASAGELQKGNELALPSKYVNFLYLASHYEKLKGSPEDNEQKQLFVEQHKHYLDEIIEQISEFSKRVILADANLDKVLSAYNKHRDKPIREQAENIIHLFTLTNLGAPAAFKYFDTTIDRKRYTSTKEVLDATLIHQSITGLYETRIDLSQLGGDGGGGSGSSEAAAKGGMDPLQLLQPLEAEIKGTKLKAHWNSGATITCVPEAFLEDERPIQTMLIKTIHGEKQQDVYYLTFKVQGRKVEAEVLASPYDYILLNPSDVPWLMKKPLQLTVLVPLHEYQERLLQQTALPKEQKELLQKLFLKYDALWQHWENQVGHRRIKPHNIATGTLAPRPQKQYPINPKAKPSIQIVIDDLLKQGVLIQQNSTMNTPVYPVPKPDGKWRMVLDYREVNKTIPLIAAQNQHSAGILSSIYRGKYKTTLDLTNGFWAHPITPESYWLTAFTWQGKQYCWTRLPQGFLNSPALFNADVVDLLKEIPNVQAYVDDIYISHDDPQEHLEQLEKIFSILLNAGYVVSLKKSEIAQREVEFLGFNITKEGRGLTDTFKQKLLNITPPKDLKQLQSILGLLNFARNFIPNYSELVKPLYTIVAPANGKFISWTEDNSNQLQHIISVLNQADNLEERNPETRLIIKVNSSPSAGYIRYYNEGSKRPIMYVNYIFSKAEAKFTQTEKLLTTMHKGLIKAMDLAMGQEILVYSPIVSMTKIQRTPLPERKALPVRWITWMTYLEDPRIQFHYDKSLPELQQIPNVTEDVIAKTKHPSEFAMVFYTDGSAIKHPDVNKSHSAGMGIAQVQFIPEYKIVHQWSIPLGDHTAQLAEIAAVEFACKKALKISGPVLIVTDSFYVAESANKELPYWKSNGFLNNKKKPLRHVSKWKSIAECLQLKPDIIIMHEKGHQQPMTTLHTEGNNLADKLATQGSYVVHAGKRTADGSEFEKRTADGSEFESPKKKAKVE

SEQ ID NO: 467 - protein, 2177 aa, synthetic construct
MPAAKRVKLDGGDKKYSIGLDIGTNSVGWAVITDEYKVPSKKFKVLGNTDRHSIKKNLIGALLFDSGETAEATRLKRTARRRYTRRKNRICYLQEIFSNEMAKVDDSFFHRLEESFLVEEDKKHERHPIFGNIVDEVAYHEKYPTIYHLRKKLVDSTDKADLRLIYLALAHMIKFRGHFLIEGDLNPDNSDVDKLFIQLVQTYNQLFEENPINASGVDAKAILSARLSKSRRLENLIAQLPGEKKNGLFGNLIALSLGLTPNFKSNFDLAEDAKLQLSKDTYDDDLDNLLAQIGDQYADLFLAAKNLSDAILLSDILRVNTEITKAPLSASMIKRYDEHHQDLTLLKALVRQQLPEKYKEIFFDQSKNGYAGYIDGGASQEEFYKFIKPILEKMDGTEELLVKLNREDLLRKQRTFDNGSIPHQIHLGELHAILRRQEDFYPFLKDNREKIEKILTFRIPYYVGPLARGNSRFAWMTRKSEETITPWNFEEVVDKGASAQSFIERMTNFDKNLPNEKVLPKHSLLYEYFTVYNELTKVKYVTEGMRKPAFLSGEQKKAIVDLLFKTNRKVTVKQLKEDYFKKIECFDSVEISGVEDRFNASLGTYHDLLKIIKDKDFLDNEENEDILEDIVLTLTLFEDREMIEERLKTYAHLFDDKVMKQLKRRRYTGWGRLSRKLINGIRDKQSGKTILDFLKSDGFANRNFMQLIHDDSLTFKEDIQKAQVSGQGDSLHEHIANLAGSPAIKKGILQTVKVVDELVKVMGRHKPENIVIEMARENQTTQKGQKNSRERMKRIEEGIKELGSQILKEHPVENTQLQNEKLYLYYLQNGRDMYVDQELDINRLSDYDVDHIVPQSFLKDDSIDNKVLTRSDKARGKSDNVPSEEVVKKMKNYWRQLLNAKLITQRKFDNLTKAERGGLSELDKAGFIKRQLVETRQITKHVAQILDSRMNTKYDENDKLIREVKVITLKSKLVSDFRKDFQFYKVREINNYHHAHDAYLNAVVGTALIKKYPKLESEFVYGDYKVYDVRKMIAKSEQEIGKATAKYFFYSNIMNFFKTEITLANGEIRKRPLIETNGETGEIVWDKGRDFATVRKVLSMPQVNIVKKTEVQTGGFSKESILPKRNSDKLIARKKDWDPKKYGGFDSPTVAYSVLVVAKVEKGKSKKLKSVKELLGITIMERSSFEKNPIDFLEAKGYKEVKKDLIIKLPKYSLFELENGRKRMLASAGELQKGNELALPSKYVNFLYLASHYEKLKGSPEDNEQKQLFVEQHKHYLDEIIEQISEFSKRVILADANLDKVLSAYNKHRDKPIREQAENIIHLFTLTNLGAPAAFKYFDTTIDRKRYTSTKEVLDATLIHQSITGLYETRIDLSQLGGDGGGSSGSSGSSGSSGGMDPLQLLQPLEAEIKGTKLKAHWNSGATITCVPEAFLEDERPIQTMLIKTIHGEKQQDVYYLTFKVQGRKVEAEVLASPYDYILLNPSDVPWLMKKPLQLTVLVPLHEYQERLLQQTALPKEQKELLQKLFLKYDALWQHWENQVGHRRIKPHNIATGTLAPRPQKQYPINPKAKPSIQIVIDDLLKQGVLIQQNSTMNTPVYPVPKPDGKWRMVLDYREVNKTIPLIAAQNQHSAGILSSIYRGKYKTTLDLTNGFWAHPITPESYWLTAFTWQGKQYCWTRLPQGFLNSPALFNADVVDLLKEIPNVQAYVDDIYISHDDPQEHLEQLEKIFSILLNAGYVVSLKKSEIAQREVEFLGFNITKEGRGLTDTFKQKLLNITPPKDLKQLQSILGLLNFARNFIPNYSELVKPLYTIVAPANGKFISWTEDNSNQLQHIISVLNQADNLEERNPETRLIIKVNSSPSAGYIRYYNEGSKRPIMYVNYIFSKAEAKFTQTEKLLTTMHKGLIKAMDLAMGQEILVYSPIVSMTKIQRTPLPERKALPVRWITWMTYLEDPRIQFHYDKSLPELQQIPNVTEDVIAKTKHPSEFAMVFYTDGSAIKHPDVNKSHSAGMGIAQVQFIPEYKIVHQWSIPLGDHTAQLAEIAAVEFACKKALKISGPVLIVTDSFYVAESANKELPYWKSNGFLNNKKKPLRHVSKWKSIAECLQLKPDIIIMHEKGHQQPMTTLHTEGNNLADKLATQGSYVVHAGKRTADGSEFEKRTADGSEFESPKKKAKVE

SEQ ID NO: 468 - protein, 2177 aa, synthetic construct
MPAAKRVKLDGGDKKYSIGLDIGTNSVGWAVITDEYKVPSKKFKVLGNTDRHSIKKNLIGALLFDSGETAEATRLKRTARRRYTRRKNRICYLQEIFSNEMAKVDDSFFHRLEESFLVEEDKKHERHPIFGNIVDEVAYHEKYPTIYHLRKKLVDSTDKADLRLIYLALAHMIKFRGHFLIEGDLNPDNSDVDKLFIQLVQTYNQLFEENPINASGVDAKAILSARLSKSRRLENLIAQLPGEKKNGLFGNLIALSLGLTPNFKSNFDLAEDAKLQLSKDTYDDDLDNLLAQIGDQYADLFLAAKNLSDAILLSDILRVNTEITKAPLSASMIKRYDEHHQDLTLLKALVRQQLPEKYKEIFFDQSKNGYAGYIDGGASQEEFYKFIKPILEKMDGTEELLVKLNREDLLRKQRTFDNGSIPHQIHLGELHAILRRQEDFYPFLKDNREKIEKILTFRIPYYVGPLARGNSRFAWMTRKSEETITPWNFEEVVDKGASAQSFIERMTNFDKNLPNEKVLPKHSLLYEYFTVYNELTKVKYVTEGMRKPAFLSGEQKKAIVDLLFKTNRKVTVKQLKEDYFKKIECFDSVEISGVEDRFNASLGTYHDLLKIIKDKDFLDNEENEDILEDIVLTLTLFEDREMIEERLKTYAHLFDDKVMKQLKRRRYTGWGRLSRKLINGIRDKQSGKTILDFLKSDGFANRNFMQLIHDDSLTFKEDIQKAQVSGQGDSLHEHIANLAGSPAIKKGILQTVKVVDELVKVMGRHKPENIVIEMARENQTTQKGQKNSRERMKRIEEGIKELGSQILKEHPVENTQLQNEKLYLYYLQNGRDMYVDQELDINRLSDYDVDHIVPQSFLKDDSIDNKVLTRSDKARGKSDNVPSEEVVKKMKNYWRQLLNAKLITQRKFDNLTKAERGGLSELDKAGFIKRQLVETRQITKHVAQILDSRMNTKYDENDKLIREVKVITLKSKLVSDFRKDFQFYKVREINNYHHAHDAYLNAVVGTALIKKYPKLESEFVYGDYKVYDVRKMIAKSEQEIGKATAKYFFYSNIMNFFKTEITLANGEIRKRPLIETNGETGEIVWDKGRDFATVRKVLSMPQVNIVKKTEVQTGGFSKESILPKRNSDKLIARKKDWDPKKYGGFDSPTVAYSVLVVAKVEKGKSKKLKSVKELLGITIMERSSFEKNPIDFLEAKGYKEVKKDLIIKLPKYSLFELENGRKRMLASAGELQKGNELALPSKYVNFLYLASHYEKLKGSPEDNEQKQLFVEQHKHYLDEIIEQISEFSKRVILADANLDKVLSAYNKHRDKPIREQAENIIHLFTLTNLGAPAAFKYFDTTIDRKRYTSTKEVLDATLIHQSITGLYETRIDLSQLGGDGGGSAGSAAGSGEFGGMDPLQLLQPLEAEIKGTKLKAHWNSGATITCVPEAFLEDERPIQTMLIKTIHGEKQQDVYYLTFKVQGRKVEAEVLASPYDYILLNPSDVPWLMKKPLQLTVLVPLHEYQERLLQQTALPKEQKELLQKLFLKYDALWQHWENQVGHRRIKPHNIATGTLAPRPQKQYPINPKAKPSIQIVIDDLLKQGVLIQQNSTMNTPVYPVPKPDGKWRMVLDYREVNKTIPLIAAQNQHSAGILSSIYRGKYKTTLDLTNGFWAHPITPESYWLTAFTWQGKQYCWTRLPQGFLNSPALFNADVVDLLKEIPNVQAYVDDIYISHDDPQEHLEQLEKIFSILLNAGYVVSLKKSEIAQREVEFLGFNITKEGRGLTDTFKQKLLNITPPKDLKQLQSILGLLNFARNFIPNYSELVKPLYTIVAPANGKFISWTEDNSNQLQHIISVLNQADNLEERNPETRLIIKVNSSPSAGYIRYYNEGSKRPIMYVNYIFSKAEAKFTQTEKLLTTMHKGLIKAMDLAMGQEILVYSPIVSMTKIQRTPLPERKALPVRWITWMTYLEDPRIQFHYDKSLPELQQIPNVTEDVIAKTKHPSEFAMVFYTDGSAIKHPDVNKSHSAGMGIAQVQFIPEYKIVHQWSIPLGDHTAQLAEIAAVEFACKKALKISGPVLIVTDSFYVAESANKELPYWKSNGFLNNKKKPLRHVSKWKSIAECLQLKPDIIIMHEKGHQQPMTTLHTEGNNLADKLATQGSYVVHAGKRTADGSEFEKRTADGSEFESPKKKAKVE

SEQ ID NO: 469 - protein, 2171 aa, synthetic construct
MPAAKRVKLDGGDKKYSIGLDIGTNSVGWAVITDEYKVPSKKFKVLGNTDRHSIKKNLIGALLFDSGETAEATRLKRTARRRYTRRKNRICYLQEIFSNEMAKVDDSFFHRLEESFLVEEDKKHERHPIFGNIVDEVAYHEKYPTIYHLRKKLVDSTDKADLRLIYLALAHMIKFRGHFLIEGDLNPDNSDVDKLFIQLVQTYNQLFEENPINASGVDAKAILSARLSKSRRLENLIAQLPGEKKNGLFGNLIALSLGLTPNFKSNFDLAEDAKLQLSKDTYDDDLDNLLAQIGDQYADLFLAAKNLSDAILLSDILRVNTEITKAPLSASMIKRYDEHHQDLTLLKALVRQQLPEKYKEIFFDQSKNGYAGYIDGGASQEEFYKFIKPILEKMDGTEELLVKLNREDLLRKQRTFDNGSIPHQIHLGELHAILRRQEDFYPFLKDNREKIEKILTFRIPYYVGPLARGNSRFAWMTRKSEETITPWNFEEVVDKGASAQSFIERMTNFDKNLPNEKVLPKHSLLYEYFTVYNELTKVKYVTEGMRKPAFLSGEQKKAIVDLLFKTNRKVTVKQLKEDYFKKIECFDSVEISGVEDRFNASLGTYHDLLKIIKDKDFLDNEENEDILEDIVLTLTLFEDREMIEERLKTYAHLFDDKVMKQLKRRRYTGWGRLSRKLINGIRDKQSGKTILDFLKSDGFANRNFMQLIHDDSLTFKEDIQKAQVSGQGDSLHEHIANLAGSPAIKKGILQTVKVVDELVKVMGRHKPENIVIEMARENQTTQKGQKNSRERMKRIEEGIKELGSQILKEHPVENTQLQNEKLYLYYLQNGRDMYVDQELDINRLSDYDVDHIVPQSFLKDDSIDNKVLTRSDKARGKSDNVPSEEVVKKMKNYWRQLLNAKLITQRKFDNLTKAERGGLSELDKAGFIKRQLVETRQITKHVAQILDSRMNTKYDENDKLIREVKVITLKSKLVSDFRKDFQFYKVREINNYHHAHDAYLNAVVGTALIKKYPKLESEFVYGDYKVYDVRKMIAKSEQEIGKATAKYFFYSNIMNFFKTEITLANGEIRKRPLIETNGETGEIVWDKGRDFATVRKVLSMPQVNIVKKTEVQTGGFSKESILPKRNSDKLIARKKDWDPKKYGGFDSPTVAYSVLVVAKVEKGKSKKLKSVKELLGITIMERSSFEKNPIDFLEAKGYKEVKKDLIIKLPKYSLFELENGRKRMLASAGELQKGNELALPSKYVNFLYLASHYEKLKGSPEDNEQKQLFVEQHKHYLDEIIEQISEFSKRVILADANLDKVLSAYNKHRDKPIREQAENIIHLFTLTNLGAPAAFKYFDTTIDRKRYTSTKEVLDATLIHQSITGLYETRIDLSQLGGDGGGGSGGSGGMDPLQLLQPLEAEIKGTKLKAHWNSGATITCVPEAFLEDERPIQTMLIKTIHGEKQQDVYYLTFKVQGRKVEAEVLASPYDYILLNPSDVPWLMKKPLQLTVLVPLHEYQERLLQQTALPKEQKELLQKLFLKYDALWQHWENQVGHRRIKPHNIATGTLAPRPQKQYPINPKAKPSIQIVIDDLLKQGVLIQQNSTMNTPVYPVPKPDGKWRMVLDYREVNKTIPLIAAQNQHSAGILSSIYRGKYKTTLDLTNGFWAHPITPESYWLTAFTWQGKQYCWTRLPQGFLNSPALFNADVVDLLKEIPNVQAYVDDIYISHDDPQEHLEQLEKIFSILLNAGYVVSLKKSEIAQREVEFLGFNITKEGRGLTDTFKQKLLNITPPKDLKQLQSILGLLNFARNFIPNYSELVKPLYTIVAPANGKFISWTEDNSNQLQHIISVLNQADNLEERNPETRLIIKVNSSPSAGYIRYYNEGSKRPIMYVNYIFSKAEAKFTQTEKLLTTMHKGLIKAMDLAMGQEILVYSPIVSMTKIQRTPLPERKALPVRWITWMTYLEDPRIQFHYDKSLPELQQIPNVTEDVIAKTKHPSEFAMVFYTDGSAIKHPDVNKSHSAGMGIAQVQFIPEYKIVHQWSIPLGDHTAQLAEIAAVEFACKKALKISGPVLIVTDSFYVAESANKELPYWKSNGFLNNKKKPLRHVSKWKSIAECLQLKPDIIIMHEKGHQQPMTTLHTEGNNLADKLATQGSYVVHAGKRTADGSEFEKRTADGSEFESPKKKAKVE

SEQ ID NO: 470 - protein, 2176 aa, synthetic construct
MPAAKRVKLDGGDKKYSIGLDIGTNSVGWAVITDEYKVPSKKFKVLGNTDRHSIKKNLIGALLFDSGETAEATRLKRTARRRYTRRKNRICYLQEIFSNEMAKVDDSFFHRLEESFLVEEDKKHERHPIFGNIVDEVAYHEKYPTIYHLRKKLVDSTDKADLRLIYLALAHMIKFRGHFLIEGDLNPDNSDVDKLFIQLVQTYNQLFEENPINASGVDAKAILSARLSKSRRLENLIAQLPGEKKNGLFGNLIALSLGLTPNFKSNFDLAEDAKLQLSKDTYDDDLDNLLAQIGDQYADLFLAAKNLSDAILLSDILRVNTEITKAPLSASMIKRYDEHHQDLTLLKALVRQQLPEKYKEIFFDQSKNGYAGYIDGGASQEEFYKFIKPILEKMDGTEELLVKLNREDLLRKQRTFDNGSIPHQIHLGELHAILRRQEDFYPFLKDNREKIEKILTFRIPYYVGPLARGNSRFAWMTRKSEETITPWNFEEVVDKGASAQSFIERMTNFDKNLPNEKVLPKHSLLYEYFTVYNELTKVKYVTEGMRKPAFLSGEQKKAIVDLLFKTNRKVTVKQLKEDYFKKIECFDSVEISGVEDRFNASLGTYHDLLKIIKDKDFLDNEENEDILEDIVLTLTLFEDREMIEERLKTYAHLFDDKVMKQLKRRRYTGWGRLSRKLINGIRDKQSGKTILDFLKSDGFANRNFMQLIHDDSLTFKEDIQKAQVSGQGDSLHEHIANLAGSPAIKKGILQTVKVVDELVKVMGRHKPENIVIEMARENQTTQKGQKNSRERMKRIEEGIKELGSQILKEHPVENTQLQNEKLYLYYLQNGRDMYVDQELDINRLSDYDVDHIVPQSFLKDDSIDNKVLTRSDKARGKSDNVPSEEVVKKMKNYWRQLLNAKLITQRKFDNLTKAERGGLSELDKAGFIKRQLVETRQITKHVAQILDSRMNTKYDENDKLIREVKVITLKSKLVSDFRKDFQFYKVREINNYHHAHDAYLNAVVGTALIKKYPKLESEFVYGDYKVYDVRKMIAKSEQEIGKATAKYFFYSNIMNFFKTEITLANGEIRKRPLIETNGETGEIVWDKGRDFATVRKVLSMPQVNIVKKTEVQTGGFSKESILPKRNSDKLIARKKDWDPKKYGGFDSPTVAYSVLVVAKVEKGKSKKLKSVKELLGITIMERSSFEKNPIDFLEAKGYKEVKKDLIIKLPKYSLFELENGRKRMLASAGELQKGNELALPSKYVNFLYLASHYEKLKGSPEDNEQKQLFVEQHKHYLDEIIEQISEFSKRVILADANLDKVLSAYNKHRDKPIREQAENIIHLFTLTNLGAPAAFKYFDTTIDRKRYTSTKEVLDATLIHQSITGLYETRIDLSQLGGDGGGGGEAAAKGGSGGMDPLQLLQPLEAEIKGTKLKAHWNSGATITCVPEAFLEDERPIQTMLIKTIHGEKQQDVYYLTFKVQGRKVEAEVLASPYDYILLNPSDVPWLMKKPLQLTVLVPLHEYQERLLQQTALPKEQKELLQKLFLKYDALWQHWENQVGHRRIKPHNIATGTLAPRPQKQYPINPKAKPSIQIVIDDLLKQGVLIQQNSTMNTPVYPVPKPDGKWRMVLDYREVNKTIPLIAAQNQHSAGILSSIYRGKYKTTLDLTNGFWAHPITPESYWLTAFTWQGKQYCWTRLPQGFLNSPALFNADVVDLLKEIPNVQAYVDDIYISHDDPQEHLEQLEKIFSILLNAGYVVSLKKSEIAQREVEFLGFNITKEGRGLTDTFKQKLLNITPPKDLKQLQSILGLLNFARNFIPNYSELVKPLYTIVAPANGKFISWTEDNSNQLQHIISVLNQADNLEERNPETRLIIKVNSSPSAGYIRYYNEGSKRPIMYVNYIFSKAEAKFTQTEKLLTTMHKGLIKAMDLAMGQEILVYSPIVSMTKIQRTPLPERKALPVRWITWMTYLEDPRIQFHYDKSLPELQQIPNVTEDVIAKTKHPSEFAMVFYTDGSAIKHPDVNKSHSAGMGIAQVQFIPEYKIVHQWSIPLGDHTAQLAEIAAVEFACKKALKISGPVLIVTDSFYVAESANKELPYWKSNGFLNNKKKPLRHVSKWKSIAECLQLKPDIIIMHEKGHQQPMTTLHTEGNNLADKLATQGSYVVHAGKRTADGSEFEKRTADGSEFESPKKKAKVE

SEQ ID NO: 471 - protein, 2174 aa, synthetic construct
MPAAKRVKLDGGDKKYSIGLDIGTNSVGWAVITDEYKVPSKKFKVLGNTDRHSIKKNLIGALLFDSGETAEATRLKRTARRRYTRRKNRICYLQEIFSNEMAKVDDSFFHRLEESFLVEEDKKHERHPIFGNIVDEVAYHEKYPTIYHLRKKLVDSTDKADLRLIYLALAHMIKFRGHFLIEGDLNPDNSDVDKLFIQLVQTYNQLFEENPINASGVDAKAILSARLSKSRRLENLIAQLPGEKKNGLFGNLIALSLGLTPNFKSNFDLAEDAKLQLSKDTYDDDLDNLLAQIGDQYADLFLAAKNLSDAILLSDILRVNTEITKAPLSASMIKRYDEHHQDLTLLKALVRQQLPEKYKEIFFDQSKNGYAGYIDGGASQEEFYKFIKPILEKMDGTEELLVKLNREDLLRKQRTFDNGSIPHQIHLGELHAILRRQEDFYPFLKDNREKIEKILTFRIPYYVGPLARGNSRFAWMTRKSEETITPWNFEEVVDKGASAQSFIERMTNFDKNLPNEKVLPKHSLLYEYFTVYNELTKVKYVTEGMRKPAFLSGEQKKAIVDLLFKTNRKVTVKQLKEDYFKKIECFDSVEISGVEDRFNASLGTYHDLLKIIKDKDFLDNEENEDILEDIVLTLTLFEDREMIEERLKTYAHLFDDKVMKQLKRRRYTGWGRLSRKLINGIRDKQSGKTILDFLKSDGFANRNFMQLIHDDSLTFKEDIQKAQVSGQGDSLHEHIANLAGSPAIKKGILQTVKVVDELVKVMGRHKPENIVIEMARENQTTQKGQKNSRERMKRIEEGIKELGSQILKEHPVENTQLQNEKLYLYYLQNGRDMYVDQELDINRLSDYDVDHIVPQSFLKDDSIDNKVLTRSDKARGKSDNVPSEEVVKKMKNYWRQLLNAKLITQRKFDNLTKAERGGLSELDKAGFIKRQLVETRQITKHVAQILDSRMNTKYDENDKLIREVKVITLKSKLVSDFRKDFQFYKVREINNYHHAHDAYLNAVVGTALIKKYPKLESEFVYGDYKVYDVRKMIAKSEQEIGKATAKYFFYSNIMNFFKTEITLANGEIRKRPLIETNGETGEIVWDKGRDFATVRKVLSMPQVNIVKKTEVQTGGFSKESILPKRNSDKLIARKKDWDPKKYGGFDSPTVAYSVLVVAKVEKGKSKKLKSVKELLGITIMERSSFEKNPIDFLEAKGYKEVKKDLIIKLPKYSLFELENGRKRMLASAGELQKGNELALPSKYVNFLYLASHYEKLKGSPEDNEQKQLFVEQHKHYLDEIIEQISEFSKRVILADANLDKVLSAYNKHRDKPIREQAENIIHLFTLTNLGAPAAFKYFDTTIDRKRYTSTKEVLDATLIHQSITGLYETRIDLSQLGGDGGPAPAPAPAPGGMDPLQLLQPLEAEIKGTKLKAHWNSGATITCVPEAFLEDERPIQTMLIKTIHGEKQQDVYYLTFKVQGRKVEAEVLASPYDYILLNPSDVPWLMKKPLQLTVLVPLHEYQERLLQQTALPKEQKELLQKLFLKYDALWQHWENQVGHRRIKPHNIATGTLAPRPQKQYPINPKAKPSIQIVIDDLLKQGVLIQQNSTMNTPVYPVPKPDGKWRMVLDYREVNKTIPLIAAQNQHSAGILSSIYRGKYKTTLDLTNGFWAHPITPESYWLTAFTWQGKQYCWTRLPQGFLNSPALFNADVVDLLKEIPNVQAYVDDIYISHDDPQEHLEQLEKIFSILLNAGYVVSLKKSEIAQREVEFLGFNITKEGRGLTDTFKQKLLNITPPKDLKQLQSILGLLNFARNFIPNYSELVKPLYTIVAPANGKFISWTEDNSNQLQHIISVLNQADNLEERNPETRLIIKVNSSPSAGYIRYYNEGSKRPIMYVNYIFSKAEAKFTQTEKLLTTMHKGLIKAMDLAMGQEILVYSPIVSMTKIQRTPLPERKALPVRWITWMTYLEDPRIQFHYDKSLPELQQIPNVTEDVIAKTKHPSEFAMVFYTDGSAIKHPDVNKSHSAGMGIAQVQFIPEYKIVHQWSIPLGDHTAQLAEIAAVEFACKKALKISGPVLIVTDSFYVAESANKELPYWKSNGFLNNKKKPLRHVSKWKSIAECLQLKPDIIIMHEKGHQQPMTTLHTEGNNLADKLATQGSYVVHAGKRTADGSEFEKRTADGSEFESPKKKAKVE

SEQ ID NO: 472 - protein, 2174 aa, synthetic construct
MPAAKRVKLDGGDKKYSIGLDIGTNSVGWAVITDEYKVPSKKFKVLGNTDRHSIKKNLIGALLFDSGETAEATRLKRTARRRYTRRKNRICYLQEIFSNEMAKVDDSFFHRLEESFLVEEDKKHERHPIFGNIVDEVAYHEKYPTIYHLRKKLVDSTDKADLRLIYLALAHMIKFRGHFLIEGDLNPDNSDVDKLFIQLVQTYNQLFEENPINASGVDAKAILSARLSKSRRLENLIAQLPGEKKNGLFGNLIALSLGLTPNFKSNFDLAEDAKLQLSKDTYDDDLDNLLAQIGDQYADLFLAAKNLSDAILLSDILRVNTEITKAPLSASMIKRYDEHHQDLTLLKALVRQQLPEKYKEIFFDQSKNGYAGYIDGGASQEEFYKFIKPILEKMDGTEELLVKLNREDLLRKQRTFDNGSIPHQIHLGELHAILRRQEDFYPFLKDNREKIEKILTFRIPYYVGPLARGNSRFAWMTRKSEETITPWNFEEVVDKGASAQSFIERMTNFDKNLPNEKVLPKHSLLYEYFTVYNELTKVKYVTEGMRKPAFLSGEQKKAIVDLLFKTNRKVTVKQLKEDYFKKIECFDSVEISGVEDRFNASLGTYHDLLKIIKDKDFLDNEENEDILEDIVLTLTLFEDREMIEERLKTYAHLFDDKVMKQLKRRRYTGWGRLSRKLINGIRDKQSGKTILDFLKSDGFANRNFMQLIHDDSLTFKEDIQKAQVSGQGDSLHEHIANLAGSPAIKKGILQTVKVVDELVKVMGRHKPENIVIEMARENQTTQKGQKNSRERMKRIEEGIKELGSQILKEHPVENTQLQNEKLYLYYLQNGRDMYVDQELDINRLSDYDVDHIVPQSFLKDDSIDNKVLTRSDKARGKSDNVPSEEVVKKMKNYWRQLLNAKLITQRKFDNLTKAERGGLSELDKAGFIKRQLVETRQITKHVAQILDSRMNTKYDENDKLIREVKVITLKSKLVSDFRKDFQFYKVREINNYHHAHDAYLNAVVGTALIKKYPKLESEFVYGDYKVYDVRKMIAKSEQEIGKATAKYFFYSNIMNFFKTEITLANGEIRKRPLIETNGETGEIVWDKGRDFATVRKVLSMPQVNIVKKTEVQTGGFSKESILPKRNSDKLIARKKDWDPKKYGGFDSPTVAYSVLVVAKVEKGKSKKLKSVKELLGITIMERSSFEKNPIDFLEAKGYKEVKKDLIIKLPKYSLFELENGRKRMLASAGELQKGNELALPSKYVNFLYLASHYEKLKGSPEDNEQKQLFVEQHKHYLDEIIEQISEFSKRVILADANLDKVLSAYNKHRDKPIREQAENIIHLFTLTNLGAPAAFKYFDTTIDRKRYTSTKEVLDATLIHQSITGLYETRIDLSQLGGDGGGSSGGSGGGGGMDPLQLLQPLEAEIKGTKLKAHWNSGATITCVPEAFLEDERPIQTMLIKTIHGEKQQDVYYLTFKVQGRKVEAEVLASPYDYILLNPSDVPWLMKKPLQLTVLVPLHEYQERLLQQTALPKEQKELLQKLFLKYDALWQHWENQVGHRRIKPHNIATGTLAPRPQKQYPINPKAKPSIQIVIDDLLKQGVLIQQNSTMNTPVYPVPKPDGKWRMVLDYREVNKTIPLIAAQNQHSAGILSSIYRGKYKTTLDLTNGFWAHPITPESYWLTAFTWQGKQYCWTRLPQGFLNSPALFNADVVDLLKEIPNVQAYVDDIYISHDDPQEHLEQLEKIFSILLNAGYVVSLKKSEIAQREVEFLGFNITKEGRGLTDTFKQKLLNITPPKDLKQLQSILGLLNFARNFIPNYSELVKPLYTIVAPANGKFISWTEDNSNQLQHIISVLNQADNLEERNPETRLIIKVNSSPSAGYIRYYNEGSKRPIMYVNYIFSKAEAKFTQTEKLLTTMHKGLIKAMDLAMGQEILVYSPIVSMTKIQRTPLPERKALPVRWITWMTYLEDPRIQFHYDKSLPELQQIPNVTEDVIAKTKHPSEFAMVFYTDGSAIKHPDVNKSHSAGMGIAQVQFIPEYKIVHQWSIPLGDHTAQLAEIAAVEFACKKALKISGPVLIVTDSFYVAESANKELPYWKSNGFLNNKKKPLRHVSKWKSIAECLQLKPDIIIMHEKGHQQPMTTLHTEGNNLADKLATQGSYVVHAGKRTADGSEFEKRTADGSEFESPKKKAKVE

SEQ ID NO: 473 - protein, 2174 aa, synthetic construct
MPAAKRVKLDGGDKKYSIGLDIGTNSVGWAVITDEYKVPSKKFKVLGNTDRHSIKKNLIGALLFDSGETAEATRLKRTARRRYTRRKNRICYLQEIFSNEMAKVDDSFFHRLEESFLVEEDKKHERHPIFGNIVDEVAYHEKYPTIYHLRKKLVDSTDKADLRLIYLALAHMIKFRGHFLIEGDLNPDNSDVDKLFIQLVQTYNQLFEENPINASGVDAKAILSARLSKSRRLENLIAQLPGEKKNGLFGNLIALSLGLTPNFKSNFDLAEDAKLQLSKDTYDDDLDNLLAQIGDQYADLFLAAKNLSDAILLSDILRVNTEITKAPLSASMIKRYDEHHQDLTLLKALVRQQLPEKYKEIFFDQSKNGYAGYIDGGASQEEFYKFIKPILEKMDGTEELLVKLNREDLLRKQRTFDNGSIPHQIHLGELHAILRRQEDFYPFLKDNREKIEKILTFRIPYYVGPLARGNSRFAWMTRKSEETITPWNFEEVVDKGASAQSFIERMTNFDKNLPNEKVLPKHSLLYEYFTVYNELTKVKYVTEGMRKPAFLSGEQKKAIVDLLFKTNRKVTVKQLKEDYFKKIECFDSVEISGVEDRFNASLGTYHDLLKIIKDKDFLDNEENEDILEDIVLTLTLFEDREMIEERLKTYAHLFDDKVMKQLKRRRYTGWGRLSRKLINGIRDKQSGKTILDFLKSDGFANRNFMQLIHDDSLTFKEDIQKAQVSGQGDSLHEHIANLAGSPAIKKGILQTVKVVDELVKVMGRHKPENIVIEMARENQTTQKGQKNSRERMKRIEEGIKELGSQILKEHPVENTQLQNEKLYLYYLQNGRDMYVDQELDINRLSDYDVDHIVPQSFLKDDSIDNKVLTRSDKARGKSDNVPSEEVVKKMKNYWRQLLNAKLITQRKFDNLTKAERGGLSELDKAGFIKRQLVETRQITKHVAQILDSRMNTKYDENDKLIREVKVITLKSKLVSDFRKDFQFYKVREINNYHHAHDAYLNAVVGTALIKKYPKLESEFVYGDYKVYDVRKMIAKSEQEIGKATAKYFFYSNIMNFFKTEITLANGEIRKRPLIETNGETGEIVWDKGRDFATVRKVLSMPQVNIVKKTEVQTGGFSKESILPKRNSDKLIARKKDWDPKKYGGFDSPTVAYSVLVVAKVEKGKSKKLKSVKELLGITIMERSSFEKNPIDFLEAKGYKEVKKDLIIKLPKYSLFELENGRKRMLASAGELQKGNELALPSKYVNFLYLASHYEKLKGSPEDNEQKQLFVEQHKHYLDEIIEQISEFSKRVILADANLDKVLSAYNKHRDKPIREQAENIIHLFTLTNLGAPAAFKYFDTTIDRKRYTSTKEVLDATLIHQSITGLYETRIDLSQLGGDGGPAPGSSGGSGGMDPLQLLQPLEAEIKGTKLKAHWNSGATITCVPEAFLEDERPIQTMLIKTIHGEKQQDVYYLTFKVQGRKVEAEVLASPYDYILLNPSDVPWLMKKPLQLTVLVPLHEYQERLLQQTALPKEQKELLQKLFLKYDALWQHWENQVGHRRIKPHNIATGTLAPRPQKQYPINPKAKPSIQIVIDDLLKQGVLIQQNSTMNTPVYPVPKPDGKWRMVLDYREVNKTIPLIAAQNQHSAGILSSIYRGKYKTTLDLTNGFWAHPITPESYWLTAFTWQGKQYCWTRLPQGFLNSPALFNADVVDLLKEIPNVQAYVDDIYISHDDPQEHLEQLEKIFSILLNAGYVVSLKKSEIAQREVEFLGFNITKEGRGLTDTFKQKLLNITPPKDLKQLQSILGLLNFARNFIPNYSELVKPLYTIVAPANGKFISWTEDNSNQLQHIISVLNQADNLEERNPETRLIIKVNSSPSAGYIRYYNEGSKRPIMYVNYIFSKAEAKFTQTEKLLTTMHKGLIKAMDLAMGQEILVYSPIVSMTKIQRTPLPERKALPVRWITWMTYLEDPRIQFHYDKSLPELQQIPNVTEDVIAKTKHPSEFAMVFYTDGSAIKHPDVNKSHSAGMGIAQVQFIPEYKIVHQWSIPLGDHTAQLAEIAAVEFACKKALKISGPVLIVTDSFYVAESANKELPYWKSNGFLNNKKKPLRHVSKWKSIAECLQLKPDIIIMHEKGHQQPMTTLHTEGNNLADKLATQGSYVVHAGKRTADGSEFEKRTADGSEFESPKKKAKVE

SEQ ID NO: 474 - protein, 2176 aa, synthetic construct
MPAAKRVKLDGGDKKYSIGLDIGTNSVGWAVITDEYKVPSKKFKVLGNTDRHSIKKNLIGALLFDSGETAEATRLKRTARRRYTRRKNRICYLQEIFSNEMAKVDDSFFHRLEESFLVEEDKKHERHPIFGNIVDEVAYHEKYPTIYHLRKKLVDSTDKADLRLIYLALAHMIKFRGHFLIEGDLNPDNSDVDKLFIQLVQTYNQLFEENPINASGVDAKAILSARLSKSRRLENLIAQLPGEKKNGLFGNLIALSLGLTPNFKSNFDLAEDAKLQLSKDTYDDDLDNLLAQIGDQYADLFLAAKNLSDAILLSDILRVNTEITKAPLSASMIKRYDEHHQDLTLLKALVRQQLPEKYKEIFFDQSKNGYAGYIDGGASQEEFYKFIKPILEKMDGTEELLVKLNREDLLRKQRTFDNGSIPHQIHLGELHAILRRQEDFYPFLKDNREKIEKILTFRIPYYVGPLARGNSRFAWMTRKSEETITPWNFEEVVDKGASAQSFIERMTNFDKNLPNEKVLPKHSLLYEYFTVYNELTKVKYVTEGMRKPAFLSGEQKKAIVDLLFKTNRKVTVKQLKEDYFKKIECFDSVEISGVEDRFNASLGTYHDLLKIIKDKDFLDNEENEDILEDIVLTLTLFEDREMIEERLKTYAHLFDDKVMKQLKRRRYTGWGRLSRKLINGIRDKQSGKTILDFLKSDGFANRNFMQLIHDDSLTFKEDIQKAQVSGQGDSLHEHIANLAGSPAIKKGILQTVKVVDELVKVMGRHKPENIVIEMARENQTTQKGQKNSRERMKRIEEGIKELGSQILKEHPVENTQLQNEKLYLYYLQNGRDMYVDQELDINRLSDYDVDHIVPQSFLKDDSIDNKVLTRSDKARGKSDNVPSEEVVKKMKNYWRQLLNAKLITQRKFDNLTKAERGGLSELDKAGFIKRQLVETRQITKHVAQILDSRMNTKYDENDKLIREVKVITLKSKLVSDFRKDFQFYKVREINNYHHAHDAYLNAVVGTALIKKYPKLESEFVYGDYKVYDVRKMIAKSEQEIGKATAKYFFYSNIMNFFKTEITLANGEIRKRPLIETNGETGEIVWDKGRDFATVRKVLSMPQVNIVKKTEVQTGGFSKESILPKRNSDKLIARKKDWDPKKYGGFDSPTVAYSVLVVAKVEKGKSKKLKSVKELLGITIMERSSFEKNPIDFLEAKGYKEVKKDLIIKLPKYSLFELENGRKRMLASAGELQKGNELALPSKYVNFLYLASHYEKLKGSPEDNEQKQLFVEQHKHYLDEIIEQISEFSKRVILADANLDKVLSAYNKHRDKPIREQAENIIHLFTLTNLGAPAAFKYFDTTIDRKRYTSTKEVLDATLIHQSITGLYETRIDLSQLGGDGGPAPGGSEAAAKGGMDPLQLLQPLEAEIKGTKLKAHWNSGATITCVPEAFLEDERPIQTMLIKTIHGEKQQDVYYLTFKVQGRKVEAEVLASPYDYILLNPSDVPWLMKKPLQLTVLVPLHEYQERLLQQTALPKEQKELLQKLFLKYDALWQHWENQVGHRRIKPHNIATGTLAPRPQKQYPINPKAKPSIQIVIDDLLKQGVLIQQNSTMNTPVYPVPKPDGKWRMVLDYREVNKTIPLIAAQNQHSAGILSSIYRGKYKTTLDLTNGFWAHPITPESYWLTAFTWQGKQYCWTRLPQGFLNSPALFNADVVDLLKEIPNVQAYVDDIYISHDDPQEHLEQLEKIFSILLNAGYVVSLKKSEIAQREVEFLGFNITKEGRGLTDTFKQKLLNITPPKDLKQLQSILGLLNFARNFIPNYSELVKPLYTIVAPANGKFISWTEDNSNQLQHIISVLNQADNLEERNPETRLIIKVNSSPSAGYIRYYNEGSKRPIMYVNYIFSKAEAKFTQTEKLLTTMHKGLIKAMDLAMGQEILVYSPIVSMTKIQRTPLPERKALPVRWITWMTYLEDPRIQFHYDKSLPELQQIPNVTEDVIAKTKHPSEFAMVFYTDGSAIKHPDVNKSHSAGMGIAQVQFIPEYKIVHQWSIPLGDHTAQLAEIAAVEFACKKALKISGPVLIVTDSFYVAESANKELPYWKSNGFLNNKKKPLRHVSKWKSIAECLQLKPDIIIMHEKGHQQPMTTLHTEGNNLADKLATQGSYVVHAGKRTADGSEFEKRTADGSEFESPKKKAKVE

SEQ ID NO: 475 - protein, 2176 aa, synthetic construct
MPAAKRVKLDGGDKKYSIGLDIGTNSVGWAVITDEYKVPSKKFKVLGNTDRHSIKKNLIGALLFDSGETAEATRLKRTARRRYTRRKNRICYLQEIFSNEMAKVDDSFFHRLEESFLVEEDKKHERHPIFGNIVDEVAYHEKYPTIYHLRKKLVDSTDKADLRLIYLALAHMIKFRGHFLIEGDLNPDNSDVDKLFIQLVQTYNQLFEENPINASGVDAKAILSARLSKSRRLENLIAQLPGEKKNGLFGNLIALSLGLTPNFKSNFDLAEDAKLQLSKDTYDDDLDNLLAQIGDQYADLFLAAKNLSDAILLSDILRVNTEITKAPLSASMIKRYDEHHQDLTLLKALVRQQLPEKYKEIFFDQSKNGYAGYIDGGASQEEFYKFIKPILEKMDGTEELLVKLNREDLLRKQRTFDNGSIPHQIHLGELHAILRRQEDFYPFLKDNREKIEKILTFRIPYYVGPLARGNSRFAWMTRKSEETITPWNFEEVVDKGASAQSFIERMTNFDKNLPNEKVLPKHSLLYEYFTVYNELTKVKYVTEGMRKPAFLSGEQKKAIVDLLFKTNRKVTVKQLKEDYFKKIECFDSVEISGVEDRFNASLGTYHDLLKIIKDKDFLDNEENEDILEDIVLTLTLFEDREMIEERLKTYAHLFDDKVMKQLKRRRYTGWGRLSRKLINGIRDKQSGKTILDFLKSDGFANRNFMQLIHDDSLTFKEDIQKAQVSGQGDSLHEHIANLAGSPAIKKGILQTVKVVDELVKVMGRHKPENIVIEMARENQTTQKGQKNSRERMKRIEEGIKELGSQILKEHPVENTQLQNEKLYLYYLQNGRDMYVDQELDINRLSDYDVDHIVPQSFLKDDSIDNKVLTRSDKARGKSDNVPSEEVVKKMKNYWRQLLNAKLITQRKFDNLTKAERGGLSELDKAGFIKRQLVETRQITKHVAQILDSRMNTKYDENDKLIREVKVITLKSKLVSDFRKDFQFYKVREINNYHHAHDAYLNAVVGTALIKKYPKLESEFVYGDYKVYDVRKMIAKSEQEIGKATAKYFFYSNIMNFFKTEITLANGEIRKRPLIETNGETGEIVWDKGRDFATVRKVLSMPQVNIVKKTEVQTGGFSKESILPKRNSDKLIARKKDWDPKKYGGFDSPTVAYSVLVVAKVEKGKSKKLKSVKELLGITIMERSSFEKNPIDFLEAKGYKEVKKDLIIKLPKYSLFELENGRKRMLASAGELQKGNELALPSKYVNFLYLASHYEKLKGSPEDNEQKQLFVEQHKHYLDEIIEQISEFSKRVILADANLDKVLSAYNKHRDKPIREQAENIIHLFTLTNLGAPAAFKYFDTTIDRKRYTSTKEVLDATLIHQSITGLYETRIDLSQLGGDGGEAAAKGGGGSSGGMDPLQLLQPLEAEIKGTKLKAHWNSGATITCVPEAFLEDERPIQTMLIKTIHGEKQQDVYYLTFKVQGRKVEAEVLASPYDYILLNPSDVPWLMKKPLQLTVLVPLHEYQERLLQQTALPKEQKELLQKLFLKYDALWQHWENQVGHRRIKPHNIATGTLAPRPQKQYPINPKAKPSIQIVIDDLLKQGVLIQQNSTMNTPVYPVPKPDGKWRMVLDYREVNKTIPLIAAQNQHSAGILSSIYRGKYKTTLDLTNGFWAHPITPESYWLTAFTWQGKQYCWTRLPQGFLNSPALFNADVVDLLKEIPNVQAYVDDIYISHDDPQEHLEQLEKIFSILLNAGYVVSLKKSEIAQREVEFLGFNITKEGRGLTDTFKQKLLNITPPKDLKQLQSILGLLNFARNFIPNYSELVKPLYTIVAPANGKFISWTEDNSNQLQHIISVLNQADNLEERNPETRLIIKVNSSPSAGYIRYYNEGSKRPIMYVNYIFSKAEAKFTQTEKLLTTMHKGLIKAMDLAMGQEILVYSPIVSMTKIQRTPLPERKALPVRWITWMTYLEDPRIQFHYDKSLPELQQIPNVTEDVIAKTKHPSEFAMVFYTDGSAIKHPDVNKSHSAGMGIAQVQFIPEYKIVHQWSIPLGDHTAQLAEIAAVEFACKKALKISGPVLIVTDSFYVAESANKELPYWKSNGFLNNKKKPLRHVSKWKSIAECLQLKPDIIIMHEKGHQQPMTTLHTEGNNLADKLATQGSYVVHAGKRTADGSEFEKRTADGSEFESPKKKAKVE

SEQ ID NO: 476 - protein, 2174 aa, synthetic construct
MPAAKRVKLDGGDKKYSIGLDIGTNSVGWAVITDEYKVPSKKFKVLGNTDRHSIKKNLIGALLFDSGETAEATRLKRTARRRYTRRKNRICYLQEIFSNEMAKVDDSFFHRLEESFLVEEDKKHERHPIFGNIVDEVAYHEKYPTIYHLRKKLVDSTDKADLRLIYLALAHMIKFRGHFLIEGDLNPDNSDVDKLFIQLVQTYNQLFEENPINASGVDAKAILSARLSKSRRLENLIAQLPGEKKNGLFGNLIALSLGLTPNFKSNFDLAEDAKLQLSKDTYDDDLDNLLAQIGDQYADLFLAAKNLSDAILLSDILRVNTEITKAPLSASMIKRYDEHHQDLTLLKALVRQQLPEKYKEIFFDQSKNGYAGYIDGGASQEEFYKFIKPILEKMDGTEELLVKLNREDLLRKQRTFDNGSIPHQIHLGELHAILRRQEDFYPFLKDNREKIEKILTFRIPYYVGPLARGNSRFAWMTRKSEETITPWNFEEVVDKGASAQSFIERMTNFDKNLPNEKVLPKHSLLYEYFTVYNELTKVKYVTEGMRKPAFLSGEQKKAIVDLLFKTNRKVTVKQLKEDYFKKIECFDSVEISGVEDRFNASLGTYHDLLKIIKDKDFLDNEENEDILEDIVLTLTLFEDREMIEERLKTYAHLFDDKVMKQLKRRRYTGWGRLSRKLINGIRDKQSGKTILDFLKSDGFANRNFMQLIHDDSLTFKEDIQKAQVSGQGDSLHEHIANLAGSPAIKKGILQTVKVVDELVKVMGRHKPENIVIEMARENQTTQKGQKNSRERMKRIEEGIKELGSQILKEHPVENTQLQNEKLYLYYLQNGRDMYVDQELDINRLSDYDVDHIVPQSFLKDDSIDNKVLTRSDKARGKSDNVPSEEVVKKMKNYWRQLLNAKLITQRKFDNLTKAERGGLSELDKAGFIKRQLVETRQITKHVAQILDSRMNTKYDENDKLIREVKVITLKSKLVSDFRKDFQFYKVREINNYHHAHDAYLNAVVGTALIKKYPKLESEFVYGDYKVYDVRKMIAKSEQEIGKATAKYFFYSNIMNFFKTEITLANGEIRKRPLIETNGETGEIVWDKGRDFATVRKVLSMPQVNIVKKTEVQTGGFSKESILPKRNSDKLIARKKDWDPKKYGGFDSPTVAYSVLVVAKVEKGKSKKLKSVKELLGITIMERSSFEKNPIDFLEAKGYKEVKKDLIIKLPKYSLFELENGRKRMLASAGELQKGNELALPSKYVNFLYLASHYEKLKGSPEDNEQKQLFVEQHKHYLDEIIEQISEFSKRVILADANLDKVLSAYNKHRDKPIREQAENIIHLFTLTNLGAPAAFKYFDTTIDRKRYTSTKEVLDATLIHQSITGLYETRIDLSQLGGDGGGSSGGGGGSGGMDPLQLLQPLEAEIKGTKLKAHWNSGATITCVPEAFLEDERPIQTMLIKTIHGEKQQDVYYLTFKVQGRKVEAEVLASPYDYILLNPSDVPWLMKKPLQLTVLVPLHEYQERLLQQTALPKEQKELLQKLFLKYDALWQHWENQVGHRRIKPHNIATGTLAPRPQKQYPINPKAKPSIQIVIDDLLKQGVLIQQNSTMNTPVYPVPKPDGKWRMVLDYREVNKTIPLIAAQNQHSAGILSSIYRGKYKTTLDLTNGFWAHPITPESYWLTAFTWQGKQYCWTRLPQGFLNSPALFNADVVDLLKEIPNVQAYVDDIYISHDDPQEHLEQLEKIFSILLNAGYVVSLKKSEIAQREVEFLGFNITKEGRGLTDTFKQKLLNITPPKDLKQLQSILGLLNFARNFIPNYSELVKPLYTIVAPANGKFISWTEDNSNQLQHIISVLNQADNLEERNPETRLIIKVNSSPSAGYIRYYNEGSKRPIMYVNYIFSKAEAKFTQTEKLLTTMHKGLIKAMDLAMGQEILVYSPIVSMTKIQRTPLPERKALPVRWITWMTYLEDPRIQFHYDKSLPELQQIPNVTEDVIAKTKHPSEFAMVFYTDGSAIKHPDVNKSHSAGMGIAQVQFIPEYKIVHQWSIPLGDHTAQLAEIAAVEFACKKALKISGPVLIVTDSFYVAESANKELPYWKSNGFLNNKKKPLRHVSKWKSIAECLQLKPDIIIMHEKGHQQPMTTLHTEGNNLADKLATQGSYVVHAGKRTADGSEFEKRTADGSEFESPKKKAKVE

SEQ ID NO: 477 - protein, 2171 aa, synthetic construct
MPAAKRVKLDGGDKKYSIGLDIGTNSVGWAVITDEYKVPSKKFKVLGNTDRHSIKKNLIGALLFDSGETAEATRLKRTARRRYTRRKNRICYLQEIFSNEMAKVDDSFFHRLEESFLVEEDKKHERHPIFGNIVDEVAYHEKYPTIYHLRKKLVDSTDKADLRLIYLALAHMIKFRGHFLIEGDLNPDNSDVDKLFIQLVQTYNQLFEENPINASGVDAKAILSARLSKSRRLENLIAQLPGEKKNGLFGNLIALSLGLTPNFKSNFDLAEDAKLQLSKDTYDDDLDNLLAQIGDQYADLFLAAKNLSDAILLSDILRVNTEITKAPLSASMIKRYDEHHQDLTLLKALVRQQLPEKYKEIFFDQSKNGYAGYIDGGASQEEFYKFIKPILEKMDGTEELLVKLNREDLLRKQRTFDNGSIPHQIHLGELHAILRRQEDFYPFLKDNREKIEKILTFRIPYYVGPLARGNSRFAWMTRKSEETITPWNFEEVVDKGASAQSFIERMTNFDKNLPNEKVLPKHSLLYEYFTVYNELTKVKYVTEGMRKPAFLSGEQKKAIVDLLFKTNRKVTVKQLKEDYFKKIECFDSVEISGVEDRFNASLGTYHDLLKIIKDKDFLDNEENEDILEDIVLTLTLFEDREMIEERLKTYAHLFDDKVMKQLKRRRYTGWGRLSRKLINGIRDKQSGKTILDFLKSDGFANRNFMQLIHDDSLTFKEDIQKAQVSGQGDSLHEHIANLAGSPAIKKGILQTVKVVDELVKVMGRHKPENIVIEMARENQTTQKGQKNSRERMKRIEEGIKELGSQILKEHPVENTQLQNEKLYLYYLQNGRDMYVDQELDINRLSDYDVDHIVPQSFLKDDSIDNKVLTRSDKARGKSDNVPSEEVVKKMKNYWRQLLNAKLITQRKFDNLTKAERGGLSELDKAGFIKRQLVETRQITKHVAQILDSRMNTKYDENDKLIREVKVITLKSKLVSDFRKDFQFYKVREINNYHHAHDAYLNAVVGTALIKKYPKLESEFVYGDYKVYDVRKMIAKSEQEIGKATAKYFFYSNIMNFFKTEITLANGEIRKRPLIETNGETGEIVWDKGRDFATVRKVLSMPQVNIVKKTEVQTGGFSKESILPKRNSDKLIARKKDWDPKKYGGFDSPTVAYSVLVVAKVEKGKSKKLKSVKELLGITIMERSSFEKNPIDFLEAKGYKEVKKDLIIKLPKYSLFELENGRKRMLASAGELQKGNELALPSKYVNFLYLASHYEKLKGSPEDNEQKQLFVEQHKHYLDEIIEQISEFSKRVILADANLDKVLSAYNKHRDKPIREQAENIIHLFTLTNLGAPAAFKYFDTTIDRKRYTSTKEVLDATLIHQSITGLYETRIDLSQLGGDGGGSSPAPGGMDPLQLLQPLEAEIKGTKLKAHWNSGATITCVPEAFLEDERPIQTMLIKTIHGEKQQDVYYLTFKVQGRKVEAEVLASPYDYILLNPSDVPWLMKKPLQLTVLVPLHEYQERLLQQTALPKEQKELLQKLFLKYDALWQHWENQVGHRRIKPHNIATGTLAPRPQKQYPINPKAKPSIQIVIDDLLKQGVLIQQNSTMNTPVYPVPKPDGKWRMVLDYREVNKTIPLIAAQNQHSAGILSSIYRGKYKTTLDLTNGFWAHPITPESYWLTAFTWQGKQYCWTRLPQGFLNSPALFNADVVDLLKEIPNVQAYVDDIYISHDDPQEHLEQLEKIFSILLNAGYVVSLKKSEIAQREVEFLGFNITKEGRGLTDTFKQKLLNITPPKDLKQLQSILGLLNFARNFIPNYSELVKPLYTIVAPANGKFISWTEDNSNQLQHIISVLNQADNLEERNPETRLIIKVNSSPSAGYIRYYNEGSKRPIMYVNYIFSKAEAKFTQTEKLLTTMHKGLIKAMDLAMGQEILVYSPIVSMTKIQRTPLPERKALPVRWITWMTYLEDPRIQFHYDKSLPELQQIPNVTEDVIAKTKHPSEFAMVFYTDGSAIKHPDVNKSHSAGMGIAQVQFIPEYKIVHQWSIPLGDHTAQLAEIAAVEFACKKALKISGPVLIVTDSFYVAESANKELPYWKSNGFLNNKKKPLRHVSKWKSIAECLQLKPDIIIMHEKGHQQPMTTLHTEGNNLADKLATQGSYVVHAGKRTADGSEFEKRTADGSEFESPKKKAKVE

SEQ ID NO: 478 - protein, 2178 aa, synthetic construct
MPAAKRVKLDGGDKKYSIGLDIGTNSVGWAVITDEYKVPSKKFKVLGNTDRHSIKKNLIGALLFDSGETAEATRLKRTARRRYTRRKNRICYLQEIFSNEMAKVDDSFFHRLEESFLVEEDKKHERHPIFGNIVDEVAYHEKYPTIYHLRKKLVDSTDKADLRLIYLALAHMIKFRGHFLIEGDLNPDNSDVDKLFIQLVQTYNQLFEENPINASGVDAKAILSARLSKSRRLENLIAQLPGEKKNGLFGNLIALSLGLTPNFKSNFDLAEDAKLQLSKDTYDDDLDNLLAQIGDQYADLFLAAKNLSDAILLSDILRVNTEITKAPLSASMIKRYDEHHQDLTLLKALVRQQLPEKYKEIFFDQSKNGYAGYIDGGASQEEFYKFIKPILEKMDGTEELLVKLNREDLLRKQRTFDNGSIPHQIHLGELHAILRRQEDFYPFLKDNREKIEKILTFRIPYYVGPLARGNSRFAWMTRKSEETITPWNFEEVVDKGASAQSFIERMTNFDKNLPNEKVLPKHSLLYEYFTVYNELTKVKYVTEGMRKPAFLSGEQKKAIVDLLFKTNRKVTVKQLKEDYFKKIECFDSVEISGVEDRFNASLGTYHDLLKIIKDKDFLDNEENEDILEDIVLTLTLFEDREMIEERLKTYAHLFDDKVMKQLKRRRYTGWGRLSRKLINGIRDKQSGKTILDFLKSDGFANRNFMQLIHDDSLTFKEDIQKAQVSGQGDSLHEHIANLAGSPAIKKGILQTVKVVDELVKVMGRHKPENIVIEMARENQTTQKGQKNSRERMKRIEEGIKELGSQILKEHPVENTQLQNEKLYLYYLQNGRDMYVDQELDINRLSDYDVDHIVPQSFLKDDSIDNKVLTRSDKARGKSDNVPSEEVVKKMKNYWRQLLNAKLITQRKFDNLTKAERGGLSELDKAGFIKRQLVETRQITKHVAQILDSRMNTKYDENDKLIREVKVITLKSKLVSDFRKDFQFYKVREINNYHHAHDAYLNAVVGTALIKKYPKLESEFVYGDYKVYDVRKMIAKSEQEIGKATAKYFFYSNIMNFFKTEITLANGEIRKRPLIETNGETGEIVWDKGRDFATVRKVLSMPQVNIVKKTEVQTGGFSKESILPKRNSDKLIARKKDWDPKKYGGFDSPTVAYSVLVVAKVEKGKSKKLKSVKELLGITIMERSSFEKNPIDFLEAKGYKEVKKDLIIKLPKYSLFELENGRKRMLASAGELQKGNELALPSKYVNFLYLASHYEKLKGSPEDNEQKQLFVEQHKHYLDEIIEQISEFSKRVILADANLDKVLSAYNKHRDKPIREQAENIIHLFTLTNLGAPAAFKYFDTTIDRKRYTSTKEVLDATLIHQSITGLYETRIDLSQLGGDGGPAPAPAPAPAPAPGGMDPLQLLQPLEAEIKGTKLKAHWNSGATITCVPEAFLEDERPIQTMLIKTIHGEKQQDVYYLTFKVQGRKVEAEVLASPYDYILLNPSDVPWLMKKPLQLTVLVPLHEYQERLLQQTALPKEQKELLQKLFLKYDALWQHWENQVGHRRIKPHNIATGTLAPRPQKQYPINPKAKPSIQIVIDDLLKQGVLIQQNSTMNTPVYPVPKPDGKWRMVLDYREVNKTIPLIAAQNQHSAGILSSIYRGKYKTTLDLTNGFWAHPITPESYWLTAFTWQGKQYCWTRLPQGFLNSPALFNADVVDLLKEIPNVQAYVDDIYISHDDPQEHLEQLEKIFSILLNAGYVVSLKKSEIAQREVEFLGFNITKEGRGLTDTFKQKLLNITPPKDLKQLQSILGLLNFARNFIPNYSELVKPLYTIVAPANGKFISWTEDNSNQLQHIISVLNQADNLEERNPETRLIIKVNSSPSAGYIRYYNEGSKRPIMYVNYIFSKAEAKFTQTEKLLTTMHKGLIKAMDLAMGQEILVYSPIVSMTKIQRTPLPERKALPVRWITWMTYLEDPRIQFHYDKSLPELQQIPNVTEDVIAKTKHPSEFAMVFYTDGSAIKHPDVNKSHSAGMGIAQVQFIPEYKIVHQWSIPLGDHTAQLAEIAAVEFACKKALKISGPVLIVTDSFYVAESANKELPYWKSNGFLNNKKKPLRHVSKWKSIAECLQLKPDIIIMHEKGHQQPMTTLHTEGNNLADKLATQGSYVVHAGKRTADGSEFEKRTADGSEFESPKKKAKVE

SEQ ID NO: 479 - protein, 2170 aa, synthetic construct
MPAAKRVKLDGGDKKYSIGLDIGTNSVGWAVITDEYKVPSKKFKVLGNTDRHSIKKNLIGALLFDSGETAEATRLKRTARRRYTRRKNRICYLQEIFSNEMAKVDDSFFHRLEESFLVEEDKKHERHPIFGNIVDEVAYHEKYPTIYHLRKKLVDSTDKADLRLIYLALAHMIKFRGHFLIEGDLNPDNSDVDKLFIQLVQTYNQLFEENPINASGVDAKAILSARLSKSRRLENLIAQLPGEKKNGLFGNLIALSLGLTPNFKSNFDLAEDAKLQLSKDTYDDDLDNLLAQIGDQYADLFLAAKNLSDAILLSDILRVNTEITKAPLSASMIKRYDEHHQDLTLLKALVRQQLPEKYKEIFFDQSKNGYAGYIDGGASQEEFYKFIKPILEKMDGTEELLVKLNREDLLRKQRTFDNGSIPHQIHLGELHAILRRQEDFYPFLKDNREKIEKILTFRIPYYVGPLARGNSRFAWMTRKSEETITPWNFEEVVDKGASAQSFIERMTNFDKNLPNEKVLPKHSLLYEYFTVYNELTKVKYVTEGMRKPAFLSGEQKKAIVDLLFKTNRKVTVKQLKEDYFKKIECFDSVEISGVEDRFNASLGTYHDLLKIIKDKDFLDNEENEDILEDIVLTLTLFEDREMIEERLKTYAHLFDDKVMKQLKRRRYTGWGRLSRKLINGIRDKQSGKTILDFLKSDGFANRNFMQLIHDDSLTFKEDIQKAQVSGQGDSLHEHIANLAGSPAIKKGILQTVKVVDELVKVMGRHKPENIVIEMARENQTTQKGQKNSRERMKRIEEGIKELGSQILKEHPVENTQLQNEKLYLYYLQNGRDMYVDQELDINRLSDYDVDHIVPQSFLKDDSIDNKVLTRSDKARGKSDNVPSEEVVKKMKNYWRQLLNAKLITQRKFDNLTKAERGGLSELDKAGFIKRQLVETRQITKHVAQILDSRMNTKYDENDKLIREVKVITLKSKLVSDFRKDFQFYKVREINNYHHAHDAYLNAVVGTALIKKYPKLESEFVYGDYKVYDVRKMIAKSEQEIGKATAKYFFYSNIMNFFKTEITLANGEIRKRPLIETNGETGEIVWDKGRDFATVRKVLSMPQVNIVKKTEVQTGGFSKESILPKRNSDKLIARKKDWDPKKYGGFDSPTVAYSVLVVAKVEKGKSKKLKSVKELLGITIMERSSFEKNPIDFLEAKGYKEVKKDLIIKLPKYSLFELENGRKRMLASAGELQKGNELALPSKYVNFLYLASHYEKLKGSPEDNEQKQLFVEQHKHYLDEIIEQISEFSKRVILADANLDKVLSAYNKHRDKPIREQAENIIHLFTLTNLGAPAAFKYFDTTIDRKRYTSTKEVLDATLIHQSITGLYETRIDLSQLGGDGGGGGGGGGMDPLQLLQPLEAEIKGTKLKAHWNSGATITCVPEAFLEDERPIQTMLIKTIHGEKQQDVYYLTFKVQGRKVEAEVLASPYDYILLNPSDVPWLMKKPLQLTVLVPLHEYQERLLQQTALPKEQKELLQKLFLKYDALWQHWENQVGHRRIKPHNIATGTLAPRPQKQYPINPKAKPSIQIVIDDLLKQGVLIQQNSTMNTPVYPVPKPDGKWRMVLDYREVNKTIPLIAAQNQHSAGILSSIYRGKYKTTLDLTNGFWAHPITPESYWLTAFTWQGKQYCWTRLPQGFLNSPALFNADVVDLLKEIPNVQAYVDDIYISHDDPQEHLEQLEKIFSILLNAGYVVSLKKSEIAQREVEFLGFNITKEGRGLTDTFKQKLLNITPPKDLKQLQSILGLLNFARNFIPNYSELVKPLYTIVAPANGKFISWTEDNSNQLQHIISVLNQADNLEERNPETRLIIKVNSSPSAGYIRYYNEGSKRPIMYVNYIFSKAEAKFTQTEKLLTTMHKGLIKAMDLAMGQEILVYSPIVSMTKIQRTPLPERKALPVRWITWMTYLEDPRIQFHYDKSLPELQQIPNVTEDVIAKTKHPSEFAMVFYTDGSAIKHPDVNKSHSAGMGIAQVQFIPEYKIVHQWSIPLGDHTAQLAEIAAVEFACKKALKISGPVLIVTDSFYVAESANKELPYWKSNGFLNNKKKPLRHVSKWKSIAECLQLKPDIIIMHEKGHQQPMTTLHTEGNNLADKLATQGSYVVHAGKRTADGSEFEKRTADGSEFESPKKKAKVE

SEQ ID NO: 480 - protein, 2211 aa, synthetic construct
MPAAKRVKLDGGDKKYSIGLDIGTNSVGWAVITDEYKVPSKKFKVLGNTDRHSIKKNLIGALLFDSGETAEATRLKRTARRRYTRRKNRICYLQEIFSNEMAKVDDSFFHRLEESFLVEEDKKHERHPIFGNIVDEVAYHEKYPTIYHLRKKLVDSTDKADLRLIYLALAHMIKFRGHFLIEGDLNPDNSDVDKLFIQLVQTYNQLFEENPINASGVDAKAILSARLSKSRRLENLIAQLPGEKKNGLFGNLIALSLGLTPNFKSNFDLAEDAKLQLSKDTYDDDLDNLLAQIGDQYADLFLAAKNLSDAILLSDILRVNTEITKAPLSASMIKRYDEHHQDLTLLKALVRQQLPEKYKEIFFDQSKNGYAGYIDGGASQEEFYKFIKPILEKMDGTEELLVKLNREDLLRKQRTFDNGSIPHQIHLGELHAILRRQEDFYPFLKDNREKIEKILTFRIPYYVGPLARGNSRFAWMTRKSEETITPWNFEEVVDKGASAQSFIERMTNFDKNLPNEKVLPKHSLLYEYFTVYNELTKVKYVTEGMRKPAFLSGEQKKAIVDLLFKTNRKVTVKQLKEDYFKKIECFDSVEISGVEDRFNASLGTYHDLLKIIKDKDFLDNEENEDILEDIVLTLTLFEDREMIEERLKTYAHLFDDKVMKQLKRRRYTGWGRLSRKLINGIRDKQSGKTILDFLKSDGFANRNFMQLIHDDSLTFKEDIQKAQVSGQGDSLHEHIANLAGSPAIKKGILQTVKVVDELVKVMGRHKPENIVIEMARENQTTQKGQKNSRERMKRIEEGIKELGSQILKEHPVENTQLQNEKLYLYYLQNGRDMYVDQELDINRLSDYDVDHIVPQSFLKDDSIDNKVLTRSDKARGKSDNVPSEEVVKKMKNYWRQLLNAKLITQRKFDNLTKAERGGLSELDKAGFIKRQLVETRQITKHVAQILDSRMNTKYDENDKLIREVKVITLKSKLVSDFRKDFQFYKVREINNYHHAHDAYLNAVVGTALIKKYPKLESEFVYGDYKVYDVRKMIAKSEQEIGKATAKYFFYSNIMNFFKTEITLANGEIRKRPLIETNGETGEIVWDKGRDFATVRKVLSMPQVNIVKKTEVQTGGFSKESILPKRNSDKLIARKKDWDPKKYGGFDSPTVAYSVLVVAKVEKGKSKKLKSVKELLGITIMERSSFEKNPIDFLEAKGYKEVKKDLIIKLPKYSLFELENGRKRMLASAGELQKGNELALPSKYVNFLYLASHYEKLKGSPEDNEQKQLFVEQHKHYLDEIIEQISEFSKRVILADANLDKVLSAYNKHRDKPIREQAENIIHLFTLTNLGAPAAFKYFDTTIDRKRYTSTKEVLDATLIHQSITGLYETRIDLSQLGGDGGAEAAAKEAAAKEAAAKEAAAKALEAEAAAKEAAAKEAAAKEAAAKAGGMDPLQLLQPLEAEIKGTKLKAHWNSGATITCVPEAFLEDERPIQTMLIKTIHGEKQQDVYYLTFKVQGRKVEAEVLASPYDYILLNPSDVPWLMKKPLQLTVLVPLHEYQERLLQQTALPKEQKELLQKLFLKYDALWQHWENQVGHRRIKPHNIATGTLAPRPQKQYPINPKAKPSIQIVIDDLLKQGVLIQQNSTMNTPVYPVPKPDGKWRMVLDYREVNKTIPLIAAQNQHSAGILSSIYRGKYKTTLDLTNGFWAHPITPESYWLTAFTWQGKQYCWTRLPQGFLNSPALFNADVVDLLKEIPNVQAYVDDIYISHDDPQEHLEQLEKIFSILLNAGYVVSLKKSEIAQREVEFLGFNITKEGRGLTDTFKQKLLNITPPKDLKQLQSILGKLNFARNFIPNYSELVKPLYTIVAPANGKFISWTEDNSNQLQHIISVLNQADNLEERNPETRLIIKVNSSPSAGYIRYYNEGSKRPIMYVNYIFSKAEAKFTQTEKLLTTMHKGLIKAMDLAMGQEILVYSPIVSMTKIQRTPLPERKALPVRWITWMTYLEDPRIQFHYDKSLPELQQIPNVTEDVIAKTKHPSEFAMVFYTDGSAIKHPDVNKSHSAGMGIAQVQFIPEYKIVHQWSIPLGDHTAQLAEIAAVEFACKKALKISGPVLIVTDSFYVAESANKELPYWKSNGFLNNKKKPLRHVSKWKSIAECLQLKPDIIIMHEKGHQQPMTTLHTEGNNLADKLATQGSYVVHAGKRTADGSEFEKRTADGSEFESPKKKAKVE

SEQ ID NO: 481 - protein, 2195 aa, synthetic construct
MPAAKRVKLDGGDKKYSIGLDIGTNSVGWAVITDEYKVPSKKFKVLGNTDRHSIKKNLIGALLFDSGETAEATRLKRTARRRYTRRKNRICYLQEIFSNEMAKVDDSFFHRLEESFLVEEDKKHERHPIFGNIVDEVAYHEKYPTIYHLRKKLVDSTDKADLRLIYLALAHMIKFRGHFLIEGDLNPDNSDVDKLFIQLVQTYNQLFEENPINASGVDAKAILSARLSKSRRLENLIAQLPGEKKNGLFGNLIALSLGLTPNFKSNFDLAEDAKLQLSKDTYDDDLDNLLAQIGDQYADLFLAAKNLSDAILLSDILRVNTEITKAPLSASMIKRYDEHHQDLTLLKALVRQQLPEKYKEIFFDQSKNGYAGYIDGGASQEEFYKFIKPILEKMDGTEELLVKLNREDLLRKQRTFDNGSIPHQIHLGELHAILRRQEDFYPFLKDNREKIEKILTFRIPYYVGPLARGNSRFAWMTRKSEETITPWNFEEVVDKGASAQSFIERMTNFDKNLPNEKVLPKHSLLYEYFTVYNELTKVKYVTEGMRKPAFLSGEQKKAIVDLLFKTNRKVTVKQLKEDYFKKIECFDSVEISGVEDRFNASLGTYHDLLKIIKDKDFLDNEENEDILEDIVLTLTLFEDREMIEERLKTYAHLFDDKVMKQLKRRRYTGWGRLSRKLINGIRDKQSGKTILDFLKSDGFANRNFMQLIHDDSLTFKEDIQKAQVSGQGDSLHEHIANLAGSPAIKKGILQTVKVVDELVKVMGRHKPENIVIEMARENQTTQKGQKNSRERMKRIEEGIKELGSQILKEHPVENTQLQNEKLYLYYLQNGRDMYVDQELDINRLSDYDVDHIVPQSFLKDDSIDNKVLTRSDKARGKSDNVPSEEVVKKMKNYWRQLLNAKLITQRKFDNLTKAERGGLSELDKAGFIKRQLVETRQITKHVAQILDSRMNTKYDENDKLIREVKVITLKSKLVSDFRKDFQFYKVREINNYHHAHDAYLNAVVGTALIKKYPKLESEFVYGDYKVYDVRKMIAKSEQEIGKATAKYFFYSNIMNFFKTEITLANGEIRKRPLIETNGETGEIVWDKGRDFATVRKVLSMPQVNIVKKTEVQTGGFSKESILPKRNSDKLIARKKDWDPKKYGGFDSPTVAYSVLVVAKVEKGKSKKLKSVKELLGITIMERSSFEKNPIDFLEAKGYKEVKKDLIIKLPKYSLFELENGRKRMLASAGELQKGNELALPSKYVNFLYLASHYEKLKGSPEDNEQKQLFVEQHKHYLDEIIEQISEFSKRVILADANLDKVLSAYNKHRDKPIREQAENIIHLFTLTNLGAPAAFKYFDTTIDRKRYTSTKEVLDATLIHQSITGLYETRIDLSQLGGDGGEAAAKEAAAKEAAAKEAAAKEAAAKEAAAKGGMDPLQLLQPLEAEIKGTKLKAHWNSGATITCVPEAFLEDERPIQTMLIKTIHGEKQQDVYYLTFKVQGRKVEAEVLASPYDYILLNPSDVPWLMKKPLQLTVLVPLHEYQERLLQQTALPKEQKELLQKLFLKYDALWQHWENQVGHRRIKPHNIATGTLAPRPQKQYPINPKAKPSIQIVIDDLLKQGVLIQQNSTMNTPVYPVPKPDGKWRMVLDYREVNKTIPLIAAQNQHSAGILSSIYRGKYKTTLDLTNGFWAHPITPESYWLTAFTWQGKQYCWTRLPQGFLNSPALFNADVVDLLKEIPNVQAYVDDIYISHDDPQEHLEQLEKIFSILLNAGYVVSLKKSEIAQREVEFLGFNITKEGRGLTDTFKQKLLNITPPKDLKQLQSILGKLNFARNFIPNYSELVKPLYTIVAPANGKFISWTEDNSNQLQHIISVLNQADNLEERNPETRLIIKVNSSPSAGYIRYYNEGSKRPIMYVNYIFSKAEAKFTQTEKLLTTMHKGLIKAMDLAMGQEILVYSPIVSMTKIQRTPLPERKALPVRWITWMTYLEDPRIQFHYDKSLPELQQIPNVTEDVIAKTKHPSEFAMVFYTDGSAIKHPDVNKSHSAGMGIAQVQFIPEYKIVHQWSIPLGDHTAQLAEIAAVEFACKKALKISGPVLIVTDSFYVAESANKELPYWKSNGFLNNKKKPLRHVSKWKSIAECLQLKPDIIIMHEKGHQQPMTTLHTEGNNLADKLATQGSYVVHAGKRTADGSEFEKRTADGSEFESPKKKAKVE

SEQ ID NO: 482 - protein, 2176 aa, synthetic construct
MPAAKRVKLDGGDKKYSIGLDIGTNSVGWAVITDEYKVPSKKFKVLGNTDRHSIKKNLIGALLFDSGETAEATRLKRTARRRYTRRKNRICYLQEIFSNEMAKVDDSFFHRLEESFLVEEDKKHERHPIFGNIVDEVAYHEKYPTIYHLRKKLVDSTDKADLRLIYLALAHMIKFRGHFLIEGDLNPDNSDVDKLFIQLVQTYNQLFEENPINASGVDAKAILSARLSKSRRLENLIAQLPGEKKNGLFGNLIALSLGLTPNFKSNFDLAEDAKLQLSKDTYDDDLDNLLAQIGDQYADLFLAAKNLSDAILLSDILRVNTEITKAPLSASMIKRYDEHHQDLTLLKALVRQQLPEKYKEIFFDQSKNGYAGYIDGGASQEEFYKFIKPILEKMDGTEELLVKLNREDLLRKQRTFDNGSIPHQIHLGELHAILRRQEDFYPFLKDNREKIEKILTFRIPYYVGPLARGNSRFAWMTRKSEETITPWNFEEVVDKGASAQSFIERMTNFDKNLPNEKVLPKHSLLYEYFTVYNELTKVKYVTEGMRKPAFLSGEQKKAIVDLLFKTNRKVTVKQLKEDYFKKIECFDSVEISGVEDRFNASLGTYHDLLKIIKDKDFLDNEENEDILEDIVLTLTLFEDREMIEERLKTYAHLFDDKVMKQLKRRRYTGWGRLSRKLINGIRDKQSGKTILDFLKSDGFANRNFMQLIHDDSLTFKEDIQKAQVSGQGDSLHEHIANLAGSPAIKKGILQTVKVVDELVKVMGRHKPENIVIEMARENQTTQKGQKNSRERMKRIEEGIKELGSQILKEHPVENTQLQNEKLYLYYLQNGRDMYVDQELDINRLSDYDVDHIVPQSFLKDDSIDNKVLTRSDKARGKSDNVPSEEVVKKMKNYWRQLLNAKLITQRKFDNLTKAERGGLSELDKAGFIKRQLVETRQITKHVAQILDSRMNTKYDENDKLIREVKVITLKSKLVSDFRKDFQFYKVREINNYHHAHDAYLNAVVGTALIKKYPKLESEFVYGDYKVYDVRKMIAKSEQEIGKATAKYFFYSNIMNFFKTEITLANGEIRKRPLIETNGETGEIVWDKGRDFATVRKVLSMPQVNIVKKTEVQTGGFSKESILPKRNSDKLIARKKDWDPKKYGGFDSPTVAYSVLVVAKVEKGKSKKLKSVKELLGITIMERSSFEKNPIDFLEAKGYKEVKKDLIIKLPKYSLFELENGRKRMLASAGELQKGNELALPSKYVNFLYLASHYEKLKGSPEDNEQKQLFVEQHKHYLDEIIEQISEFSKRVILADANLDKVLSAYNKHRDKPIREQAENIIHLFTLTNLGAPAAFKYFDTTIDRKRYTSTKEVLDATLIHQSITGLYETRIDLSQLGGDGGEAAAKGGSPAPGGMDPLQLLQPLEAEIKGTKLKAHWNSGATITCVPEAFLEDERPIQTMLIKTIHGEKQQDVYYLTFKVQGRKVEAEVLASPYDYILLNPSDVPWLMKKPLQLTVLVPLHEYQERLLQQTALPKEQKELLQKLFLKYDALWQHWENQVGHRRIKPHNIATGTLAPRPQKQYPINPKAKPSIQIVIDDLLKQGVLIQQNSTMNTPVYPVPKPDGKWRMVLDYREVNKTIPLIAAQNQHSAGILSSIYRGKYKTTLDLTNGFWAHPITPESYWLTAFTWQGKQYCWTRLPQGFLNSPALFNADVVDLLKEIPNVQAYVDDIYISHDDPQEHLEQLEKIFSILLNAGYVVSLKKSEIAQREVEFLGFNITKEGRGLTDTFKQKLLNITPPKDLKQLQSILGKLNFARNFIPNYSELVKPLYTIVAPANGKFISWTEDNSNQLQHIISVLNQADNLEERNPETRLIIKVNSSPSAGYIRYYNEGSKRPIMYVNYIFSKAEAKFTQTEKLLTTMHKGLIKAMDLAMGQEILVYSPIVSMTKIQRTPLPERKALPVRWITWMTYLEDPRIQFHYDKSLPELQQIPNVTEDVIAKTKHPSEFAMVFYTDGSAIKHPDVNKSHSAGMGIAQVQFIPEYKIVHQWSIPLGDHTAQLAEIAAVEFACKKALKISGPVLIVTDSFYVAESANKELPYWKSNGFLNNKKKPLRHVSKWKSIAECLQLKPDIIIMHEKGHQQPMTTLHTEGNNLADKLATQGSYVVHAGKRTADGSEFEKRTADGSEFESPKKKAKVE

SEQ ID NO: 483 - protein, 2174 aa, synthetic construct
MPAAKRVKLDGGDKKYSIGLDIGTNSVGWAVITDEYKVPSKKFKVLGNTDRHSIKKNLIGALLFDSGETAEATRLKRTARRRYTRRKNRICYLQEIFSNEMAKVDDSFFHRLEESFLVEEDKKHERHPIFGNIVDEVAYHEKYPTIYHLRKKLVDSTDKADLRLIYLALAHMIKFRGHFLIEGDLNPDNSDVDKLFIQLVQTYNQLFEENPINASGVDAKAILSARLSKSRRLENLIAQLPGEKKNGLFGNLIALSLGLTPNFKSNFDLAEDAKLQLSKDTYDDDLDNLLAQIGDQYADLFLAAKNLSDAILLSDILRVNTEITKAPLSASMIKRYDEHHQDLTLLKALVRQQLPEKYKEIFFDQSKNGYAGYIDGGASQEEFYKFIKPILEKMDGTEELLVKLNREDLLRKQRTFDNGSIPHQIHLGELHAILRRQEDFYPFLKDNREKIEKILTFRIPYYVGPLARGNSRFAWMTRKSEETITPWNFEEVVDKGASAQSFIERMTNFDKNLPNEKVLPKHSLLYEYFTVYNELTKVKYVTEGMRKPAFLSGEQKKAIVDLLFKTNRKVTVKQLKEDYFKKIECFDSVEISGVEDRFNASLGTYHDLLKIIKDKDFLDNEENEDILEDIVLTLTLFEDREMIEERLKTYAHLFDDKVMKQLKRRRYTGWGRLSRKLINGIRDKQSGKTILDFLKSDGFANRNFMQLIHDDSLTFKEDIQKAQVSGQGDSLHEHIANLAGSPAIKKGILQTVKVVDELVKVMGRHKPENIVIEMARENQTTQKGQKNSRERMKRIEEGIKELGSQILKEHPVENTQLQNEKLYLYYLQNGRDMYVDQELDINRLSDYDVDHIVPQSFLKDDSIDNKVLTRSDKARGKSDNVPSEEVVKKMKNYWRQLLNAKLITQRKFDNLTKAERGGLSELDKAGFIKRQLVETRQITKHVAQILDSRMNTKYDENDKLIREVKVITLKSKLVSDFRKDFQFYKVREINNYHHAHDAYLNAVVGTALIKKYPKLESEFVYGDYKVYDVRKMIAKSEQEIGKATAKYFFYSNIMNFFKTEITLANGEIRKRPLIETNGETGEIVWDKGRDFATVRKVLSMPQVNIVKKTEVQTGGFSKESILPKRNSDKLIARKKDWDPKKYGGFDSPTVAYSVLVVAKVEKGKSKKLKSVKELLGITIMERSSFEKNPIDFLEAKGYKEVKKDLIIKLPKYSLFELENGRKRMLASAGELQKGNELALPSKYVNFLYLASHYEKLKGSPEDNEQKQLFVEQHKHYLDEIIEQISEFSKRVILADANLDKVLSAYNKHRDKPIREQAENIIHLFTLTNLGAPAAFKYFDTTIDRKRYTSTKEVLDATLIHQSITGLYETRIDLSQLGGDGGGGSGSSPAPGGMDPLQLLQPLEAEIKGTKLKAHWNSGATITCVPEAFLEDERPIQTMLIKTIHGEKQQDVYYLTFKVQGRKVEAEVLASPYDYILLNPSDVPWLMKKPLQLTVLVPLHEYQERLLQQTALPKEQKELLQKLFLKYDALWQHWENQVGHRRIKPHNIATGTLAPRPQKQYPINPKAKPSIQIVIDDLLKQGVLIQQNSTMNTPVYPVPKPDGKWRMVLDYREVNKTIPLIAAQNQHSAGILSSIYRGKYKTTLDLTNGFWAHPITPESYWLTAFTWQGKQYCWTRLPQGFLNSPALFNADVVDLLKEIPNVQAYVDDIYISHDDPQEHLEQLEKIFSILLNAGYVVSLKKSEIAQREVEFLGFNITKEGRGLTDTFKQKLLNITPPKDLKQLQSILGKLNFARNFIPNYSELVKPLYTIVAPANGKFISWTEDNSNQLQHIISVLNQADNLEERNPETRLIIKVNSSPSAGYIRYYNEGSKRPIMYVNYIFSKAEAKFTQTEKLLTTMHKGLIKAMDLAMGQEILVYSPIVSMTKIQRTPLPERKALPVRWITWMTYLEDPRIQFHYDKSLPELQQIPNVTEDVIAKTKHPSEFAMVFYTDGSAIKHPDVNKSHSAGMGIAQVQFIPEYKIVHQWSIPLGDHTAQLAEIAAVEFACKKALKISGPVLIVTDSFYVAESANKELPYWKSNGFLNNKKKPLRHVSKWKSIAECLQLKPDIIIMHEKGHQQPMTTLHTEGNNLADKLATQGSYVVHAGKRTADGSEFEKRTADGSEFESPKKKAKVE

SEQ ID NO: 484 - protein, 2171 aa, synthetic construct
MPAAKRVKLDGGDKKYSIGLDIGTNSVGWAVITDEYKVPSKKFKVLGNTDRHSIKKNLIGALLFDSGETAEATRLKRTARRRYTRRKNRICYLQEIFSNEMAKVDDSFFHRLEESFLVEEDKKHERHPIFGNIVDEVAYHEKYPTIYHLRKKLVDSTDKADLRLIYLALAHMIKFRGHFLIEGDLNPDNSDVDKLFIQLVQTYNQLFEENPINASGVDAKAILSARLSKSRRLENLIAQLPGEKKNGLFGNLIALSLGLTPNFKSNFDLAEDAKLQLSKDTYDDDLDNLLAQIGDQYADLFLAAKNLSDAILLSDILRVNTEITKAPLSASMIKRYDEHHQDLTLLKALVRQQLPEKYKEIFFDQSKNGYAGYIDGGASQEEFYKFIKPILEKMDGTEELLVKLNREDLLRKQRTFDNGSIPHQIHLGELHAILRRQEDFYPFLKDNREKIEKILTFRIPYYVGPLARGNSRFAWMTRKSEETITPWNFEEVVDKGASAQSFIERMTNFDKNLPNEKVLPKHSLLYEYFTVYNELTKVKYVTEGMRKPAFLSGEQKKAIVDLLFKTNRKVTVKQLKEDYFKKIECFDSVEISGVEDRFNASLGTYHDLLKIIKDKDFLDNEENEDILEDIVLTLTLFEDREMIEERLKTYAHLFDDKVMKQLKRRRYTGWGRLSRKLINGIRDKQSGKTILDFLKSDGFANRNFMQLIHDDSLTFKEDIQKAQVSGQGDSLHEHIANLAGSPAIKKGILQTVKVVDELVKVMGRHKPENIVIEMARENQTTQKGQKNSRERMKRIEEGIKELGSQILKEHPVENTQLQNEKLYLYYLQNGRDMYVDQELDINRLSDYDVDHIVPQSFLKDDSIDNKVLTRSDKARGKSDNVPSEEVVKKMKNYWRQLLNAKLITQRKFDNLTKAERGGLSELDKAGFIKRQLVETRQITKHVAQILDSRMNTKYDENDKLIREVKVITLKSKLVSDFRKDFQFYKVREINNYHHAHDAYLNAVVGTALIKKYPKLESEFVYGDYKVYDVRKMIAKSEQEIGKATAKYFFYSNIMNFFKTEITLANGEIRKRPLIETNGETGEIVWDKGRDFATVRKVLSMPQVNIVKKTEVQTGGFSKESILPKRNSDKLIARKKDWDPKKYGGFDSPTVAYSVLVVAKVEKGKSKKLKSVKELLGITIMERSSFEKNPIDFLEAKGYKEVKKDLIIKLPKYSLFELENGRKRMLASAGELQKGNELALPSKYVNFLYLASHYEKLKGSPEDNEQKQLFVEQHKHYLDEIIEQISEFSKRVILADANLDKVLSAYNKHRDKPIREQAENIIHLFTLTNLGAPAAFKYFDTTIDRKRYTSTKEVLDATLIHQSITGLYETRIDLSQLGGDGGGGGGGGGGMDPLQLLQPLEAEIKGTKLKAHWNSGATITCVPEAFLEDERPIQTMLIKTIHGEKQQDVYYLTFKVQGRKVEAEVLASPYDYILLNPSDVPWLMKKPLQLTVLVPLHEYQERLLQQTALPKEQKELLQKLFLKYDALWQHWENQVGHRRIKPHNIATGTLAPRPQKQYPINPKAKPSIQIVIDDLLKQGVLIQQNSTMNTPVYPVPKPDGKWRMVLDYREVNKTIPLIAAQNQHSAGILSSIYRGKYKTTLDLTNGFWAHPITPESYWLTAFTWQGKQYCWTRLPQGFLNSPALFNADVVDLLKEIPNVQAYVDDIYISHDDPQEHLEQLEKIFSILLNAGYVVSLKKSEIAQREVEFLGFNITKEGRGLTDTFKQKLLNITPPKDLKQLQSILGKLNFARNFIPNYSELVKPLYTIVAPANGKFISWTEDNSNQLQHIISVLNQADNLEERNPETRLIIKVNSSPSAGYIRYYNEGSKRPIMYVNYIFSKAEAKFTQTEKLLTTMHKGLIKAMDLAMGQEILVYSPIVSMTKIQRTPLPERKALPVRWITWMTYLEDPRIQFHYDKSLPELQQIPNVTEDVIAKTKHPSEFAMVFYTDGSAIKHPDVNKSHSAGMGIAQVQFIPEYKIVHQWSIPLGDHTAQLAEIAAVEFACKKALKISGPVLIVTDSFYVAESANKELPYWKSNGFLNNKKKPLRHVSKWKSIAECLQLKPDIIIMHEKGHQQPMTTLHTEGNNLADKLATQGSYVVHAGKRTADGSEFEKRTADGSEFESPKKKAKVE

SEQ ID NO: 485 - protein, 2176 aa, synthetic construct
MPAAKRVKLDGGDKKYSIGLDIGTNSVGWAVITDEYKVPSKKFKVLGNTDRHSIKKNLIGALLFDSGETAEATRLKRTARRRYTRRKNRICYLQEIFSNEMAKVDDSFFHRLEESFLVEEDKKHERHPIFGNIVDEVAYHEKYPTIYHLRKKLVDSTDKADLRLIYLALAHMIKFRGHFLIEGDLNPDNSDVDKLFIQLVQTYNQLFEENPINASGVDAKAILSARLSKSRRLENLIAQLPGEKKNGLFGNLIALSLGLTPNFKSNFDLAEDAKLQLSKDTYDDDLDNLLAQIGDQYADLFLAAKNLSDAILLSDILRVNTEITKAPLSASMIKRYDEHHQDLTLLKALVRQQLPEKYKEIFFDQSKNGYAGYIDGGASQEEFYKFIKPILEKMDGTEELLVKLNREDLLRKQRTFDNGSIPHQIHLGELHAILRRQEDFYPFLKDNREKIEKILTFRIPYYVGPLARGNSRFAWMTRKSEETITPWNFEEVVDKGASAQSFIERMTNFDKNLPNEKVLPKHSLLYEYFTVYNELTKVKYVTEGMRKPAFLSGEQKKAIVDLLFKTNRKVTVKQLKEDYFKKIECFDSVEISGVEDRFNASLGTYHDLLKIIKDKDFLDNEENEDILEDIVLTLTLFEDREMIEERLKTYAHLFDDKVMKQLKRRRYTGWGRLSRKLINGIRDKQSGKTILDFLKSDGFANRNFMQLIHDDSLTFKEDIQKAQVSGQGDSLHEHIANLAGSPAIKKGILQTVKVVDELVKVMGRHKPENIVIEMARENQTTQKGQKNSRERMKRIEEGIKELGSQILKEHPVENTQLQNEKLYLYYLQNGRDMYVDQELDINRLSDYDVDHIVPQSFLKDDSIDNKVLTRSDKARGKSDNVPSEEVVKKMKNYWRQLLNAKLITQRKFDNLTKAERGGLSELDKAGFIKRQLVETRQITKHVAQILDSRMNTKYDENDKLIREVKVITLKSKLVSDFRKDFQFYKVREINNYHHAHDAYLNAVVGTALIKKYPKLESEFVYGDYKVYDVRKMIAKSEQEIGKATAKYFFYSNIMNFFKTEITLANGEIRKRPLIETNGETGEIVWDKGRDFATVRKVLSMPQVNIVKKTEVQTGGFSKESILPKRNSDKLIARKKDWDPKKYGGFDSPTVAYSVLVVAKVEKGKSKKLKSVKELLGITIMERSSFEKNPIDFLEAKGYKEVKKDLIIKLPKYSLFELENGRKRMLASAGELQKGNELALPSKYVNFLYLASHYEKLKGSPEDNEQKQLFVEQHKHYLDEIIEQISEFSKRVILADANLDKVLSAYNKHRDKPIREQAENIIHLFTLTNLGAPAAFKYFDTTIDRKRYTSTKEVLDATLIHQSITGLYETRIDLSQLGGDGGGSSGGGEAAAKGGMDPLQLLQPLEAEIKGTKLKAHWNSGATITCVPEAFLEDERPIQTMLIKTIHGEKQQDVYYLTFKVQGRKVEAEVLASPYDYILLNPSDVPWLMKKPLQLTVLVPLHEYQERLLQQTALPKEQKELLQKLFLKYDALWQHWENQVGHRRIKPHNIATGTLAPRPQKQYPINPKAKPSIQIVIDDLLKQGVLIQQNSTMNTPVYPVPKPDGKWRMVLDYREVNKTIPLIAAQNQHSAGILSSIYRGKYKTTLDLTNGFWAHPITPESYWLTAFTWQGKQYCWTRLPQGFLNSPALFNADVVDLLKEIPNVQAYVDDIYISHDDPQEHLEQLEKIFSILLNAGYVVSLKKSEIAQREVEFLGFNITKEGRGLTDTFKQKLLNITPPKDLKQLQSILGKLNFARNFIPNYSELVKPLYTIVAPANGKFISWTEDNSNQLQHIISVLNQADNLEERNPETRLIIKVNSSPSAGYIRYYNEGSKRPIMYVNYIFSKAEAKFTQTEKLLTTMHKGLIKAMDLAMGQEILVYSPIVSMTKIQRTPLPERKALPVRWITWMTYLEDPRIQFHYDKSLPELQQIPNVTEDVIAKTKHPSEFAMVFYTDGSAIKHPDVNKSHSAGMGIAQVQFIPEYKIVHQWSIPLGDHTAQLAEIAAVEFACKKALKISGPVLIVTDSFYVAESANKELPYWKSNGFLNNKKKPLRHVSKWKSIAECLQLKPDIIIMHEKGHQQPMTTLHTEGNNLADKLATQGSYVVHAGKRTADGSEFEKRTADGSEFESPKKKAKVE

SEQ ID NO: 486 - protein, 2176 aa, synthetic construct
MPAAKRVKLDGGDKKYSIGLDIGTNSVGWAVITDEYKVPSKKFKVLGNTDRHSIKKNLIGALLFDSGETAEATRLKRTARRRYTRRKNRICYLQEIFSNEMAKVDDSFFHRLEESFLVEEDKKHERHPIFGNIVDEVAYHEKYPTIYHLRKKLVDSTDKADLRLIYLALAHMIKFRGHFLIEGDLNPDNSDVDKLFIQLVQTYNQLFEENPINASGVDAKAILSARLSKSRRLENLIAQLPGEKKNGLFGNLIALSLGLTPNFKSNFDLAEDAKLQLSKDTYDDDLDNLLAQIGDQYADLFLAAKNLSDAILLSDILRVNTEITKAPLSASMIKRYDEHHQDLTLLKALVRQQLPEKYKEIFFDQSKNGYAGYIDGGASQEEFYKFIKPILEKMDGTEELLVKLNREDLLRKQRTFDNGSIPHQIHLGELHAILRRQEDFYPFLKDNREKIEKILTFRIPYYVGPLARGNSRFAWMTRKSEETITPWNFEEVVDKGASAQSFIERMTNFDKNLPNEKVLPKHSLLYEYFTVYNELTKVKYVTEGMRKPAFLSGEQKKAIVDLLFKTNRKVTVKQLKEDYFKKIECFDSVEISGVEDRFNASLGTYHDLLKIIKDKDFLDNEENEDILEDIVLTLTLFEDREMIEERLKTYAHLFDDKVMKQLKRRRYTGWGRLSRKLINGIRDKQSGKTILDFLKSDGFANRNFMQLIHDDSLTFKEDIQKAQVSGQGDSLHEHIANLAGSPAIKKGILQTVKVVDELVKVMGRHKPENIVIEMARENQTTQKGQKNSRERMKRIEEGIKELGSQILKEHPVENTQLQNEKLYLYYLQNGRDMYVDQELDINRLSDYDVDHIVPQSFLKDDSIDNKVLTRSDKARGKSDNVPSEEVVKKMKNYWRQLLNAKLITQRKFDNLTKAERGGLSELDKAGFIKRQLVETRQITKHVAQILDSRMNTKYDENDKLIREVKVITLKSKLVSDFRKDFQFYKVREINNYHHAHDAYLNAVVGTALIKKYPKLESEFVYGDYKVYDVRKMIAKSEQEIGKATAKYFFYSNIMNFFKTEITLANGEIRKRPLIETNGETGEIVWDKGRDFATVRKVLSMPQVNIVKKTEVQTGGFSKESILPKRNSDKLIARKKDWDPKKYGGFDSPTVAYSVLVVAKVEKGKSKKLKSVKELLGITIMERSSFEKNPIDFLEAKGYKEVKKDLIIKLPKYSLFELENGRKRMLASAGELQKGNELALPSKYVNFLYLASHYEKLKGSPEDNEQKQLFVEQHKHYLDEIIEQISEFSKRVILADANLDKVLSAYNKHRDKPIREQAENIIHLFTLTNLGAPAAFKYFDTTIDRKRYTSTKEVLDATLIHQSITGLYETRIDLSQLGGDGGPAPAPAPAPAPGGMDPLQLLQPLEAEIKGTKLKAHWNSGATITCVPEAFLEDERPIQTMLIKTIHGEKQQDVYYLTFKVQGRKVEAEVLASPYDYILLNPSDVPWLMKKPLQLTVLVPLHEYQERLLQQTALPKEQKELLQKLFLKYDALWQHWENQVGHRRIKPHNIATGTLAPRPQKQYPINPKAKPSIQIVIDDLLKQGVLIQQNSTMNTPVYPVPKPDGKWRMVLDYREVNKTIPLIAAQNQHSAGILSSIYRGKYKTTLDLTNGFWAHPITPESYWLTAFTWQGKQYCWTRLPQGFLNSPALFNADVVDLLKEIPNVQAYVDDIYISHDDPQEHLEQLEKIFSILLNAGYVVSLKKSEIAQREVEFLGFNITKEGRGLTDTFKQKLLNITPPKDLKQLQSILGKLNFARNFIPNYSELVKPLYTIVAPANGKFISWTEDNSNQLQHIISVLNQADNLEERNPETRLIIKVNSSPSAGYIRYYNEGSKRPIMYVNYIFSKAEAKFTQTEKLLTTMHKGLIKAMDLAMGQEILVYSPIVSMTKIQRTPLPERKALPVRWITWMTYLEDPRIQFHYDKSLPELQQIPNVTEDVIAKTKHPSEFAMVFYTDGSAIKHPDVNKSHSAGMGIAQVQFIPEYKIVHQWSIPLGDHTAQLAEIAAVEFACKKALKISGPVLIVTDSFYVAESANKELPYWKSNGFLNNKKKPLRHVSKWKSIAECLQLKPDIIIMHEKGHQQPMTTLHTEGNNLADKLATQGSYVVHAGKRTADGSEFEKRTADGSEFESPKKKAKVE

SEQ ID NO: 487 - protein, 2177 aa, synthetic construct
MPAAKRVKLDGGDKKYSIGLDIGTNSVGWAVITDEYKVPSKKFKVLGNTDRHSIKKNLIGALLFDSGETAEATRLKRTARRRYTRRKNRICYLQEIFSNEMAKVDDSFFHRLEESFLVEEDKKHERHPIFGNIVDEVAYHEKYPTIYHLRKKLVDSTDKADLRLIYLALAHMIKFRGHFLIEGDLNPDNSDVDKLFIQLVQTYNQLFEENPINASGVDAKAILSARLSKSRRLENLIAQLPGEKKNGLFGNLIALSLGLTPNFKSNFDLAEDAKLQLSKDTYDDDLDNLLAQIGDQYADLFLAAKNLSDAILLSDILRVNTEITKAPLSASMIKRYDEHHQDLTLLKALVRQQLPEKYKEIFFDQSKNGYAGYIDGGASQEEFYKFIKPILEKMDGTEELLVKLNREDLLRKQRTFDNGSIPHQIHLGELHAILRRQEDFYPFLKDNREKIEKILTFRIPYYVGPLARGNSRFAWMTRKSEETITPWNFEEVVDKGASAQSFIERMTNFDKNLPNEKVLPKHSLLYEYFTVYNELTKVKYVTEGMRKPAFLSGEQKKAIVDLLFKTNRKVTVKQLKEDYFKKIECFDSVEISGVEDRFNASLGTYHDLLKIIKDKDFLDNEENEDILEDIVLTLTLFEDREMIEERLKTYAHLFDDKVMKQLKRRRYTGWGRLSRKLINGIRDKQSGKTILDFLKSDGFANRNFMQLIHDDSLTFKEDIQKAQVSGQGDSLHEHIANLAGSPAIKKGILQTVKVVDELVKVMGRHKPENIVIEMARENQTTQKGQKNSRERMKRIEEGIKELGSQILKEHPVENTQLQNEKLYLYYLQNGRDMYVDQELDINRLSDYDVDHIVPQSFLKDDSIDNKVLTRSDKARGKSDNVPSEEVVKKMKNYWRQLLNAKLITQRKFDNLTKAERGGLSELDKAGFIKRQLVETRQITKHVAQILDSRMNTKYDENDKLIREVKVITLKSKLVSDFRKDFQFYKVREINNYHHAHDAYLNAVVGTALIKKYPKLESEFVYGDYKVYDVRKMIAKSEQEIGKATAKYFFYSNIMNFFKTEITLANGEIRKRPLIETNGETGEIVWDKGRDFATVRKVLSMPQVNIVKKTEVQTGGFSKESILPKRNSDKLIARKKDWDPKKYGGFDSPTVAYSVLVVAKVEKGKSKKLKSVKELLGITIMERSSFEKNPIDFLEAKGYKEVKKDLIIKLPKYSLFELENGRKRMLASAGELQKGNELALPSKYVNFLYLASHYEKLKGSPEDNEQKQLFVEQHKHYLDEIIEQISEFSKRVILADANLDKVLSAYNKHRDKPIREQAENIIHLFTLTNLGAPAAFKYFDTTIDRKRYTSTKEVLDATLIHQSITGLYETRIDLSQLGGDGGGGSGGSGGSGGSGGMDPLQLLQPLEAEIKGTKLKAHWNSGATITCVPEAFLEDERPIQTMLIKTIHGEKQQDVYYLTFKVQGRKVEAEVLASPYDYILLNPSDVPWLMKKPLQLTVLVPLHEYQERLLQQTALPKEQKELLQKLFLKYDALWQHWENQVGHRRIKPHNIATGTLAPRPQKQYPINPKAKPSIQIVIDDLLKQGVLIQQNSTMNTPVYPVPKPDGKWRMVLDYREVNKTIPLIAAQNQHSAGILSSIYRGKYKTTLDLTNGFWAHPITPESYWLTAFTWQGKQYCWTRLPQGFLNSPALFNADVVDLLKEIPNVQAYVDDIYISHDDPQEHLEQLEKIFSILLNAGYVVSLKKSEIAQREVEFLGFNITKEGRGLTDTFKQKLLNITPPKDLKQLQSILGKLNFARNFIPNYSELVKPLYTIVAPANGKFISWTEDNSNQLQHIISVLNQADNLEERNPETRLIIKVNSSPSAGYIRYYNEGSKRPIMYVNYIFSKAEAKFTQTEKLLTTMHKGLIKAMDLAMGQEILVYSPIVSMTKIQRTPLPERKALPVRWITWMTYLEDPRIQFHYDKSLPELQQIPNVTEDVIAKTKHPSEFAMVFYTDGSAIKHPDVNKSHSAGMGIAQVQFIPEYKIVHQWSIPLGDHTAQLAEIAAVEFACKKALKISGPVLIVTDSFYVAESANKELPYWKSNGFLNNKKKPLRHVSKWKSIAECLQLKPDIIIMHEKGHQQPMTTLHTEGNNLADKLATQGSYVVHAGKRTADGSEFEKRTADGSEFESPKKKAKVE

SEQ ID NO: 488 - protein, 2171 aa, synthetic construct
MPAAKRVKLDGGDKKYSIGLDIGTNSVGWAVITDEYKVPSKKFKVLGNTDRHSIKKNLIGALLFDSGETAEATRLKRTARRRYTRRKNRICYLQEIFSNEMAKVDDSFFHRLEESFLVEEDKKHERHPIFGNIVDEVAYHEKYPTIYHLRKKLVDSTDKADLRLIYLALAHMIKFRGHFLIEGDLNPDNSDVDKLFIQLVQTYNQLFEENPINASGVDAKAILSARLSKSRRLENLIAQLPGEKKNGLFGNLIALSLGLTPNFKSNFDLAEDAKLQLSKDTYDDDLDNLLAQIGDQYADLFLAAKNLSDAILLSDILRVNTEITKAPLSASMIKRYDEHHQDLTLLKALVRQQLPEKYKEIFFDQSKNGYAGYIDGGASQEEFYKFIKPILEKMDGTEELLVKLNREDLLRKQRTFDNGSIPHQIHLGELHAILRRQEDFYPFLKDNREKIEKILTFRIPYYVGPLARGNSRFAWMTRKSEETITPWNFEEVVDKGASAQSFIERMTNFDKNLPNEKVLPKHSLLYEYFTVYNELTKVKYVTEGMRKPAFLSGEQKKAIVDLLFKTNRKVTVKQLKEDYFKKIECFDSVEISGVEDRFNASLGTYHDLLKIIKDKDFLDNEENEDILEDIVLTLTLFEDREMIEERLKTYAHLFDDKVMKQLKRRRYTGWGRLSRKLINGIRDKQSGKTILDFLKSDGFANRNFMQLIHDDSLTFKEDIQKAQVSGQGDSLHEHIANLAGSPAIKKGILQTVKVVDELVKVMGRHKPENIVIEMARENQTTQKGQKNSRERMKRIEEGIKELGSQILKEHPVENTQLQNEKLYLYYLQNGRDMYVDQELDINRLSDYDVDHIVPQSFLKDDSIDNKVLTRSDKARGKSDNVPSEEVVKKMKNYWRQLLNAKLITQRKFDNLTKAERGGLSELDKAGFIKRQLVETRQITKHVAQILDSRMNTKYDENDKLIREVKVITLKSKLVSDFRKDFQFYKVREINNYHHAHDAYLNAVVGTALIKKYPKLESEFVYGDYKVYDVRKMIAKSEQEIGKATAKYFFYSNIMNFFKTEITLANGEIRKRPLIETNGETGEIVWDKGRDFATVRKVLSMPQVNIVKKTEVQTGGFSKESILPKRNSDKLIARKKDWDPKKYGGFDSPTVAYSVLVVAKVEKGKSKKLKSVKELLGITIMERSSFEKNPIDFLEAKGYKEVKKDLIIKLPKYSLFELENGRKRMLASAGELQKGNELALPSKYVNFLYLASHYEKLKGSPEDNEQKQLFVEQHKHYLDEIIEQISEFSKRVILADANLDKVLSAYNKHRDKPIREQAENIIHLFTLTNLGAPAAFKYFDTTIDRKRYTSTKEVLDATLIHQSITGLYETRIDLSQLGGDGGGGGGGSGGMDPLQLLQPLEAEIKGTKLKAHWNSGATITCVPEAFLEDERPIQTMLIKTIHGEKQQDVYYLTFKVQGRKVEAEVLASPYDYILLNPSDVPWLMKKPLQLTVLVPLHEYQERLLQQTALPKEQKELLQKLFLKYDALWQHWENQVGHRRIKPHNIATGTLAPRPQKQYPINPKAKPSIQIVIDDLLKQGVLIQQNSTMNTPVYPVPKPDGKWRMVLDYREVNKTIPLIAAQNQHSAGILSSIYRGKYKTTLDLTNGFWAHPITPESYWLTAFTWQGKQYCWTRLPQGFLNSPALFNADVVDLLKEIPNVQAYVDDIYISHDDPQEHLEQLEKIFSILLNAGYVVSLKKSEIAQREVEFLGFNITKEGRGLTDTFKQKLLNITPPKDLKQLQSILGKLNFARNFIPNYSELVKPLYTIVAPANGKFISWTEDNSNQLQHIISVLNQADNLEERNPETRLIIKVNSSPSAGYIRYYNEGSKRPIMYVNYIFSKAEAKFTQTEKLLTTMHKGLIKAMDLAMGQEILVYSPIVSMTKIQRTPLPERKALPVRWITWMTYLEDPRIQFHYDKSLPELQQIPNVTEDVIAKTKHPSEFAMVFYTDGSAIKHPDVNKSHSAGMGIAQVQFIPEYKIVHQWSIPLGDHTAQLAEIAAVEFACKKALKISGPVLIVTDSFYVAESANKELPYWKSNGFLNNKKKPLRHVSKWKSIAECLQLKPDIIIMHEKGHQQPMTTLHTEGNNLADKLATQGSYVVHAGKRTADGSEFEKRTADGSEFESPKKKAKVE

SEQ ID NO: 489 - protein, 2211 aa, synthetic construct
MPAAKRVKLDGGDKKYSIGLDIGTNSVGWAVITDEYKVPSKKFKVLGNTDRHSIKKNLIGALLFDSGETAEATRLKRTARRRYTRRKNRICYLQEIFSNEMAKVDDSFFHRLEESFLVEEDKKHERHPIFGNIVDEVAYHEKYPTIYHLRKKLVDSTDKADLRLIYLALAHMIKFRGHFLIEGDLNPDNSDVDKLFIQLVQTYNQLFEENPINASGVDAKAILSARLSKSRRLENLIAQLPGEKKNGLFGNLIALSLGLTPNFKSNFDLAEDAKLQLSKDTYDDDLDNLLAQIGDQYADLFLAAKNLSDAILLSDILRVNTEITKAPLSASMIKRYDEHHQDLTLLKALVRQQLPEKYKEIFFDQSKNGYAGYIDGGASQEEFYKFIKPILEKMDGTEELLVKLNREDLLRKQRTFDNGSIPHQIHLGELHAILRRQEDFYPFLKDNREKIEKILTFRIPYYVGPLARGNSRFAWMTRKSEETITPWNFEEVVDKGASAQSFIERMTNFDKNLPNEKVLPKHSLLYEYFTVYNELTKVKYVTEGMRKPAFLSGEQKKAIVDLLFKTNRKVTVKQLKEDYFKKIECFDSVEISGVEDRFNASLGTYHDLLKIIKDKDFLDNEENEDILEDIVLTLTLFEDREMIEERLKTYAHLFDDKVMKQLKRRRYTGWGRLSRKLINGIRDKQSGKTILDFLKSDGFANRNFMQLIHDDSLTFKEDIQKAQVSGQGDSLHEHIANLAGSPAIKKGILQTVKVVDELVKVMGRHKPENIVIEMARENQTTQKGQKNSRERMKRIEEGIKELGSQILKEHPVENTQLQNEKLYLYYLQNGRDMYVDQELDINRLSDYDVDHIVPQSFLKDDSIDNKVLTRSDKARGKSDNVPSEEVVKKMKNYWRQLLNAKLITQRKFDNLTKAERGGLSELDKAGFIKRQLVETRQITKHVAQILDSRMNTKYDENDKLIREVKVITLKSKLVSDFRKDFQFYKVREINNYHHAHDAYLNAVVGTALIKKYPKLESEFVYGDYKVYDVRKMIAKSEQEIGKATAKYFFYSNIMNFFKTEITLANGEIRKRPLIETNGETGEIVWDKGRDFATVRKVLSMPQVNIVKKTEVQTGGFSKESILPKRNSDKLIARKKDWDPKKYGGFDSPTVAYSVLVVAKVEKGKSKKLKSVKELLGITIMERSSFEKNPIDFLEAKGYKEVKKDLIIKLPKYSLFELENGRKRMLASAGELQKGNELALPSKYVNFLYLASHYEKLKGSPEDNEQKQLFVEQHKHYLDEIIEQISEFSKRVILADANLDKVLSAYNKHRDKPIREQAENIIHLFTLTNLGAPAAFKYFDTTIDRKRYTSTKEVLDATLIHQSITGLYETRIDLSQLGGDGGAEAAAKEAAAKEAAAKEAAAKALEAEAAAKEAAAKEAAAKEAAAKAGGMDPLQLLQPLEAEIKGTKLKAHWNSGATITCVPQAFLEEEVPIKNIWIKTIHGEKEQPVYYLTFKIQGRKVEAEVISSPYDYILVSPSDIPWLMKKPLQLTTLVPLQEYEERLLKQTMLTGSYKEKLQSLFLKYDALWQHWENQVGHRRIKPHHIATGTVNPRPQKQYPINPKAKASIQTVINDLLKQGVLIQQNSIMNTPVYPVPKPDGKWRMVLDYREVNKTIPLIAAQNQHSAGILSSIFRGKYKTTLDLSNGFWAHSITPESYWLTAFTWLGQQYCWTRLPQGFLNSPALFTADVVDLLKEVPNVQVYVDDIYISHDDPREHLEQLEKVFSLLLNAGYVVSLKKSEIAQHEVEFLGFNITKEGRGLTETFKQKLLNITPPRDLKQLQSILGLLNFARNFIPNFSELVKPLYNIIATANGKYITWTTDNSQQLQNIISMLNSAENLEERNPEVRLIMKVNTSPSAGYIRFYNEFAKRPIMYLNYVYTKAEVKFTNTEKLLTTIHKGLIKALDLGMGQEILVYSPIVSMTKIQKTPLPERKALPIRWITWMSYLEDPRIQFHYDKTLPELQQVPTVTDDIIAKIKHPSEFSMVFYTDGSAIKHPNVNKSHNAGMGIAQVQFKPEFTVINTWSIPLGDHTAQLAEVAAVEFACKKALKIDGPVLIVTDSFYVAESVNKELPYWQSNGFFNNKKKPLKHVSKWKSIADCIQLKPDIIIIHEKGHQPTASTFHTEGNNLADKLATQGSYVVNAGKRTADGSEFEKRTADGSEFESPKKKAKVE

SEQ ID NO: 490 - protein, 2190 aa, synthetic construct
MPAAKRVKLDGGDKKYSIGLDIGTNSVGWAVITDEYKVPSKKFKVLGNTDRHSIKKNLIGALLFDSGETAEATRLKRTARRRYTRRKNRICYLQEIFSNEMAKVDDSFFHRLEESFLVEEDKKHERHPIFGNIVDEVAYHEKYPTIYHLRKKLVDSTDKADLRLIYLALAHMIKFRGHFLIEGDLNPDNSDVDKLFIQLVQTYNQLFEENPINASGVDAKAILSARLSKSRRLENLIAQLPGEKKNGLFGNLIALSLGLTPNFKSNFDLAEDAKLQLSKDTYDDDLDNLLAQIGDQYADLFLAAKNLSDAILLSDILRVNTEITKAPLSASMIKRYDEHHQDLTLLKALVRQQLPEKYKEIFFDQSKNGYAGYIDGGASQEEFYKFIKPILEKMDGTEELLVKLNREDLLRKQRTFDNGSIPHQIHLGELHAILRRQEDFYPFLKDNREKIEKILTFRIPYYVGPLARGNSRFAWMTRKSEETITPWNFEEVVDKGASAQSFIERMTNFDKNLPNEKVLPKHSLLYEYFTVYNELTKVKYVTEGMRKPAFLSGEQKKAIVDLLFKTNRKVTVKQLKEDYFKKIECFDSVEISGVEDRFNASLGTYHDLLKIIKDKDFLDNEENEDILEDIVLTLTLFEDREMIEERLKTYAHLFDDKVMKQLKRRRYTGWGRLSRKLINGIRDKQSGKTILDFLKSDGFANRNFMQLIHDDSLTFKEDIQKAQVSGQGDSLHEHIANLAGSPAIKKGILQTVKVVDELVKVMGRHKPENIVIEMARENQTTQKGQKNSRERMKRIEEGIKELGSQILKEHPVENTQLQNEKLYLYYLQNGRDMYVDQELDINRLSDYDVDHIVPQSFLKDDSIDNKVLTRSDKARGKSDNVPSEEVVKKMKNYWRQLLNAKLITQRKFDNLTKAERGGLSELDKAGFIKRQLVETRQITKHVAQILDSRMNTKYDENDKLIREVKVITLKSKLVSDFRKDFQFYKVREINNYHHAHDAYLNAVVGTALIKKYPKLESEFVYGDYKVYDVRKMIAKSEQEIGKATAKYFFYSNIMNFFKTEITLANGEIRKRPLIETNGETGEIVWDKGRDFATVRKVLSMPQVNIVKKTEVQTGGFSKESILPKRNSDKLIARKKDWDPKKYGGFDSPTVAYSVLVVAKVEKGKSKKLKSVKELLGITIMERSSFEKNPIDFLEAKGYKEVKKDLIIKLPKYSLFELENGRKRMLASAGELQKGNELALPSKYVNFLYLASHYEKLKGSPEDNEQKQLFVEQHKHYLDEIIEQISEFSKRVILADANLDKVLSAYNKHRDKPIREQAENIIHLFTLTNLGAPAAFKYFDTTIDRKRYTSTKEVLDATLIHQSITGLYETRIDLSQLGGDGGEAAAKEAAAKEAAAKEAAAKEAAAKGGMDPLQLLQPLEAEIKGTKLKAHWNSGATITCVPQAFLEEEVPIKNIWIKTIHGEKEQPVYYLTFKIQGRKVEAEVISSPYDYILVSPSDIPWLMKKPLQLTTLVPLQEYEERLLKQTMLTGSYKEKLQSLFLKYDALWQHWENQVGHRRIKPHHIATGTVNPRPQKQYPINPKAKASIQTVINDLLKQGVLIQQNSIMNTPVYPVPKPDGKWRMVLDYREVNKTIPLIAAQNQHSAGILSSIFRGKYKTTLDLSNGFWAHSITPESYWLTAFTWLGQQYCWTRLPQGFLNSPALFTADVVDLLKEVPNVQVYVDDIYISHDDPREHLEQLEKVFSLLLNAGYVVSLKKSEIAQHEVEFLGFNITKEGRGLTETFKQKLLNITPPRDLKQLQSILGLLNFARNFIPNFSELVKPLYNIIATANGKYITWTTDNSQQLQNIISMLNSAENLEERNPEVRLIMKVNTSPSAGYIRFYNEFAKRPIMYLNYVYTKAEVKFTNTEKLLTTIHKGLIKALDLGMGQEILVYSPIVSMTKIQKTPLPERKALPIRWITWMSYLEDPRIQFHYDKTLPELQQVPTVTDDIIAKIKHPSEFSMVFYTDGSAIKHPNVNKSHNAGMGIAQVQFKPEFTVINTWSIPLGDHTAQLAEVAAVEFACKKALKIDGPVLIVTDSFYVAESVNKELPYWQSNGFFNNKKKPLKHVSKWKSIADCIQLKPDIIIIHEKGHQPTASTFHTEGNNLADKLATQGSYVVNAGKRTADGSEFEKRTADGSEFESPKKKAKVE

SEQ ID NO: 491 - protein, 2176 aa, synthetic construct
MPAAKRVKLDGGDKKYSIGLDIGTNSVGWAVITDEYKVPSKKFKVLGNTDRHSIKKNLIGALLFDSGETAEATRLKRTARRRYTRRKNRICYLQEIFSNEMAKVDDSFFHRLEESFLVEEDKKHERHPIFGNIVDEVAYHEKYPTIYHLRKKLVDSTDKADLRLIYLALAHMIKFRGHFLIEGDLNPDNSDVDKLFIQLVQTYNQLFEENPINASGVDAKAILSARLSKSRRLENLIAQLPGEKKNGLFGNLIALSLGLTPNFKSNFDLAEDAKLQLSKDTYDDDLDNLLAQIGDQYADLFLAAKNLSDAILLSDILRVNTEITKAPLSASMIKRYDEHHQDLTLLKALVRQQLPEKYKEIFFDQSKNGYAGYIDGGASQEEFYKFIKPILEKMDGTEELLVKLNREDLLRKQRTFDNGSIPHQIHLGELHAILRRQEDFYPFLKDNREKIEKILTFRIPYYVGPLARGNSRFAWMTRKSEETITPWNFEEVVDKGASAQSFIERMTNFDKNLPNEKVLPKHSLLYEYFTVYNELTKVKYVTEGMRKPAFLSGEQKKAIVDLLFKTNRKVTVKQLKEDYFKKIECFDSVEISGVEDRFNASLGTYHDLLKIIKDKDFLDNEENEDILEDIVLTLTLFEDREMIEERLKTYAHLFDDKVMKQLKRRRYTGWGRLSRKLINGIRDKQSGKTILDFLKSDGFANRNFMQLIHDDSLTFKEDIQKAQVSGQGDSLHEHIANLAGSPAIKKGILQTVKVVDELVKVMGRHKPENIVIEMARENQTTQKGQKNSRERMKRIEEGIKELGSQILKEHPVENTQLQNEKLYLYYLQNGRDMYVDQELDINRLSDYDVDHIVPQSFLKDDSIDNKVLTRSDKARGKSDNVPSEEVVKKMKNYWRQLLNAKLITQRKFDNLTKAERGGLSELDKAGFIKRQLVETRQITKHVAQILDSRMNTKYDENDKLIREVKVITLKSKLVSDFRKDFQFYKVREINNYHHAHDAYLNAVVGTALIKKYPKLESEFVYGDYKVYDVRKMIAKSEQEIGKATAKYFFYSNIMNFFKTEITLANGEIRKRPLIETNGETGEIVWDKGRDFATVRKVLSMPQVNIVKKTEVQTGGFSKESILPKRNSDKLIARKKDWDPKKYGGFDSPTVAYSVLVVAKVEKGKSKKLKSVKELLGITIMERSSFEKNPIDFLEAKGYKEVKKDLIIKLPKYSLFELENGRKRMLASAGELQKGNELALPSKYVNFLYLASHYEKLKGSPEDNEQKQLFVEQHKHYLDEIIEQISEFSKRVILADANLDKVLSAYNKHRDKPIREQAENIIHLFTLTNLGAPAAFKYFDTTIDRKRYTSTKEVLDATLIHQSITGLYETRIDLSQLGGDGGEAAAKGGGPAPGGMDPLQLLQPLEAEIKGTKLKAHWNSGATITCVPQAFLEEEVPIKNIWIKTIHGEKEQPVYYLTFKIQGRKVEAEVISSPYDYILVSPSDIPWLMKKPLQLTTLVPLQEYEERLLKQTMLTGSYKEKLQSLFLKYDALWQHWENQVGHRRIKPHHIATGTVNPRPQKQYPINPKAKASIQTVINDLLKQGVLIQQNSIMNTPVYPVPKPDGKWRMVLDYREVNKTIPLIAAQNQHSAGILSSIFRGKYKTTLDLSNGFWAHSITPESYWLTAFTWLGQQYCWTRLPQGFLNSPALFTADVVDLLKEVPNVQVYVDDIYISHDDPREHLEQLEKVFSLLLNAGYVVSLKKSEIAQHEVEFLGFNITKEGRGLTETFKQKLLNITPPRDLKQLQSILGLLNFARNFIPNFSELVKPLYNIIATANGKYITWTTDNSQQLQNIISMLNSAENLEERNPEVRLIMKVNTSPSAGYIRFYNEFAKRPIMYLNYVYTKAEVKFTNTEKLLTTIHKGLIKALDLGMGQEILVYSPIVSMTKIQKTPLPERKALPIRWITWMSYLEDPRIQFHYDKTLPELQQVPTVTDDIIAKIKHPSEFSMVFYTDGSAIKHPNVNKSHNAGMGIAQVQFKPEFTVINTWSIPLGDHTAQLAEVAAVEFACKKALKIDGPVLIVTDSFYVAESVNKELPYWQSNGFFNNKKKPLKHVSKWKSIADCIQLKPDIIIIHEKGHQPTASTFHTEGNNLADKLATQGSYVVNAGKRTADGSEFEKRTADGSEFESPKKKAKVE

SEQ ID NO: 492 - protein, 2180 aa, synthetic construct
MPAAKRVKLDGGDKKYSIGLDIGTNSVGWAVITDEYKVPSKKFKVLGNTDRHSIKKNLIGALLFDSGETAEATRLKRTARRRYTRRKNRICYLQEIFSNEMAKVDDSFFHRLEESFLVEEDKKHERHPIFGNIVDEVAYHEKYPTIYHLRKKLVDSTDKADLRLIYLALAHMIKFRGHFLIEGDLNPDNSDVDKLFIQLVQTYNQLFEENPINASGVDAKAILSARLSKSRRLENLIAQLPGEKKNGLFGNLIALSLGLTPNFKSNFDLAEDAKLQLSKDTYDDDLDNLLAQIGDQYADLFLAAKNLSDAILLSDILRVNTEITKAPLSASMIKRYDEHHQDLTLLKALVRQQLPEKYKEIFFDQSKNGYAGYIDGGASQEEFYKFIKPILEKMDGTEELLVKLNREDLLRKQRTFDNGSIPHQIHLGELHAILRRQEDFYPFLKDNREKIEKILTFRIPYYVGPLARGNSRFAWMTRKSEETITPWNFEEVVDKGASAQSFIERMTNFDKNLPNEKVLPKHSLLYEYFTVYNELTKVKYVTEGMRKPAFLSGEQKKAIVDLLFKTNRKVTVKQLKEDYFKKIECFDSVEISGVEDRFNASLGTYHDLLKIIKDKDFLDNEENEDILEDIVLTLTLFEDREMIEERLKTYAHLFDDKVMKQLKRRRYTGWGRLSRKLINGIRDKQSGKTILDFLKSDGFANRNFMQLIHDDSLTFKEDIQKAQVSGQGDSLHEHIANLAGSPAIKKGILQTVKVVDELVKVMGRHKPENIVIEMARENQTTQKGQKNSRERMKRIEEGIKELGSQILKEHPVENTQLQNEKLYLYYLQNGRDMYVDQELDINRLSDYDVDHIVPQSFLKDDSIDNKVLTRSDKARGKSDNVPSEEVVKKMKNYWRQLLNAKLITQRKFDNLTKAERGGLSELDKAGFIKRQLVETRQITKHVAQILDSRMNTKYDENDKLIREVKVITLKSKLVSDFRKDFQFYKVREINNYHHAHDAYLNAVVGTALIKKYPKLESEFVYGDYKVYDVRKMIAKSEQEIGKATAKYFFYSNIMNFFKTEITLANGEIRKRPLIETNGETGEIVWDKGRDFATVRKVLSMPQVNIVKKTEVQTGGFSKESILPKRNSDKLIARKKDWDPKKYGGFDSPTVAYSVLVVAKVEKGKSKKLKSVKELLGITIMERSSFEKNPIDFLEAKGYKEVKKDLIIKLPKYSLFELENGRKRMLASAGELQKGNELALPSKYVNFLYLASHYEKLKGSPEDNEQKQLFVEQHKHYLDEIIEQISEFSKRVILADANLDKVLSAYNKHRDKPIREQAENIIHLFTLTNLGAPAAFKYFDTTIDRKRYTSTKEVLDATLIHQSITGLYETRIDLSQLGGDGGGSSGSSGSSGSSGSSGGMDPLQLLQPLEAEIKGTKLKAHWNSGATITCVPQAFLEEEVPIKNIWIKTIHGEKEQPVYYLTFKIQGRKVEAEVISSPYDYILVSPSDIPWLMKKPLQLTTLVPLQEYEERLLKQTMLTGSYKEKLQSLFLKYDALWQHWENQVGHRRIKPHHIATGTVNPRPQKQYPINPKAKASIQTVINDLLKQGVLIQQNSIMNTPVYPVPKPDGKWRMVLDYREVNKTIPLIAAQNQHSAGILSSIFRGKYKTTLDLSNGFWAHSITPESYWLTAFTWLGQQYCWTRLPQGFLNSPALFTADVVDLLKEVPNVQVYVDDIYISHDDPREHLEQLEKVFSLLLNAGYVVSLKKSEIAQHEVEFLGFNITKEGRGLTETFKQKLLNITPPRDLKQLQSILGLLNFARNFIPNFSELVKPLYNIIATANGKYITWTTDNSQQLQNIISMLNSAENLEERNPEVRLIMKVNTSPSAGYIRFYNEFAKRPIMYLNYVYTKAEVKFTNTEKLLTTIHKGLIKALDLGMGQEILVYSPIVSMTKIQKTPLPERKALPIRWITWMSYLEDPRIQFHYDKTLPELQQVPTVTDDIIAKIKHPSEFSMVFYTDGSAIKHPNVNKSHNAGMGIAQVQFKPEFTVINTWSIPLGDHTAQLAEVAAVEFACKKALKIDGPVLIVTDSFYVAESVNKELPYWQSNGFFNNKKKPLKHVSKWKSIADCIQLKPDIIIIHEKGHQPTASTFHTEGNNLADKLATQGSYVVNAGKRTADGSEFEKRTADGSEFESPKKKAKVE

SEQ ID NO: 493 - protein, 2176 aa, synthetic construct
MPAAKRVKLDGGDKKYSIGLDIGTNSVGWAVITDEYKVPSKKFKVLGNTDRHSIKKNLIGALLFDSGETAEATRLKRTARRRYTRRKNRICYLQEIFSNEMAKVDDSFFHRLEESFLVEEDKKHERHPIFGNIVDEVAYHEKYPTIYHLRKKLVDSTDKADLRLIYLALAHMIKFRGHFLIEGDLNPDNSDVDKLFIQLVQTYNQLFEENPINASGVDAKAILSARLSKSRRLENLIAQLPGEKKNGLFGNLIALSLGLTPNFKSNFDLAEDAKLQLSKDTYDDDLDNLLAQIGDQYADLFLAAKNLSDAILLSDILRVNTEITKAPLSASMIKRYDEHHQDLTLLKALVRQQLPEKYKEIFFDQSKNGYAGYIDGGASQEEFYKFIKPILEKMDGTEELLVKLNREDLLRKQRTFDNGSIPHQIHLGELHAILRRQEDFYPFLKDNREKIEKILTFRIPYYVGPLARGNSRFAWMTRKSEETITPWNFEEVVDKGASAQSFIERMTNFDKNLPNEKVLPKHSLLYEYFTVYNELTKVKYVTEGMRKPAFLSGEQKKAIVDLLFKTNRKVTVKQLKEDYFKKIECFDSVEISGVEDRFNASLGTYHDLLKIIKDKDFLDNEENEDILEDIVLTLTLFEDREMIEERLKTYAHLFDDKVMKQLKRRRYTGWGRLSRKLINGIRDKQSGKTILDFLKSDGFANRNFMQLIHDDSLTFKEDIQKAQVSGQGDSLHEHIANLAGSPAIKKGILQTVKVVDELVKVMGRHKPENIVIEMARENQTTQKGQKNSRERMKRIEEGIKELGSQILKEHPVENTQLQNEKLYLYYLQNGRDMYVDQELDINRLSDYDVDHIVPQSFLKDDSIDNKVLTRSDKARGKSDNVPSEEVVKKMKNYWRQLLNAKLITQRKFDNLTKAERGGLSELDKAGFIKRQLVETRQITKHVAQILDSRMNTKYDENDKLIREVKVITLKSKLVSDFRKDFQFYKVREINNYHHAHDAYLNAVVGTALIKKYPKLESEFVYGDYKVYDVRKMIAKSEQEIGKATAKYFFYSNIMNFFKTEITLANGEIRKRPLIETNGETGEIVWDKGRDFATVRKVLSMPQVNIVKKTEVQTGGFSKESILPKRNSDKLIARKKDWDPKKYGGFDSPTVAYSVLVVAKVEKGKSKKLKSVKELLGITIMERSSFEKNPIDFLEAKGYKEVKKDLIIKLPKYSLFELENGRKRMLASAGELQKGNELALPSKYVNFLYLASHYEKLKGSPEDNEQKQLFVEQHKHYLDEIIEQISEFSKRVILADANLDKVLSAYNKHRDKPIREQAENIIHLFTLTNLGAPAAFKYFDTTIDRKRYTSTKEVLDATLIHQSITGLYETRIDLSQLGGDGGEAAAKGGSPAPGGMDPLQLLQPLEAEIKGTKLKAHWNSGATITCVPQAFLEEEVPIKNIWIKTIHGEKEQPVYYLTFKIQGRKVEAEVISSPYDYILVSPSDIPWLMKKPLQLTTLVPLQEYEERLLKQTMLTGSYKEKLQSLFLKYDALWQHWENQVGHRRIKPHHIATGTVNPRPQKQYPINPKAKASIQTVINDLLKQGVLIQQNSIMNTPVYPVPKPDGKWRMVLDYREVNKTIPLIAAQNQHSAGILSSIFRGKYKTTLDLSNGFWAHSITPESYWLTAFTWLGQQYCWTRLPQGFLNSPALFTADVVDLLKEVPNVQVYVDDIYISHDDPREHLEQLEKVFSLLLNAGYVVSLKKSEIAQHEVEFLGFNITKEGRGLTETFKQKLLNITPPRDLKQLQSILGLLNFARNFIPNFSELVKPLYNIIATANGKYITWTTDNSQQLQNIISMLNSAENLEERNPEVRLIMKVNTSPSAGYIRFYNEFAKRPIMYLNYVYTKAEVKFTNTEKLLTTIHKGLIKALDLGMGQEILVYSPIVSMTKIQKTPLPERKALPIRWITWMSYLEDPRIQFHYDKTLPELQQVPTVTDDIIAKIKHPSEFSMVFYTDGSAIKHPNVNKSHNAGMGIAQVQFKPEFTVINTWSIPLGDHTAQLAEVAAVEFACKKALKIDGPVLIVTDSFYVAESVNKELPYWQSNGFFNNKKKPLKHVSKWKSIADCIQLKPDIIIIHEKGHQPTASTFHTEGNNLADKLATQGSYVVNAGKRTADGSEFEKRTADGSEFESPKKKAKVE

SEQ ID NO: 494 - protein, 2181 aa, synthetic construct
MPAAKRVKLDGGDKKYSIGLDIGTNSVGWAVITDEYKVPSKKFKVLGNTDRHSIKKNLIGALLFDSGETAEATRLKRTARRRYTRRKNRICYLQEIFSNEMAKVDDSFFHRLEESFLVEEDKKHERHPIFGNIVDEVAYHEKYPTIYHLRKKLVDSTDKADLRLIYLALAHMIKFRGHFLIEGDLNPDNSDVDKLFIQLVQTYNQLFEENPINASGVDAKAILSARLSKSRRLENLIAQLPGEKKNGLFGNLIALSLGLTPNFKSNFDLAEDAKLQLSKDTYDDDLDNLLAQIGDQYADLFLAAKNLSDAILLSDILRVNTEITKAPLSASMIKRYDEHHQDLTLLKALVRQQLPEKYKEIFFDQSKNGYAGYIDGGASQEEFYKFIKPILEKMDGTEELLVKLNREDLLRKQRTFDNGSIPHQIHLGELHAILRRQEDFYPFLKDNREKIEKILTFRIPYYVGPLARGNSRFAWMTRKSEETITPWNFEEVVDKGASAQSFIERMTNFDKNLPNEKVLPKHSLLYEYFTVYNELTKVKYVTEGMRKPAFLSGEQKKAIVDLLFKTNRKVTVKQLKEDYFKKIECFDSVEISGVEDRFNASLGTYHDLLKIIKDKDFLDNEENEDILEDIVLTLTLFEDREMIEERLKTYAHLFDDKVMKQLKRRRYTGWGRLSRKLINGIRDKQSGKTILDFLKSDGFANRNFMQLIHDDSLTFKEDIQKAQVSGQGDSLHEHIANLAGSPAIKKGILQTVKVVDELVKVMGRHKPENIVIEMARENQTTQKGQKNSRERMKRIEEGIKELGSQILKEHPVENTQLQNEKLYLYYLQNGRDMYVDQELDINRLSDYDVDHIVPQSFLKDDSIDNKVLTRSDKARGKSDNVPSEEVVKKMKNYWRQLLNAKLITQRKFDNLTKAERGGLSELDKAGFIKRQLVETRQITKHVAQILDSRMNTKYDENDKLIREVKVITLKSKLVSDFRKDFQFYKVREINNYHHAHDAYLNAVVGTALIKKYPKLESEFVYGDYKVYDVRKMIAKSEQEIGKATAKYFFYSNIMNFFKTEITLANGEIRKRPLIETNGETGEIVWDKGRDFATVRKVLSMPQVNIVKKTEVQTGGFSKESILPKRNSDKLIARKKDWDPKKYGGFDSPTVAYSVLVVAKVEKGKSKKLKSVKELLGITIMERSSFEKNPIDFLEAKGYKEVKKDLIIKLPKYSLFELENGRKRMLASAGELQKGNELALPSKYVNFLYLASHYEKLKGSPEDNEQKQLFVEQHKHYLDEIIEQISEFSKRVILADANLDKVLSAYNKHRDKPIREQAENIIHLFTLTNLGAPAAFKYFDTTIDRKRYTSTKEVLDATLIHQSITGLYETRIDLSQLGGDGGSGSETPGTSESATPESGGMDPLQLLQPLEAEIKGTKLKAHWNSGATITCVPQAFLEEEVPIKNIWIKTIHGEKEQPVYYLTFKIQGRKVEAEVISSPYDYILVSPSDIPWLMKKPLQLTTLVPLQEYEERLLKQTMLTGSYKEKLQSLFLKYDALWQHWENQVGHRRIKPHHIATGTVNPRPQKQYPINPKAKASIQTVINDLLKQGVLIQQNSIMNTPVYPVPKPDGKWRMVLDYREVNKTIPLIAAQNQHSAGILSSIFRGKYKTTLDLSNGFWAHSITPESYWLTAFTWLGQQYCWTRLPQGFLNSPALFTADVVDLLKEVPNVQVYVDDIYISHDDPREHLEQLEKVFSLLLNAGYVVSLKKSEIAQHEVEFLGFNITKEGRGLTETFKQKLLNITPPRDLKQLQSILGLLNFARNFIPNFSELVKPLYNIIATANGKYITWTTDNSQQLQNIISMLNSAENLEERNPEVRLIMKVNTSPSAGYIRFYNEFAKRPIMYLNYVYTKAEVKFTNTEKLLTTIHKGLIKALDLGMGQEILVYSPIVSMTKIQKTPLPERKALPIRWITWMSYLEDPRIQFHYDKTLPELQQVPTVTDDIIAKIKHPSEFSMVFYTDGSAIKHPNVNKSHNAGMGIAQVQFKPEFTVINTWSIPLGDHTAQLAEVAAVEFACKKALKIDGPVLIVTDSFYVAESVNKELPYWQSNGFFNNKKKPLKHVSKWKSIADCIQLKPDIIIIHEKGHQPTASTFHTEGNNLADKLATQGSYVVNAGKRTADGSEFEKRTADGSEFESPKKKAKVE

SEQ ID NO: 495 - protein, 2176 aa, synthetic construct
MPAAKRVKLDGGDKKYSIGLDIGTNSVGWAVITDEYKVPSKKFKVLGNTDRHSIKKNLIGALLFDSGETAEATRLKRTARRRYTRRKNRICYLQEIFSNEMAKVDDSFFHRLEESFLVEEDKKHERHPIFGNIVDEVAYHEKYPTIYHLRKKLVDSTDKADLRLIYLALAHMIKFRGHFLIEGDLNPDNSDVDKLFIQLVQTYNQLFEENPINASGVDAKAILSARLSKSRRLENLIAQLPGEKKNGLFGNLIALSLGLTPNFKSNFDLAEDAKLQLSKDTYDDDLDNLLAQIGDQYADLFLAAKNLSDAILLSDILRVNTEITKAPLSASMIKRYDEHHQDLTLLKALVRQQLPEKYKEIFFDQSKNGYAGYIDGGASQEEFYKFIKPILEKMDGTEELLVKLNREDLLRKQRTFDNGSIPHQIHLGELHAILRRQEDFYPFLKDNREKIEKILTFRIPYYVGPLARGNSRFAWMTRKSEETITPWNFEEVVDKGASAQSFIERMTNFDKNLPNEKVLPKHSLLYEYFTVYNELTKVKYVTEGMRKPAFLSGEQKKAIVDLLFKTNRKVTVKQLKEDYFKKIECFDSVEISGVEDRFNASLGTYHDLLKIIKDKDFLDNEENEDILEDIVLTLTLFEDREMIEERLKTYAHLFDDKVMKQLKRRRYTGWGRLSRKLINGIRDKQSGKTILDFLKSDGFANRNFMQLIHDDSLTFKEDIQKAQVSGQGDSLHEHIANLAGSPAIKKGILQTVKVVDELVKVMGRHKPENIVIEMARENQTTQKGQKNSRERMKRIEEGIKELGSQILKEHPVENTQLQNEKLYLYYLQNGRDMYVDQELDINRLSDYDVDHIVPQSFLKDDSIDNKVLTRSDKARGKSDNVPSEEVVKKMKNYWRQLLNAKLITQRKFDNLTKAERGGLSELDKAGFIKRQLVETRQITKHVAQILDSRMNTKYDENDKLIREVKVITLKSKLVSDFRKDFQFYKVREINNYHHAHDAYLNAVVGTALIKKYPKLESEFVYGDYKVYDVRKMIAKSEQEIGKATAKYFFYSNIMNFFKTEITLANGEIRKRPLIETNGETGEIVWDKGRDFATVRKVLSMPQVNIVKKTEVQTGGFSKESILPKRNSDKLIARKKDWDPKKYGGFDSPTVAYSVLVVAKVEKGKSKKLKSVKELLGITIMERSSFEKNPIDFLEAKGYKEVKKDLIIKLPKYSLFELENGRKRMLASAGELQKGNELALPSKYVNFLYLASHYEKLKGSPEDNEQKQLFVEQHKHYLDEIIEQISEFSKRVILADANLDKVLSAYNKHRDKPIREQAENIIHLFTLTNLGAPAAFKYFDTTIDRKRYTSTKEVLDATLIHQSITGLYETRIDLSQLGGDGGEAAAKPAPGSSGGMDPLQLLQPLEAEIKGTKLKAHWNSGATITCVPQAFLEEEVPIKNIWIKTIHGEKEQPVYYLTFKIQGRKVEAEVISSPYDYILVSPSDIPWLMKKPLQLTTLVPLQEYEERLLKQTMLTGSYKEKLQSLFLKYDALWQHWENQVGHRRIKPHHIATGTVNPRPQKQYPINPKAKASIQTVINDLLKQGVLIQQNSIMNTPVYPVPKPDGKWRMVLDYREVNKTIPLIAAQNQHSAGILSSIFRGKYKTTLDLSNGFWAHSITPESYWLTAFTWLGQQYCWTRLPQGFLNSPALFTADVVDLLKEVPNVQVYVDDIYISHDDPREHLEQLEKVFSLLLNAGYVVSLKKSEIAQHEVEFLGFNITKEGRGLTETFKQKLLNITPPRDLKQLQSILGLLNFARNFIPNFSELVKPLYNIIATANGKYITWTTDNSQQLQNIISMLNSAENLEERNPEVRLIMKVNTSPSAGYIRFYNEFAKRPIMYLNYVYTKAEVKFTNTEKLLTTIHKGLIKALDLGMGQEILVYSPIVSMTKIQKTPLPERKALPIRWITWMSYLEDPRIQFHYDKTLPELQQVPTVTDDIIAKIKHPSEFSMVFYTDGSAIKHPNVNKSHNAGMGIAQVQFKPEFTVINTWSIPLGDHTAQLAEVAAVEFACKKALKIDGPVLIVTDSFYVAESVNKELPYWQSNGFFNNKKKPLKHVSKWKSIADCIQLKPDIIIIHEKGHQPTASTFHTEGNNLADKLATQGSYVVNAGKRTADGSEFEKRTADGSEFESPKKKAKVE

SEQ ID NO: 496 - protein, 2176 aa, synthetic construct
MPAAKRVKLDGGDKKYSIGLDIGTNSVGWAVITDEYKVPSKKFKVLGNTDRHSIKKNLIGALLFDSGETAEATRLKRTARRRYTRRKNRICYLQEIFSNEMAKVDDSFFHRLEESFLVEEDKKHERHPIFGNIVDEVAYHEKYPTIYHLRKKLVDSTDKADLRLIYLALAHMIKFRGHFLIEGDLNPDNSDVDKLFIQLVQTYNQLFEENPINASGVDAKAILSARLSKSRRLENLIAQLPGEKKNGLFGNLIALSLGLTPNFKSNFDLAEDAKLQLSKDTYDDDLDNLLAQIGDQYADLFLAAKNLSDAILLSDILRVNTEITKAPLSASMIKRYDEHHQDLTLLKALVRQQLPEKYKEIFFDQSKNGYAGYIDGGASQEEFYKFIKPILEKMDGTEELLVKLNREDLLRKQRTFDNGSIPHQIHLGELHAILRRQEDFYPFLKDNREKIEKILTFRIPYYVGPLARGNSRFAWMTRKSEETITPWNFEEVVDKGASAQSFIERMTNFDKNLPNEKVLPKHSLLYEYFTVYNELTKVKYVTEGMRKPAFLSGEQKKAIVDLLFKTNRKVTVKQLKEDYFKKIECFDSVEISGVEDRFNASLGTYHDLLKIIKDKDFLDNEENEDILEDIVLTLTLFEDREMIEERLKTYAHLFDDKVMKQLKRRRYTGWGRLSRKLINGIRDKQSGKTILDFLKSDGFANRNFMQLIHDDSLTFKEDIQKAQVSGQGDSLHEHIANLAGSPAIKKGILQTVKVVDELVKVMGRHKPENIVIEMARENQTTQKGQKNSRERMKRIEEGIKELGSQILKEHPVENTQLQNEKLYLYYLQNGRDMYVDQELDINRLSDYDVDHIVPQSFLKDDSIDNKVLTRSDKARGKSDNVPSEEVVKKMKNYWRQLLNAKLITQRKFDNLTKAERGGLSELDKAGFIKRQLVETRQITKHVAQILDSRMNTKYDENDKLIREVKVITLKSKLVSDFRKDFQFYKVREINNYHHAHDAYLNAVVGTALIKKYPKLESEFVYGDYKVYDVRKMIAKSEQEIGKATAKYFFYSNIMNFFKTEITLANGEIRKRPLIETNGETGEIVWDKGRDFATVRKVLSMPQVNIVKKTEVQTGGFSKESILPKRNSDKLIARKKDWDPKKYGGFDSPTVAYSVLVVAKVEKGKSKKLKSVKELLGITIMERSSFEKNPIDFLEAKGYKEVKKDLIIKLPKYSLFELENGRKRMLASAGELQKGNELALPSKYVNFLYLASHYEKLKGSPEDNEQKQLFVEQHKHYLDEIIEQISEFSKRVILADANLDKVLSAYNKHRDKPIREQAENIIHLFTLTNLGAPAAFKYFDTTIDRKRYTSTKEVLDATLIHQSITGLYETRIDLSQLGGDGGEAAAKGSSPAPGGMDPLQLLQPLEAEIKGTKLKAHWNSGATITCVPQAFLEEEVPIKNIWIKTIHGEKEQPVYYLTFKIQGRKVEAEVISSPYDYILVSPSDIPWLMKKPLQLTTLVPLQEYEERLLKQTMLTGSYKEKLQSLFLKYDALWQHWENQVGHRRIKPHHIATGTVNPRPQKQYPINPKAKASIQTVINDLLKQGVLIQQNSIMNTPVYPVPKPDGKWRMVLDYREVNKTIPLIAAQNQHSAGILSSIFRGKYKTTLDLSNGFWAHSITPESYWLTAFTWLGQQYCWTRLPQGFLNSPALFTADVVDLLKEVPNVQVYVDDIYISHDDPREHLEQLEKVFSLLLNAGYVVSLKKSEIAQHEVEFLGFNITKEGRGLTETFKQKLLNITPPRDLKQLQSILGLLNFARNFIPNFSELVKPLYNIIATANGKYITWTTDNSQQLQNIISMLNSAENLEERNPEVRLIMKVNTSPSAGYIRFYNEFAKRPIMYLNYVYTKAEVKFTNTEKLLTTIHKGLIKALDLGMGQEILVYSPIVSMTKIQKTPLPERKALPIRWITWMSYLEDPRIQFHYDKTLPELQQVPTVTDDIIAKIKHPSEFSMVFYTDGSAIKHPNVNKSHNAGMGIAQVQFKPEFTVINTWSIPLGDHTAQLAEVAAVEFACKKALKIDGPVLIVTDSFYVAESVNKELPYWQSNGFFNNKKKPLKHVSKWKSIADCIQLKPDIIIIHEKGHQPTASTFHTEGNNLADKLATQGSYVVNAGKRTADGSEFEKRTADGSEFESPKKKAKVE

SEQ ID NO: 497 - protein, 2176 aa, synthetic construct
MPAAKRVKLDGGDKKYSIGLDIGTNSVGWAVITDEYKVPSKKFKVLGNTDRHSIKKNLIGALLFDSGETAEATRLKRTARRRYTRRKNRICYLQEIFSNEMAKVDDSFFHRLEESFLVEEDKKHERHPIFGNIVDEVAYHEKYPTIYHLRKKLVDSTDKADLRLIYLALAHMIKFRGHFLIEGDLNPDNSDVDKLFIQLVQTYNQLFEENPINASGVDAKAILSARLSKSRRLENLIAQLPGEKKNGLFGNLIALSLGLTPNFKSNFDLAEDAKLQLSKDTYDDDLDNLLAQIGDQYADLFLAAKNLSDAILLSDILRVNTEITKAPLSASMIKRYDEHHQDLTLLKALVRQQLPEKYKEIFFDQSKNGYAGYIDGGASQEEFYKFIKPILEKMDGTEELLVKLNREDLLRKQRTFDNGSIPHQIHLGELHAILRRQEDFYPFLKDNREKIEKILTFRIPYYVGPLARGNSRFAWMTRKSEETITPWNFEEVVDKGASAQSFIERMTNFDKNLPNEKVLPKHSLLYEYFTVYNELTKVKYVTEGMRKPAFLSGEQKKAIVDLLFKTNRKVTVKQLKEDYFKKIECFDSVEISGVEDRFNASLGTYHDLLKIIKDKDFLDNEENEDILEDIVLTLTLFEDREMIEERLKTYAHLFDDKVMKQLKRRRYTGWGRLSRKLINGIRDKQSGKTILDFLKSDGFANRNFMQLIHDDSLTFKEDIQKAQVSGQGDSLHEHIANLAGSPAIKKGILQTVKVVDELVKVMGRHKPENIVIEMARENQTTQKGQKNSRERMKRIEEGIKELGSQILKEHPVENTQLQNEKLYLYYLQNGRDMYVDQELDINRLSDYDVDHIVPQSFLKDDSIDNKVLTRSDKARGKSDNVPSEEVVKKMKNYWRQLLNAKLITQRKFDNLTKAERGGLSELDKAGFIKRQLVETRQITKHVAQILDSRMNTKYDENDKLIREVKVITLKSKLVSDFRKDFQFYKVREINNYHHAHDAYLNAVVGTALIKKYPKLESEFVYGDYKVYDVRKMIAKSEQEIGKATAKYFFYSNIMNFFKTEITLANGEIRKRPLIETNGETGEIVWDKGRDFATVRKVLSMPQVNIVKKTEVQTGGFSKESILPKRNSDKLIARKKDWDPKKYGGFDSPTVAYSVLVVAKVEKGKSKKLKSVKELLGITIMERSSFEKNPIDFLEAKGYKEVKKDLIIKLPKYSLFELENGRKRMLASAGELQKGNELALPSKYVNFLYLASHYEKLKGSPEDNEQKQLFVEQHKHYLDEIIEQISEFSKRVILADANLDKVLSAYNKHRDKPIREQAENIIHLFTLTNLGAPAAFKYFDTTIDRKRYTSTKEVLDATLIHQSITGLYETRIDLSQLGGDGGPAPGGGEAAAKGGMDPLQLLQPLEAEIKGTKLKAHWNSGATITCVPQAFLEEEVPIKNIWIKTIHGEKEQPVYYLTFKIQGRKVEAEVISSPYDYILVSPSDIPWLMKKPLQLTTLVPLQEYEERLLKQTMLTGSYKEKLQSLFLKYDALWQHWENQVGHRRIKPHHIATGTVNPRPQKQYPINPKAKASIQTVINDLLKQGVLIQQNSIMNTPVYPVPKPDGKWRMVLDYREVNKTIPLIAAQNQHSAGILSSIFRGKYKTTLDLSNGFWAHSITPESYWLTAFTWLGQQYCWTRLPQGFLNSPALFTADVVDLLKEVPNVQVYVDDIYISHDDPREHLEQLEKVFSLLLNAGYVVSLKKSEIAQHEVEFLGFNITKEGRGLTETFKQKLLNITPPRDLKQLQSILGLLNFARNFIPNFSELVKPLYNIIATANGKYITWTTDNSQQLQNIISMLNSAENLEERNPEVRLIMKVNTSPSAGYIRFYNEFAKRPIMYLNYVYTKAEVKFTNTEKLLTTIHKGLIKALDLGMGQEILVYSPIVSMTKIQKTPLPERKALPIRWITWMSYLEDPRIQFHYDKTLPELQQVPTVTDDIIAKIKHPSEFSMVFYTDGSAIKHPNVNKSHNAGMGIAQVQFKPEFTVINTWSIPLGDHTAQLAEVAAVEFACKKALKIDGPVLIVTDSFYVAESVNKELPYWQSNGFFNNKKKPLKHVSKWKSIADCIQLKPDIIIIHEKGHQPTASTFHTEGNNLADKLATQGSYVVNAGKRTADGSEFEKRTADGSEFESPKKKAKVE

SEQ ID NO: 498 - protein, 2180 aa, synthetic construct
MPAAKRVKLDGGDKKYSIGLDIGTNSVGWAVITDEYKVPSKKFKVLGNTDRHSIKKNLIGALLFDSGETAEATRLKRTARRRYTRRKNRICYLQEIFSNEMAKVDDSFFHRLEESFLVEEDKKHERHPIFGNIVDEVAYHEKYPTIYHLRKKLVDSTDKADLRLIYLALAHMIKFRGHFLIEGDLNPDNSDVDKLFIQLVQTYNQLFEENPINASGVDAKAILSARLSKSRRLENLIAQLPGEKKNGLFGNLIALSLGLTPNFKSNFDLAEDAKLQLSKDTYDDDLDNLLAQIGDQYADLFLAAKNLSDAILLSDILRVNTEITKAPLSASMIKRYDEHHQDLTLLKALVRQQLPEKYKEIFFDQSKNGYAGYIDGGASQEEFYKFIKPILEKMDGTEELLVKLNREDLLRKQRTFDNGSIPHQIHLGELHAILRRQEDFYPFLKDNREKIEKILTFRIPYYVGPLARGNSRFAWMTRKSEETITPWNFEEVVDKGASAQSFIERMTNFDKNLPNEKVLPKHSLLYEYFTVYNELTKVKYVTEGMRKPAFLSGEQKKAIVDLLFKTNRKVTVKQLKEDYFKKIECFDSVEISGVEDRFNASLGTYHDLLKIIKDKDFLDNEENEDILEDIVLTLTLFEDREMIEERLKTYAHLFDDKVMKQLKRRRYTGWGRLSRKLINGIRDKQSGKTILDFLKSDGFANRNFMQLIHDDSLTFKEDIQKAQVSGQGDSLHEHIANLAGSPAIKKGILQTVKVVDELVKVMGRHKPENIVIEMARENQTTQKGQKNSRERMKRIEEGIKELGSQILKEHPVENTQLQNEKLYLYYLQNGRDMYVDQELDINRLSDYDVDHIVPQSFLKDDSIDNKVLTRSDKARGKSDNVPSEEVVKKMKNYWRQLLNAKLITQRKFDNLTKAERGGLSELDKAGFIKRQLVETRQITKHVAQILDSRMNTKYDENDKLIREVKVITLKSKLVSDFRKDFQFYKVREINNYHHAHDAYLNAVVGTALIKKYPKLESEFVYGDYKVYDVRKMIAKSEQEIGKATAKYFFYSNIMNFFKTEITLANGEIRKRPLIETNGETGEIVWDKGRDFATVRKVLSMPQVNIVKKTEVQTGGFSKESILPKRNSDKLIARKKDWDPKKYGGFDSPTVAYSVLVVAKVEKGKSKKLKSVKELLGITIMERSSFEKNPIDFLEAKGYKEVKKDLIIKLPKYSLFELENGRKRMLASAGELQKGNELALPSKYVNFLYLASHYEKLKGSPEDNEQKQLFVEQHKHYLDEIIEQISEFSKRVILADANLDKVLSAYNKHRDKPIREQAENIIHLFTLTNLGAPAAFKYFDTTIDRKRYTSTKEVLDATLIHQSITGLYETRIDLSQLGGDGGEAAAKEAAAKEAAAKGGMDPLQLLQPLEAEIKGTKLKAHWNSGATITCVPQAFLEEEVPIKNIWIKTIHGEKEQPVYYLTFKIQGRKVEAEVISSPYDYILVSPSDIPWLMKKPLQLTTLVPLQEYEERLLKQTMLTGSYKEKLQSLFLKYDALWQHWENQVGHRRIKPHHIATGTVNPRPQKQYPINPKAKASIQTVINDLLKQGVLIQQNSIMNTPVYPVPKPDGKWRMVLDYREVNKTIPLIAAQNQHSAGILSSIFRGKYKTTLDLSNGFWAHSITPESYWLTAFTWLGQQYCWTRLPQGFLNSPALFTADVVDLLKEVPNVQVYVDDIYISHDDPREHLEQLEKVFSLLLNAGYVVSLKKSEIAQHEVEFLGFNITKEGRGLTETFKQKLLNITPPRDLKQLQSILGLLNFARNFIPNFSELVKPLYNIIATANGKYITWTTDNSQQLQNIISMLNSAENLEERNPEVRLIMKVNTSPSAGYIRFYNEFAKRPIMYLNYVYTKAEVKFTNTEKLLTTIHKGLIKALDLGMGQEILVYSPIVSMTKIQKTPLPERKALPIRWITWMSYLEDPRIQFHYDKTLPELQQVPTVTDDIIAKIKHPSEFSMVFYTDGSAIKHPNVNKSHNAGMGIAQVQFKPEFTVINTWSIPLGDHTAQLAEVAAVEFACKKALKIDGPVLIVTDSFYVAESVNKELPYWQSNGFFNNKKKPLKHVSKWKSIADCIQLKPDIIIIHEKGHQPTASTFHTEGNNLADKLATQGSYVVNAGKRTADGSEFEKRTADGSEFESPKKKAKVE

SEQ ID NO: 499 - protein, 2176 aa, synthetic construct
MPAAKRVKLDGGDKKYSIGLDIGTNSVGWAVITDEYKVPSKKFKVLGNTDRHSIKKNLIGALLFDSGETAEATRLKRTARRRYTRRKNRICYLQEIFSNEMAKVDDSFFHRLEESFLVEEDKKHERHPIFGNIVDEVAYHEKYPTIYHLRKKLVDSTDKADLRLIYLALAHMIKFRGHFLIEGDLNPDNSDVDKLFIQLVQTYNQLFEENPINASGVDAKAILSARLSKSRRLENLIAQLPGEKKNGLFGNLIALSLGLTPNFKSNFDLAEDAKLQLSKDTYDDDLDNLLAQIGDQYADLFLAAKNLSDAILLSDILRVNTEITKAPLSASMIKRYDEHHQDLTLLKALVRQQLPEKYKEIFFDQSKNGYAGYIDGGASQEEFYKFIKPILEKMDGTEELLVKLNREDLLRKQRTFDNGSIPHQIHLGELHAILRRQEDFYPFLKDNREKIEKILTFRIPYYVGPLARGNSRFAWMTRKSEETITPWNFEEVVDKGASAQSFIERMTNFDKNLPNEKVLPKHSLLYEYFTVYNELTKVKYVTEGMRKPAFLSGEQKKAIVDLLFKTNRKVTVKQLKEDYFKKIECFDSVEISGVEDRFNASLGTYHDLLKIIKDKDFLDNEENEDILEDIVLTLTLFEDREMIEERLKTYAHLFDDKVMKQLKRRRYTGWGRLSRKLINGIRDKQSGKTILDFLKSDGFANRNFMQLIHDDSLTFKEDIQKAQVSGQGDSLHEHIANLAGSPAIKKGILQTVKVVDELVKVMGRHKPENIVIEMARENQTTQKGQKNSRERMKRIEEGIKELGSQILKEHPVENTQLQNEKLYLYYLQNGRDMYVDQELDINRLSDYDVDHIVPQSFLKDDSIDNKVLTRSDKARGKSDNVPSEEVVKKMKNYWRQLLNAKLITQRKFDNLTKAERGGLSELDKAGFIKRQLVETRQITKHVAQILDSRMNTKYDENDKLIREVKVITLKSKLVSDFRKDFQFYKVREINNYHHAHDAYLNAVVGTALIKKYPKLESEFVYGDYKVYDVRKMIAKSEQEIGKATAKYFFYSNIMNFFKTEITLANGEIRKRPLIETNGETGEIVWDKGRDFATVRKVLSMPQVNIVKKTEVQTGGFSKESILPKRNSDKLIARKKDWDPKKYGGFDSPTVAYSVLVVAKVEKGKSKKLKSVKELLGITIMERSSFEKNPIDFLEAKGYKEVKKDLIIKLPKYSLFELENGRKRMLASAGELQKGNELALPSKYVNFLYLASHYEKLKGSPEDNEQKQLFVEQHKHYLDEIIEQISEFSKRVILADANLDKVLSAYNKHRDKPIREQAENIIHLFTLTNLGAPAAFKYFDTTIDRKRYTSTKEVLDATLIHQSITGLYETRIDLSQLGGDGGEAAAKPAPGGSGGMDPLQLLQPLEAEIKGTKLKAHWNSGATITCVPQAFLEEEVPIKNIWIKTIHGEKEQPVYYLTFKIQGRKVEAEVISSPYDYILVSPSDIPWLMKKPLQLTTLVPLQEYEERLLKQTMLTGSYKEKLQSLFLKYDALWQHWENQVGHRRIKPHHIATGTVNPRPQKQYPINPKAKASIQTVINDLLKQGVLIQQNSIMNTPVYPVPKPDGKWRMVLDYREVNKTIPLIAAQNQHSAGILSSIFRGKYKTTLDLSNGFWAHSITPESYWLTAFTWLGQQYCWTRLPQGFLNSPALFTADVVDLLKEVPNVQVYVDDIYISHDDPREHLEQLEKVFSLLLNAGYVVSLKKSEIAQHEVEFLGFNITKEGRGLTETFKQKLLNITPPRDLKQLQSILGLLNFARNFIPNFSELVKPLYNIIATANGKYITWTTDNSQQLQNIISMLNSAENLEERNPEVRLIMKVNTSPSAGYIRFYNEFAKRPIMYLNYVYTKAEVKFTNTEKLLTTIHKGLIKALDLGMGQEILVYSPIVSMTKIQKTPLPERKALPIRWITWMSYLEDPRIQFHYDKTLPELQQVPTVTDDIIAKIKHPSEFSMVFYTDGSAIKHPNVNKSHNAGMGIAQVQFKPEFTVINTWSIPLGDHTAQLAEVAAVEFACKKALKIDGPVLIVTDSFYVAESVNKELPYWQSNGFFNNKKKPLKHVSKWKSIADCIQLKPDIIIIHEKGHQPTASTFHTEGNNLADKLATQGSYVVNAGKRTADGSEFEKRTADGSEFESPKKKAKVE

SEQ ID NO: 500 - protein, 2178 aa, synthetic construct
MPAAKRVKLDGGDKKYSIGLDIGTNSVGWAVITDEYKVPSKKFKVLGNTDRHSIKKNLIGALLFDSGETAEATRLKRTARRRYTRRKNRICYLQEIFSNEMAKVDDSFFHRLEESFLVEEDKKHERHPIFGNIVDEVAYHEKYPTIYHLRKKLVDSTDKADLRLIYLALAHMIKFRGHFLIEGDLNPDNSDVDKLFIQLVQTYNQLFEENPINASGVDAKAILSARLSKSRRLENLIAQLPGEKKNGLFGNLIALSLGLTPNFKSNFDLAEDAKLQLSKDTYDDDLDNLLAQIGDQYADLFLAAKNLSDAILLSDILRVNTEITKAPLSASMIKRYDEHHQDLTLLKALVRQQLPEKYKEIFFDQSKNGYAGYIDGGASQEEFYKFIKPILEKMDGTEELLVKLNREDLLRKQRTFDNGSIPHQIHLGELHAILRRQEDFYPFLKDNREKIEKILTFRIPYYVGPLARGNSRFAWMTRKSEETITPWNFEEVVDKGASAQSFIERMTNFDKNLPNEKVLPKHSLLYEYFTVYNELTKVKYVTEGMRKPAFLSGEQKKAIVDLLFKTNRKVTVKQLKEDYFKKIECFDSVEISGVEDRFNASLGTYHDLLKIIKDKDFLDNEENEDILEDIVLTLTLFEDREMIEERLKTYAHLFDDKVMKQLKRRRYTGWGRLSRKLINGIRDKQSGKTILDFLKSDGFANRNFMQLIHDDSLTFKEDIQKAQVSGQGDSLHEHIANLAGSPAIKKGILQTVKVVDELVKVMGRHKPENIVIEMARENQTTQKGQKNSRERMKRIEEGIKELGSQILKEHPVENTQLQNEKLYLYYLQNGRDMYVDQELDINRLSDYDVDHIVPQSFLKDDSIDNKVLTRSDKARGKSDNVPSEEVVKKMKNYWRQLLNAKLITQRKFDNLTKAERGGLSELDKAGFIKRQLVETRQITKHVAQILDSRMNTKYDENDKLIREVKVITLKSKLVSDFRKDFQFYKVREINNYHHAHDAYLNAVVGTALIKKYPKLESEFVYGDYKVYDVRKMIAKSEQEIGKATAKYFFYSNIMNFFKTEITLANGEIRKRPLIETNGETGEIVWDKGRDFATVRKVLSMPQVNIVKKTEVQTGGFSKESILPKRNSDKLIARKKDWDPKKYGGFDSPTVAYSVLVVAKVEKGKSKKLKSVKELLGITIMERSSFEKNPIDFLEAKGYKEVKKDLIIKLPKYSLFELENGRKRMLASAGELQKGNELALPSKYVNFLYLASHYEKLKGSPEDNEQKQLFVEQHKHYLDEIIEQISEFSKRVILADANLDKVLSAYNKHRDKPIREQAENIIHLFTLTNLGAPAAFKYFDTTIDRKRYTSTKEVLDATLIHQSITGLYETRIDLSQLGGDGGPAPAPAPAPAPAPGGMDPLQLLQPLEAEIKGTKLKAHWNSGATITCVPQAFLEEEVPIKNIWIKTIHGEKEQPVYYLTFKIQGRKVEAEVISSPYDYILVSPSDIPWLMKKPLQLTTLVPLQEYEERLLKQTMLTGSYKEKLQSLFLKYDALWQHWENQVGHRRIKPHHIATGTVNPRPQKQYPINPKAKASIQTVINDLLKQGVLIQQNSIMNTPVYPVPKPDGKWRMVLDYREVNKTIPLIAAQNQHSAGILSSIFRGKYKTTLDLSNGFWAHSITPESYWLTAFTWLGQQYCWTRLPQGFLNSPALFTADVVDLLKEVPNVQVYVDDIYISHDDPREHLEQLEKVFSLLLNAGYVVSLKKSEIAQHEVEFLGFNITKEGRGLTETFKQKLLNITPPRDLKQLQSILGLLNFARNFIPNFSELVKPLYNIIATANGKYITWTTDNSQQLQNIISMLNSAENLEERNPEVRLIMKVNTSPSAGYIRFYNEFAKRPIMYLNYVYTKAEVKFTNTEKLLTTIHKGLIKALDLGMGQEILVYSPIVSMTKIQKTPLPERKALPIRWITWMSYLEDPRIQFHYDKTLPELQQVPTVTDDIIAKIKHPSEFSMVFYTDGSAIKHPNVNKSHNAGMGIAQVQFKPEFTVINTWSIPLGDHTAQLAEVAAVEFACKKALKIDGPVLIVTDSFYVAESVNKELPYWQSNGFFNNKKKPLKHVSKWKSIADCIQLKPDIIIIHEKGHQPTASTFHTEGNNLADKLATQGSYVVNAGKRTADGSEFEKRTADGSEFESPKKKAKVE

SEQ ID NO: 501 - protein, 2176 aa, synthetic construct
MPAAKRVKLDGGDKKYSIGLDIGTNSVGWAVITDEYKVPSKKFKVLGNTDRHSIKKNLIGALLFDSGETAEATRLKRTARRRYTRRKNRICYLQEIFSNEMAKVDDSFFHRLEESFLVEEDKKHERHPIFGNIVDEVAYHEKYPTIYHLRKKLVDSTDKADLRLIYLALAHMIKFRGHFLIEGDLNPDNSDVDKLFIQLVQTYNQLFEENPINASGVDAKAILSARLSKSRRLENLIAQLPGEKKNGLFGNLIALSLGLTPNFKSNFDLAEDAKLQLSKDTYDDDLDNLLAQIGDQYADLFLAAKNLSDAILLSDILRVNTEITKAPLSASMIKRYDEHHQDLTLLKALVRQQLPEKYKEIFFDQSKNGYAGYIDGGASQEEFYKFIKPILEKMDGTEELLVKLNREDLLRKQRTFDNGSIPHQIHLGELHAILRRQEDFYPFLKDNREKIEKILTFRIPYYVGPLARGNSRFAWMTRKSEETITPWNFEEVVDKGASAQSFIERMTNFDKNLPNEKVLPKHSLLYEYFTVYNELTKVKYVTEGMRKPAFLSGEQKKAIVDLLFKTNRKVTVKQLKEDYFKKIECFDSVEISGVEDRFNASLGTYHDLLKIIKDKDFLDNEENEDILEDIVLTLTLFEDREMIEERLKTYAHLFDDKVMKQLKRRRYTGWGRLSRKLINGIRDKQSGKTILDFLKSDGFANRNFMQLIHDDSLTFKEDIQKAQVSGQGDSLHEHIANLAGSPAIKKGILQTVKVVDELVKVMGRHKPENIVIEMARENQTTQKGQKNSRERMKRIEEGIKELGSQILKEHPVENTQLQNEKLYLYYLQNGRDMYVDQELDINRLSDYDVDHIVPQSFLKDDSIDNKVLTRSDKARGKSDNVPSEEVVKKMKNYWRQLLNAKLITQRKFDNLTKAERGGLSELDKAGFIKRQLVETRQITKHVAQILDSRMNTKYDENDKLIREVKVITLKSKLVSDFRKDFQFYKVREINNYHHAHDAYLNAVVGTALIKKYPKLESEFVYGDYKVYDVRKMIAKSEQEIGKATAKYFFYSNIMNFFKTEITLANGEIRKRPLIETNGETGEIVWDKGRDFATVRKVLSMPQVNIVKKTEVQTGGFSKESILPKRNSDKLIARKKDWDPKKYGGFDSPTVAYSVLVVAKVEKGKSKKLKSVKELLGITIMERSSFEKNPIDFLEAKGYKEVKKDLIIKLPKYSLFELENGRKRMLASAGELQKGNELALPSKYVNFLYLASHYEKLKGSPEDNEQKQLFVEQHKHYLDEIIEQISEFSKRVILADANLDKVLSAYNKHRDKPIREQAENIIHLFTLTNLGAPAAFKYFDTTIDRKRYTSTKEVLDATLIHQSITGLYETRIDLSQLGGDGGGGGEAAAKGGSGGMDPLQLLQPLEAEIKGTKLKAHWNSGATITCVPQAFLEEEVPIKNIWIKTIHGEKEQPVYYLTFKIQGRKVEAEVISSPYDYILVSPSDIPWLMKKPLQLTTLVPLQEYEERLLKQTMLTGSYKEKLQSLFLKYDALWQHWENQVGHRRIKPHHIATGTVNPRPQKQYPINPKAKASIQTVINDLLKQGVLIQQNSIMNTPVYPVPKPDGKWRMVLDYREVNKTIPLIAAQNQHSAGILSSIFRGKYKTTLDLSNGFWAHSITPESYWLTAFTWLGQQYCWTRLPQGFLNSPALFTADVVDLLKEVPNVQVYVDDIYISHDDPREHLEQLEKVFSLLLNAGYVVSLKKSEIAQHEVEFLGFNITKEGRGLTETFKQKLLNITPPRDLKQLQSILGLLNFARNFIPNFSELVKPLYNIIATANGKYITWTTDNSQQLQNIISMLNSAENLEERNPEVRLIMKVNTSPSAGYIRFYNEFAKRPIMYLNYVYTKAEVKFTNTEKLLTTIHKGLIKALDLGMGQEILVYSPIVSMTKIQKTPLPERKALPIRWITWMSYLEDPRIQFHYDKTLPELQQVPTVTDDIIAKIKHPSEFSMVFYTDGSAIKHPNVNKSHNAGMGIAQVQFKPEFTVINTWSIPLGDHTAQLAEVAAVEFACKKALKIDGPVLIVTDSFYVAESVNKELPYWQSNGFFNNKKKPLKHVSKWKSIADCIQLKPDIIIIHEKGHQPTASTFHTEGNNLADKLATQGSYVVNAGKRTADGSEFEKRTADGSEFESPKKKAKVE

SEQ ID NO: 502 - protein, 2176 aa, synthetic construct
MPAAKRVKLDGGDKKYSIGLDIGTNSVGWAVITDEYKVPSKKFKVLGNTDRHSIKKNLIGALLFDSGETAEATRLKRTARRRYTRRKNRICYLQEIFSNEMAKVDDSFFHRLEESFLVEEDKKHERHPIFGNIVDEVAYHEKYPTIYHLRKKLVDSTDKADLRLIYLALAHMIKFRGHFLIEGDLNPDNSDVDKLFIQLVQTYNQLFEENPINASGVDAKAILSARLSKSRRLENLIAQLPGEKKNGLFGNLIALSLGLTPNFKSNFDLAEDAKLQLSKDTYDDDLDNLLAQIGDQYADLFLAAKNLSDAILLSDILRVNTEITKAPLSASMIKRYDEHHQDLTLLKALVRQQLPEKYKEIFFDQSKNGYAGYIDGGASQEEFYKFIKPILEKMDGTEELLVKLNREDLLRKQRTFDNGSIPHQIHLGELHAILRRQEDFYPFLKDNREKIEKILTFRIPYYVGPLARGNSRFAWMTRKSEETITPWNFEEVVDKGASAQSFIERMTNFDKNLPNEKVLPKHSLLYEYFTVYNELTKVKYVTEGMRKPAFLSGEQKKAIVDLLFKTNRKVTVKQLKEDYFKKIECFDSVEISGVEDRFNASLGTYHDLLKIIKDKDFLDNEENEDILEDIVLTLTLFEDREMIEERLKTYAHLFDDKVMKQLKRRRYTGWGRLSRKLINGIRDKQSGKTILDFLKSDGFANRNFMQLIHDDSLTFKEDIQKAQVSGQGDSLHEHIANLAGSPAIKKGILQTVKVVDELVKVMGRHKPENIVIEMARENQTTQKGQKNSRERMKRIEEGIKELGSQILKEHPVENTQLQNEKLYLYYLQNGRDMYVDQELDINRLSDYDVDHIVPQSFLKDDSIDNKVLTRSDKARGKSDNVPSEEVVKKMKNYWRQLLNAKLITQRKFDNLTKAERGGLSELDKAGFIKRQLVETRQITKHVAQILDSRMNTKYDENDKLIREVKVITLKSKLVSDFRKDFQFYKVREINNYHHAHDAYLNAVVGTALIKKYPKLESEFVYGDYKVYDVRKMIAKSEQEIGKATAKYFFYSNIMNFFKTEITLANGEIRKRPLIETNGETGEIVWDKGRDFATVRKVLSMPQVNIVKKTEVQTGGFSKESILPKRNSDKLIARKKDWDPKKYGGFDSPTVAYSVLVVAKVEKGKSKKLKSVKELLGITIMERSSFEKNPIDFLEAKGYKEVKKDLIIKLPKYSLFELENGRKRMLASAGELQKGNELALPSKYVNFLYLASHYEKLKGSPEDNEQKQLFVEQHKHYLDEIIEQISEFSKRVILADANLDKVLSAYNKHRDKPIREQAENIIHLFTLTNLGAPAAFKYFDTTIDRKRYTSTKEVLDATLIHQSITGLYETRIDLSQLGGDGGGGSPAPEAAAKGGMDPLQLLQPLEAEIKGTKLKAHWNSGATITCVPQAFLEEEVPIKNIWIKTIHGEKEQPVYYLTFKIQGRKVEAEVISSPYDYILVSPSDIPWLMKKPLQLTTLVPLQEYEERLLKQTMLTGSYKEKLQSLFLKYDALWQHWENQVGHRRIKPHHIATGTVNPRPQKQYPINPKAKASIQTVINDLLKQGVLIQQNSIMNTPVYPVPKPDGKWRMVLDYREVNKTIPLIAAQNQHSAGILSSIFRGKYKTTLDLSNGFWAHSITPESYWLTAFTWLGQQYCWTRLPQGFLNSPALFTADVVDLLKEVPNVQVYVDDIYISHDDPREHLEQLEKVFSLLLNAGYVVSLKKSEIAQHEVEFLGFNITKEGRGLTETFKQKLLNITPPRDLKQLQSILGLLNFARNFIPNFSELVKPLYNIIATANGKYITWTTDNSQQLQNIISMLNSAENLEERNPEVRLIMKVNTSPSAGYIRFYNEFAKRPIMYLNYVYTKAEVKFTNTEKLLTTIHKGLIKALDLGMGQEILVYSPIVSMTKIQKTPLPERKALPIRWITWMSYLEDPRIQFHYDKTLPELQQVPTVTDDIIAKIKHPSEFSMVFYTDGSAIKHPNVNKSHNAGMGIAQVQFKPEFTVINTWSIPLGDHTAQLAEVAAVEFACKKALKIDGPVLIVTDSFYVAESVNKELPYWQSNGFFNNKKKPLKHVSKWKSIADCIQLKPDIIIIHEKGHQPTASTFHTEGNNLADKLATQGSYVVNAGKRTADGSEFEKRTADGSEFESPKKKAKVE

SEQ ID NO: 503 - protein, 2174 aa, synthetic construct
MPAAKRVKLDGGDKKYSIGLDIGTNSVGWAVITDEYKVPSKKFKVLGNTDRHSIKKNLIGALLFDSGETAEATRLKRTARRRYTRRKNRICYLQEIFSNEMAKVDDSFFHRLEESFLVEEDKKHERHPIFGNIVDEVAYHEKYPTIYHLRKKLVDSTDKADLRLIYLALAHMIKFRGHFLIEGDLNPDNSDVDKLFIQLVQTYNQLFEENPINASGVDAKAILSARLSKSRRLENLIAQLPGEKKNGLFGNLIALSLGLTPNFKSNFDLAEDAKLQLSKDTYDDDLDNLLAQIGDQYADLFLAAKNLSDAILLSDILRVNTEITKAPLSASMIKRYDEHHQDLTLLKALVRQQLPEKYKEIFFDQSKNGYAGYIDGGASQEEFYKFIKPILEKMDGTEELLVKLNREDLLRKQRTFDNGSIPHQIHLGELHAILRRQEDFYPFLKDNREKIEKILTFRIPYYVGPLARGNSRFAWMTRKSEETITPWNFEEVVDKGASAQSFIERMTNFDKNLPNEKVLPKHSLLYEYFTVYNELTKVKYVTEGMRKPAFLSGEQKKAIVDLLFKTNRKVTVKQLKEDYFKKIECFDSVEISGVEDRFNASLGTYHDLLKIIKDKDFLDNEENEDILEDIVLTLTLFEDREMIEERLKTYAHLFDDKVMKQLKRRRYTGWGRLSRKLINGIRDKQSGKTILDFLKSDGFANRNFMQLIHDDSLTFKEDIQKAQVSGQGDSLHEHIANLAGSPAIKKGILQTVKVVDELVKVMGRHKPENIVIEMARENQTTQKGQKNSRERMKRIEEGIKELGSQILKEHPVENTQLQNEKLYLYYLQNGRDMYVDQELDINRLSDYDVDHIVPQSFLKDDSIDNKVLTRSDKARGKSDNVPSEEVVKKMKNYWRQLLNAKLITQRKFDNLTKAERGGLSELDKAGFIKRQLVETRQITKHVAQILDSRMNTKYDENDKLIREVKVITLKSKLVSDFRKDFQFYKVREINNYHHAHDAYLNAVVGTALIKKYPKLESEFVYGDYKVYDVRKMIAKSEQEIGKATAKYFFYSNIMNFFKTEITLANGEIRKRPLIETNGETGEIVWDKGRDFATVRKVLSMPQVNIVKKTEVQTGGFSKESILPKRNSDKLIARKKDWDPKKYGGFDSPTVAYSVLVVAKVEKGKSKKLKSVKELLGITIMERSSFEKNPIDFLEAKGYKEVKKDLIIKLPKYSLFELENGRKRMLASAGELQKGNELALPSKYVNFLYLASHYEKLKGSPEDNEQKQLFVEQHKHYLDEIIEQISEFSKRVILADANLDKVLSAYNKHRDKPIREQAENIIHLFTLTNLGAPAAFKYFDTTIDRKRYTSTKEVLDATLIHQSITGLYETRIDLSQLGGDGGPAPAPAPAPGGMDPLQLLQPLEAEIKGTKLKAHWNSGATITCVPQAFLEEEVPIKNIWIKTIHGEKEQPVYYLTFKIQGRKVEAEVISSPYDYILVSPSDIPWLMKKPLQLTTLVPLQEYEERLLKQTMLTGSYKEKLQSLFLKYDALWQHWENQVGHRRIKPHHIATGTVNPRPQKQYPINPKAKASIQTVINDLLKQGVLIQQNSIMNTPVYPVPKPDGKWRMVLDYREVNKTIPLIAAQNQHSAGILSSIFRGKYKTTLDLSNGFWAHSITPESYWLTAFTWLGQQYCWTRLPQGFLNSPALFTADVVDLLKEVPNVQVYVDDIYISHDDPREHLEQLEKVFSLLLNAGYVVSLKKSEIAQHEVEFLGFNITKEGRGLTETFKQKLLNITPPRDLKQLQSILGLLNFARNFIPNFSELVKPLYNIIATANGKYITWTTDNSQQLQNIISMLNSAENLEERNPEVRLIMKVNTSPSAGYIRFYNEFAKRPIMYLNYVYTKAEVKFTNTEKLLTTIHKGLIKALDLGMGQEILVYSPIVSMTKIQKTPLPERKALPIRWITWMSYLEDPRIQFHYDKTLPELQQVPTVTDDIIAKIKHPSEFSMVFYTDGSAIKHPNVNKSHNAGMGIAQVQFKPEFTVINTWSIPLGDHTAQLAEVAAVEFACKKALKIDGPVLIVTDSFYVAESVNKELPYWQSNGFFNNKKKPLKHVSKWKSIADCIQLKPDIIIIHEKGHQPTASTFHTEGNNLADKLATQGSYVVNAGKRTADGSEFEKRTADGSEFESPKKKAKVE

SEQ ID NO: 504 - protein, 2176 aa, synthetic construct
MPAAKRVKLDGGDKKYSIGLDIGTNSVGWAVITDEYKVPSKKFKVLGNTDRHSIKKNLIGALLFDSGETAEATRLKRTARRRYTRRKNRICYLQEIFSNEMAKVDDSFFHRLEESFLVEEDKKHERHPIFGNIVDEVAYHEKYPTIYHLRKKLVDSTDKADLRLIYLALAHMIKFRGHFLIEGDLNPDNSDVDKLFIQLVQTYNQLFEENPINASGVDAKAILSARLSKSRRLENLIAQLPGEKKNGLFGNLIALSLGLTPNFKSNFDLAEDAKLQLSKDTYDDDLDNLLAQIGDQYADLFLAAKNLSDAILLSDILRVNTEITKAPLSASMIKRYDEHHQDLTLLKALVRQQLPEKYKEIFFDQSKNGYAGYIDGGASQEEFYKFIKPILEKMDGTEELLVKLNREDLLRKQRTFDNGSIPHQIHLGELHAILRRQEDFYPFLKDNREKIEKILTFRIPYYVGPLARGNSRFAWMTRKSEETITPWNFEEVVDKGASAQSFIERMTNFDKNLPNEKVLPKHSLLYEYFTVYNELTKVKYVTEGMRKPAFLSGEQKKAIVDLLFKTNRKVTVKQLKEDYFKKIECFDSVEISGVEDRFNASLGTYHDLLKIIKDKDFLDNEENEDILEDIVLTLTLFEDREMIEERLKTYAHLFDDKVMKQLKRRRYTGWGRLSRKLINGIRDKQSGKTILDFLKSDGFANRNFMQLIHDDSLTFKEDIQKAQVSGQGDSLHEHIANLAGSPAIKKGILQTVKVVDELVKVMGRHKPENIVIEMARENQTTQKGQKNSRERMKRIEEGIKELGSQILKEHPVENTQLQNEKLYLYYLQNGRDMYVDQELDINRLSDYDVDHIVPQSFLKDDSIDNKVLTRSDKARGKSDNVPSEEVVKKMKNYWRQLLNAKLITQRKFDNLTKAERGGLSELDKAGFIKRQLVETRQITKHVAQILDSRMNTKYDENDKLIREVKVITLKSKLVSDFRKDFQFYKVREINNYHHAHDAYLNAVVGTALIKKYPKLESEFVYGDYKVYDVRKMIAKSEQEIGKATAKYFFYSNIMNFFKTEITLANGEIRKRPLIETNGETGEIVWDKGRDFATVRKVLSMPQVNIVKKTEVQTGGFSKESILPKRNSDKLIARKKDWDPKKYGGFDSPTVAYSVLVVAKVEKGKSKKLKSVKELLGITIMERSSFEKNPIDFLEAKGYKEVKKDLIIKLPKYSLFELENGRKRMLASAGELQKGNELALPSKYVNFLYLASHYEKLKGSPEDNEQKQLFVEQHKHYLDEIIEQISEFSKRVILADANLDKVLSAYNKHRDKPIREQAENIIHLFTLTNLGAPAAFKYFDTTIDRKRYTSTKEVLDATLIHQSITGLYETRIDLSQLGGDGGGGGEAAAKGSSGGMDPLQLLQPLEAEIKGTKLKAHWNSGATITCVPQAFLEEEVPIKNIWIKTIHGEKEQPVYYLTFKIQGRKVEAEVISSPYDYILVSPSDIPWLMKKPLQLTTLVPLQEYEERLLKQTMLTGSYKEKLQSLFLKYDALWQHWENQVGHRRIKPHHIATGTVNPRPQKQYPINPKAKASIQTVINDLLKQGVLIQQNSIMNTPVYPVPKPDGKWRMVLDYREVNKTIPLIAAQNQHSAGILSSIFRGKYKTTLDLSNGFWAHSITPESYWLTAFTWLGQQYCWTRLPQGFLNSPALFTADVVDLLKEVPNVQVYVDDIYISHDDPREHLEQLEKVFSLLLNAGYVVSLKKSEIAQHEVEFLGFNITKEGRGLTETFKQKLLNITPPRDLKQLQSILGLLNFARNFIPNFSELVKPLYNIIATANGKYITWTTDNSQQLQNIISMLNSAENLEERNPEVRLIMKVNTSPSAGYIRFYNEFAKRPIMYLNYVYTKAEVKFTNTEKLLTTIHKGLIKALDLGMGQEILVYSPIVSMTKIQKTPLPERKALPIRWITWMSYLEDPRIQFHYDKTLPELQQVPTVTDDIIAKIKHPSEFSMVFYTDGSAIKHPNVNKSHNAGMGIAQVQFKPEFTVINTWSIPLGDHTAQLAEVAAVEFACKKALKIDGPVLIVTDSFYVAESVNKELPYWQSNGFFNNKKKPLKHVSKWKSIADCIQLKPDIIIIHEKGHQPTASTFHTEGNNLADKLATQGSYVVNAGKRTADGSEFEKRTADGSEFESPKKKAKVE

SEQ ID NO: 505 - protein, 2176 aa, synthetic construct
MPAAKRVKLDGGDKKYSIGLDIGTNSVGWAVITDEYKVPSKKFKVLGNTDRHSIKKNLIGALLFDSGETAEATRLKRTARRRYTRRKNRICYLQEIFSNEMAKVDDSFFHRLEESFLVEEDKKHERHPIFGNIVDEVAYHEKYPTIYHLRKKLVDSTDKADLRLIYLALAHMIKFRGHFLIEGDLNPDNSDVDKLFIQLVQTYNQLFEENPINASGVDAKAILSARLSKSRRLENLIAQLPGEKKNGLFGNLIALSLGLTPNFKSNFDLAEDAKLQLSKDTYDDDLDNLLAQIGDQYADLFLAAKNLSDAILLSDILRVNTEITKAPLSASMIKRYDEHHQDLTLLKALVRQQLPEKYKEIFFDQSKNGYAGYIDGGASQEEFYKFIKPILEKMDGTEELLVKLNREDLLRKQRTFDNGSIPHQIHLGELHAILRRQEDFYPFLKDNREKIEKILTFRIPYYVGPLARGNSRFAWMTRKSEETITPWNFEEVVDKGASAQSFIERMTNFDKNLPNEKVLPKHSLLYEYFTVYNELTKVKYVTEGMRKPAFLSGEQKKAIVDLLFKTNRKVTVKQLKEDYFKKIECFDSVEISGVEDRFNASLGTYHDLLKIIKDKDFLDNEENEDILEDIVLTLTLFEDREMIEERLKTYAHLFDDKVMKQLKRRRYTGWGRLSRKLINGIRDKQSGKTILDFLKSDGFANRNFMQLIHDDSLTFKEDIQKAQVSGQGDSLHEHIANLAGSPAIKKGILQTVKVVDELVKVMGRHKPENIVIEMARENQTTQKGQKNSRERMKRIEEGIKELGSQILKEHPVENTQLQNEKLYLYYLQNGRDMYVDQELDINRLSDYDVDHIVPQSFLKDDSIDNKVLTRSDKARGKSDNVPSEEVVKKMKNYWRQLLNAKLITQRKFDNLTKAERGGLSELDKAGFIKRQLVETRQITKHVAQILDSRMNTKYDENDKLIREVKVITLKSKLVSDFRKDFQFYKVREINNYHHAHDAYLNAVVGTALIKKYPKLESEFVYGDYKVYDVRKMIAKSEQEIGKATAKYFFYSNIMNFFKTEITLANGEIRKRPLIETNGETGEIVWDKGRDFATVRKVLSMPQVNIVKKTEVQTGGFSKESILPKRNSDKLIARKKDWDPKKYGGFDSPTVAYSVLVVAKVEKGKSKKLKSVKELLGITIMERSSFEKNPIDFLEAKGYKEVKKDLIIKLPKYSLFELENGRKRMLASAGELQKGNELALPSKYVNFLYLASHYEKLKGSPEDNEQKQLFVEQHKHYLDEIIEQISEFSKRVILADANLDKVLSAYNKHRDKPIREQAENIIHLFTLTNLGAPAAFKYFDTTIDRKRYTSTKEVLDATLIHQSITGLYETRIDLSQLGGDGGEAAAKGGSGSSGGMDPLQLLQPLEAEIKGTKLKAHWNSGATITCVPQAFLEEEVPIKNIWIKTIHGEKEQPVYYLTFKIQGRKVEAEVISSPYDYILVSPSDIPWLMKKPLQLTTLVPLQEYEERLLKQTMLTGSYKEKLQSLFLKYDALWQHWENQVGHRRIKPHHIATGTVNPRPQKQYPINPKAKASIQTVINDLLKQGVLIQQNSIMNTPVYPVPKPDGKWRMVLDYREVNKTIPLIAAQNQHSAGILSSIFRGKYKTTLDLSNGFWAHSITPESYWLTAFTWLGQQYCWTRLPQGFLNSPALFTADVVDLLKEVPNVQVYVDDIYISHDDPREHLEQLEKVFSLLLNAGYVVSLKKSEIAQHEVEFLGFNITKEGRGLTETFKQKLLNITPPRDLKQLQSILGLLNFARNFIPNFSELVKPLYNIIATANGKYITWTTDNSQQLQNIISMLNSAENLEERNPEVRLIMKVNTSPSAGYIRFYNEFAKRPIMYLNYVYTKAEVKFTNTEKLLTTIHKGLIKALDLGMGQEILVYSPIVSMTKIQKTPLPERKALPIRWITWMSYLEDPRIQFHYDKTLPELQQVPTVTDDIIAKIKHPSEFSMVFYTDGSAIKHPNVNKSHNAGMGIAQVQFKPEFTVINTWSIPLGDHTAQLAEVAAVEFACKKALKIDGPVLIVTDSFYVAESVNKELPYWQSNGFFNNKKKPLKHVSKWKSIADCIQLKPDIIIIHEKGHQPTASTFHTEGNNLADKLATQGSYVVNAGKRTADGSEFEKRTADGSEFESPKKKAKVE

SEQ ID NO: 506 - protein, 2176 aa, synthetic construct
MPAAKRVKLDGGDKKYSIGLDIGTNSVGWAVITDEYKVPSKKFKVLGNTDRHSIKKNLIGALLFDSGETAEATRLKRTARRRYTRRKNRICYLQEIFSNEMAKVDDSFFHRLEESFLVEEDKKHERHPIFGNIVDEVAYHEKYPTIYHLRKKLVDSTDKADLRLIYLALAHMIKFRGHFLIEGDLNPDNSDVDKLFIQLVQTYNQLFEENPINASGVDAKAILSARLSKSRRLENLIAQLPGEKKNGLFGNLIALSLGLTPNFKSNFDLAEDAKLQLSKDTYDDDLDNLLAQIGDQYADLFLAAKNLSDAILLSDILRVNTEITKAPLSASMIKRYDEHHQDLTLLKALVRQQLPEKYKEIFFDQSKNGYAGYIDGGASQEEFYKFIKPILEKMDGTEELLVKLNREDLLRKQRTFDNGSIPHQIHLGELHAILRRQEDFYPFLKDNREKIEKILTFRIPYYVGPLARGNSRFAWMTRKSEETITPWNFEEVVDKGASAQSFIERMTNFDKNLPNEKVLPKHSLLYEYFTVYNELTKVKYVTEGMRKPAFLSGEQKKAIVDLLFKTNRKVTVKQLKEDYFKKIECFDSVEISGVEDRFNASLGTYHDLLKIIKDKDFLDNEENEDILEDIVLTLTLFEDREMIEERLKTYAHLFDDKVMKQLKRRRYTGWGRLSRKLINGIRDKQSGKTILDFLKSDGFANRNFMQLIHDDSLTFKEDIQKAQVSGQGDSLHEHIANLAGSPAIKKGILQTVKVVDELVKVMGRHKPENIVIEMARENQTTQKGQKNSRERMKRIEEGIKELGSQILKEHPVENTQLQNEKLYLYYLQNGRDMYVDQELDINRLSDYDVDHIVPQSFLKDDSIDNKVLTRSDKARGKSDNVPSEEVVKKMKNYWRQLLNAKLITQRKFDNLTKAERGGLSELDKAGFIKRQLVETRQITKHVAQILDSRMNTKYDENDKLIREVKVITLKSKLVSDFRKDFQFYKVREINNYHHAHDAYLNAVVGTALIKKYPKLESEFVYGDYKVYDVRKMIAKSEQEIGKATAKYFFYSNIMNFFKTEITLANGEIRKRPLIETNGETGEIVWDKGRDFATVRKVLSMPQVNIVKKTEVQTGGFSKESILPKRNSDKLIARKKDWDPKKYGGFDSPTVAYSVLVVAKVEKGKSKKLKSVKELLGITIMERSSFEKNPIDFLEAKGYKEVKKDLIIKLPKYSLFELENGRKRMLASAGELQKGNELALPSKYVNFLYLASHYEKLKGSPEDNEQKQLFVEQHKHYLDEIIEQISEFSKRVILADANLDKVLSAYNKHRDKPIREQAENIIHLFTLTNLGAPAAFKYFDTTIDRKRYTSTKEVLDATLIHQSITGLYETRIDLSQLGGDGGGSSEAAAKPAPGGMDPLQLLQPLEAEIKGTKLKAHWNSGATITCVPQAFLEEEVPIKNIWIKTIHGEKEQPVYYLTFKIQGRKVEAEVISSPYDYILVSPSDIPWLMKKPLQLTTLVPLQEYEERLLKQTMLTGSYKEKLQSLFLKYDALWQHWENQVGHRRIKPHHIATGTVNPRPQKQYPINPKAKASIQTVINDLLKQGVLIQQNSIMNTPVYPVPKPDGKWRMVLDYREVNKTIPLIAAQNQHSAGILSSIFRGKYKTTLDLSNGFWAHSITPESYWLTAFTWLGQQYCWTRLPQGFLNSPALFTADVVDLLKEVPNVQVYVDDIYISHDDPREHLEQLEKVFSLLLNAGYVVSLKKSEIAQHEVEFLGFNITKEGRGLTETFKQKLLNITPPRDLKQLQSILGLLNFARNFIPNFSELVKPLYNIIATANGKYITWTTDNSQQLQNIISMLNSAENLEERNPEVRLIMKVNTSPSAGYIRFYNEFAKRPIMYLNYVYTKAEVKFTNTEKLLTTIHKGLIKALDLGMGQEILVYSPIVSMTKIQKTPLPERKALPIRWITWMSYLEDPRIQFHYDKTLPELQQVPTVTDDIIAKIKHPSEFSMVFYTDGSAIKHPNVNKSHNAGMGIAQVQFKPEFTVINTWSIPLGDHTAQLAEVAAVEFACKKALKIDGPVLIVTDSFYVAESVNKELPYWQSNGFFNNKKKPLKHVSKWKSIADCIQLKPDIIIIHEKGHQPTASTFHTEGNNLADKLATQGSYVVNAGKRTADGSEFEKRTADGSEFESPKKKAKVE

SEQ ID NO: 507 - protein, 2176 aa, synthetic construct
MPAAKRVKLDGGDKKYSIGLDIGTNSVGWAVITDEYKVPSKKFKVLGNTDRHSIKKNLIGALLFDSGETAEATRLKRTARRRYTRRKNRICYLQEIFSNEMAKVDDSFFHRLEESFLVEEDKKHERHPIFGNIVDEVAYHEKYPTIYHLRKKLVDSTDKADLRLIYLALAHMIKFRGHFLIEGDLNPDNSDVDKLFIQLVQTYNQLFEENPINASGVDAKAILSARLSKSRRLENLIAQLPGEKKNGLFGNLIALSLGLTPNFKSNFDLAEDAKLQLSKDTYDDDLDNLLAQIGDQYADLFLAAKNLSDAILLSDILRVNTEITKAPLSASMIKRYDEHHQDLTLLKALVRQQLPEKYKEIFFDQSKNGYAGYIDGGASQEEFYKFIKPILEKMDGTEELLVKLNREDLLRKQRTFDNGSIPHQIHLGELHAILRRQEDFYPFLKDNREKIEKILTFRIPYYVGPLARGNSRFAWMTRKSEETITPWNFEEVVDKGASAQSFIERMTNFDKNLPNEKVLPKHSLLYEYFTVYNELTKVKYVTEGMRKPAFLSGEQKKAIVDLLFKTNRKVTVKQLKEDYFKKIECFDSVEISGVEDRFNASLGTYHDLLKIIKDKDFLDNEENEDILEDIVLTLTLFEDREMIEERLKTYAHLFDDKVMKQLKRRRYTGWGRLSRKLINGIRDKQSGKTILDFLKSDGFANRNFMQLIHDDSLTFKEDIQKAQVSGQGDSLHEHIANLAGSPAIKKGILQTVKVVDELVKVMGRHKPENIVIEMARENQTTQKGQKNSRERMKRIEEGIKELGSQILKEHPVENTQLQNEKLYLYYLQNGRDMYVDQELDINRLSDYDVDHIVPQSFLKDDSIDNKVLTRSDKARGKSDNVPSEEVVKKMKNYWRQLLNAKLITQRKFDNLTKAERGGLSELDKAGFIKRQLVETRQITKHVAQILDSRMNTKYDENDKLIREVKVITLKSKLVSDFRKDFQFYKVREINNYHHAHDAYLNAVVGTALIKKYPKLESEFVYGDYKVYDVRKMIAKSEQEIGKATAKYFFYSNIMNFFKTEITLANGEIRKRPLIETNGETGEIVWDKGRDFATVRKVLSMPQVNIVKKTEVQTGGFSKESILPKRNSDKLIARKKDWDPKKYGGFDSPTVAYSVLVVAKVEKGKSKKLKSVKELLGITIMERSSFEKNPIDFLEAKGYKEVKKDLIIKLPKYSLFELENGRKRMLASAGELQKGNELALPSKYVNFLYLASHYEKLKGSPEDNEQKQLFVEQHKHYLDEIIEQISEFSKRVILADANLDKVLSAYNKHRDKPIREQAENIIHLFTLTNLGAPAAFKYFDTTIDRKRYTSTKEVLDATLIHQSITGLYETRIDLSQLGGDGGGGGPAPEAAAKGGMDPLQLLQPLEAEIKGTKLKAHWNSGATITCVPQAFLEEEVPIKNIWIKTIHGEKEQPVYYLTFKIQGRKVEAEVISSPYDYILVSPSDIPWLMKKPLQLTTLVPLQEYEERLLKQTMLTGSYKEKLQSLFLKYDALWQHWENQVGHRRIKPHHIATGTVNPRPQKQYPINPKAKASIQTVINDLLKQGVLIQQNSIMNTPVYPVPKPDGKWRMVLDYREVNKTIPLIAAQNQHSAGILSSIFRGKYKTTLDLSNGFWAHSITPESYWLTAFTWLGQQYCWTRLPQGFLNSPALFTADVVDLLKEVPNVQVYVDDIYISHDDPREHLEQLEKVFSLLLNAGYVVSLKKSEIAQHEVEFLGFNITKEGRGLTETFKQKLLNITPPRDLKQLQSILGLLNFARNFIPNFSELVKPLYNIIATANGKYITWTTDNSQQLQNIISMLNSAENLEERNPEVRLIMKVNTSPSAGYIRFYNEFAKRPIMYLNYVYTKAEVKFTNTEKLLTTIHKGLIKALDLGMGQEILVYSPIVSMTKIQKTPLPERKALPIRWITWMSYLEDPRIQFHYDKTLPELQQVPTVTDDIIAKIKHPSEFSMVFYTDGSAIKHPNVNKSHNAGMGIAQVQFKPEFTVINTWSIPLGDHTAQLAEVAAVEFACKKALKIDGPVLIVTDSFYVAESVNKELPYWQSNGFFNNKKKPLKHVSKWKSIADCIQLKPDIIIIHEKGHQPTASTFHTEGNNLADKLATQGSYVVNAGKRTADGSEFEKRTADGSEFESPKKKAKVE

SEQ ID NO: 508 - protein, 2174 aa, synthetic construct
MPAAKRVKLDGGDKKYSIGLDIGTNSVGWAVITDEYKVPSKKFKVLGNTDRHSIKKNLIGALLFDSGETAEATRLKRTARRRYTRRKNRICYLQEIFSNEMAKVDDSFFHRLEESFLVEEDKKHERHPIFGNIVDEVAYHEKYPTIYHLRKKLVDSTDKADLRLIYLALAHMIKFRGHFLIEGDLNPDNSDVDKLFIQLVQTYNQLFEENPINASGVDAKAILSARLSKSRRLENLIAQLPGEKKNGLFGNLIALSLGLTPNFKSNFDLAEDAKLQLSKDTYDDDLDNLLAQIGDQYADLFLAAKNLSDAILLSDILRVNTEITKAPLSASMIKRYDEHHQDLTLLKALVRQQLPEKYKEIFFDQSKNGYAGYIDGGASQEEFYKFIKPILEKMDGTEELLVKLNREDLLRKQRTFDNGSIPHQIHLGELHAILRRQEDFYPFLKDNREKIEKILTFRIPYYVGPLARGNSRFAWMTRKSEETITPWNFEEVVDKGASAQSFIERMTNFDKNLPNEKVLPKHSLLYEYFTVYNELTKVKYVTEGMRKPAFLSGEQKKAIVDLLFKTNRKVTVKQLKEDYFKKIECFDSVEISGVEDRFNASLGTYHDLLKIIKDKDFLDNEENEDILEDIVLTLTLFEDREMIEERLKTYAHLFDDKVMKQLKRRRYTGWGRLSRKLINGIRDKQSGKTILDFLKSDGFANRNFMQLIHDDSLTFKEDIQKAQVSGQGDSLHEHIANLAGSPAIKKGILQTVKVVDELVKVMGRHKPENIVIEMARENQTTQKGQKNSRERMKRIEEGIKELGSQILKEHPVENTQLQNEKLYLYYLQNGRDMYVDQELDINRLSDYDVDHIVPQSFLKDDSIDNKVLTRSDKARGKSDNVPSEEVVKKMKNYWRQLLNAKLITQRKFDNLTKAERGGLSELDKAGFIKRQLVETRQITKHVAQILDSRMNTKYDENDKLIREVKVITLKSKLVSDFRKDFQFYKVREINNYHHAHDAYLNAVVGTALIKKYPKLESEFVYGDYKVYDVRKMIAKSEQEIGKATAKYFFYSNIMNFFKTEITLANGEIRKRPLIETNGETGEIVWDKGRDFATVRKVLSMPQVNIVKKTEVQTGGFSKESILPKRNSDKLIARKKDWDPKKYGGFDSPTVAYSVLVVAKVEKGKSKKLKSVKELLGITIMERSSFEKNPIDFLEAKGYKEVKKDLIIKLPKYSLFELENGRKRMLASAGELQKGNELALPSKYVNFLYLASHYEKLKGSPEDNEQKQLFVEQHKHYLDEIIEQISEFSKRVILADANLDKVLSAYNKHRDKPIREQAENIIHLFTLTNLGAPAAFKYFDTTIDRKRYTSTKEVLDATLIHQSITGLYETRIDLSQLGGDGGGSSGGGGGSGGMDPLQLLQPLEAEIKGTKLKAHWNSGATITCVPQAFLEEEVPIKNIWIKTIHGEKEQPVYYLTFKIQGRKVEAEVISSPYDYILVSPSDIPWLMKKPLQLTTLVPLQEYEERLLKQTMLTGSYKEKLQSLFLKYDALWQHWENQVGHRRIKPHHIATGTVNPRPQKQYPINPKAKASIQTVINDLLKQGVLIQQNSIMNTPVYPVPKPDGKWRMVLDYREVNKTIPLIAAQNQHSAGILSSIFRGKYKTTLDLSNGFWAHSITPESYWLTAFTWLGQQYCWTRLPQGFLNSPALFTADVVDLLKEVPNVQVYVDDIYISHDDPREHLEQLEKVFSLLLNAGYVVSLKKSEIAQHEVEFLGFNITKEGRGLTETFKQKLLNITPPRDLKQLQSILGLLNFARNFIPNFSELVKPLYNIIATANGKYITWTTDNSQQLQNIISMLNSAENLEERNPEVRLIMKVNTSPSAGYIRFYNEFAKRPIMYLNYVYTKAEVKFTNTEKLLTTIHKGLIKALDLGMGQEILVYSPIVSMTKIQKTPLPERKALPIRWITWMSYLEDPRIQFHYDKTLPELQQVPTVTDDIIAKIKHPSEFSMVFYTDGSAIKHPNVNKSHNAGMGIAQVQFKPEFTVINTWSIPLGDHTAQLAEVAAVEFACKKALKIDGPVLIVTDSFYVAESVNKELPYWQSNGFFNNKKKPLKHVSKWKSIADCIQLKPDIIIIHEKGHQPTASTFHTEGNNLADKLATQGSYVVNAGKRTADGSEFEKRTADGSEFESPKKKAKVE

SEQ ID NO: 509 - protein, 2183 aa, synthetic construct
MPAAKRVKLDGGDKKYSIGLDIGTNSVGWAVITDEYKVPSKKFKVLGNTDRHSIKKNLIGALLFDSGETAEATRLKRTARRRYTRRKNRICYLQEIFSNEMAKVDDSFFHRLEESFLVEEDKKHERHPIFGNIVDEVAYHEKYPTIYHLRKKLVDSTDKADLRLIYLALAHMIKFRGHFLIEGDLNPDNSDVDKLFIQLVQTYNQLFEENPINASGVDAKAILSARLSKSRRLENLIAQLPGEKKNGLFGNLIALSLGLTPNFKSNFDLAEDAKLQLSKDTYDDDLDNLLAQIGDQYADLFLAAKNLSDAILLSDILRVNTEITKAPLSASMIKRYDEHHQDLTLLKALVRQQLPEKYKEIFFDQSKNGYAGYIDGGASQEEFYKFIKPILEKMDGTEELLVKLNREDLLRKQRTFDNGSIPHQIHLGELHAILRRQEDFYPFLKDNREKIEKILTFRIPYYVGPLARGNSRFAWMTRKSEETITPWNFEEVVDKGASAQSFIERMTNFDKNLPNEKVLPKHSLLYEYFTVYNELTKVKYVTEGMRKPAFLSGEQKKAIVDLLFKTNRKVTVKQLKEDYFKKIECFDSVEISGVEDRFNASLGTYHDLLKIIKDKDFLDNEENEDILEDIVLTLTLFEDREMIEERLKTYAHLFDDKVMKQLKRRRYTGWGRLSRKLINGIRDKQSGKTILDFLKSDGFANRNFMQLIHDDSLTFKEDIQKAQVSGQGDSLHEHIANLAGSPAIKKGILQTVKVVDELVKVMGRHKPENIVIEMARENQTTQKGQKNSRERMKRIEEGIKELGSQILKEHPVENTQLQNEKLYLYYLQNGRDMYVDQELDINRLSDYDVDHIVPQSFLKDDSIDNKVLTRSDKARGKSDNVPSEEVVKKMKNYWRQLLNAKLITQRKFDNLTKAERGGLSELDKAGFIKRQLVETRQITKHVAQILDSRMNTKYDENDKLIREVKVITLKSKLVSDFRKDFQFYKVREINNYHHAHDAYLNAVVGTALIKKYPKLESEFVYGDYKVYDVRKMIAKSEQEIGKATAKYFFYSNIMNFFKTEITLANGEIRKRPLIETNGETGEIVWDKGRDFATVRKVLSMPQVNIVKKTEVQTGGFSKESILPKRNSDKLIARKKDWDPKKYGGFDSPTVAYSVLVVAKVEKGKSKKLKSVKELLGITIMERSSFEKNPIDFLEAKGYKEVKKDLIIKLPKYSLFELENGRKRMLASAGELQKGNELALPSKYVNFLYLASHYEKLKGSPEDNEQKQLFVEQHKHYLDEIIEQISEFSKRVILADANLDKVLSAYNKHRDKPIREQAENIIHLFTLTNLGAPAAFKYFDTTIDRKRYTSTKEVLDATLIHQSITGLYETRIDLSQLGGDGGGSSGSSGSSGSSGSSGSSGGMDPLQLLQPLEAEIKGTKLKAHWNSGATITCVPQAFLEEEVPIKNIWIKTIHGEKEQPVYYLTFKIQGRKVEAEVISSPYDYILVSPSDIPWLMKKPLQLTTLVPLQEYEERLLKQTMLTGSYKEKLQSLFLKYDALWQHWENQVGHRRIKPHHIATGTVNPRPQKQYPINPKAKASIQTVINDLLKQGVLIQQNSIMNTPVYPVPKPDGKWRMVLDYREVNKTIPLIAAQNQHSAGILSSIFRGKYKTTLDLSNGFWAHSITPESYWLTAFTWLGQQYCWTRLPQGFLNSPALFTADVVDLLKEVPNVQVYVDDIYISHDDPREHLEQLEKVFSLLLNAGYVVSLKKSEIAQHEVEFLGFNITKEGRGLTETFKQKLLNITPPRDLKQLQSILGLLNFARNFIPNFSELVKPLYNIIATANGKYITWTTDNSQQLQNIISMLNSAENLEERNPEVRLIMKVNTSPSAGYIRFYNEFAKRPIMYLNYVYTKAEVKFTNTEKLLTTIHKGLIKALDLGMGQEILVYSPIVSMTKIQKTPLPERKALPIRWITWMSYLEDPRIQFHYDKTLPELQQVPTVTDDIIAKIKHPSEFSMVFYTDGSAIKHPNVNKSHNAGMGIAQVQFKPEFTVINTWSIPLGDHTAQLAEVAAVEFACKKALKIDGPVLIVTDSFYVAESVNKELPYWQSNGFFNNKKKPLKHVSKWKSIADCIQLKPDIIIIHEKGHQPTASTFHTEGNNLADKLATQGSYVVNAGKRTADGSEFEKRTADGSEFESPKKKAKVE

SEQ ID NO: 510 - protein, 2176 aa, synthetic construct
MPAAKRVKLDGGDKKYSIGLDIGTNSVGWAVITDEYKVPSKKFKVLGNTDRHSIKKNLIGALLFDSGETAEATRLKRTARRRYTRRKNRICYLQEIFSNEMAKVDDSFFHRLEESFLVEEDKKHERHPIFGNIVDEVAYHEKYPTIYHLRKKLVDSTDKADLRLIYLALAHMIKFRGHFLIEGDLNPDNSDVDKLFIQLVQTYNQLFEENPINASGVDAKAILSARLSKSRRLENLIAQLPGEKKNGLFGNLIALSLGLTPNFKSNFDLAEDAKLQLSKDTYDDDLDNLLAQIGDQYADLFLAAKNLSDAILLSDILRVNTEITKAPLSASMIKRYDEHHQDLTLLKALVRQQLPEKYKEIFFDQSKNGYAGYIDGGASQEEFYKFIKPILEKMDGTEELLVKLNREDLLRKQRTFDNGSIPHQIHLGELHAILRRQEDFYPFLKDNREKIEKILTFRIPYYVGPLARGNSRFAWMTRKSEETITPWNFEEVVDKGASAQSFIERMTNFDKNLPNEKVLPKHSLLYEYFTVYNELTKVKYVTEGMRKPAFLSGEQKKAIVDLLFKTNRKVTVKQLKEDYFKKIECFDSVEISGVEDRFNASLGTYHDLLKIIKDKDFLDNEENEDILEDIVLTLTLFEDREMIEERLKTYAHLFDDKVMKQLKRRRYTGWGRLSRKLINGIRDKQSGKTILDFLKSDGFANRNFMQLIHDDSLTFKEDIQKAQVSGQGDSLHEHIANLAGSPAIKKGILQTVKVVDELVKVMGRHKPENIVIEMARENQTTQKGQKNSRERMKRIEEGIKELGSQILKEHPVENTQLQNEKLYLYYLQNGRDMYVDQELDINRLSDYDVDHIVPQSFLKDDSIDNKVLTRSDKARGKSDNVPSEEVVKKMKNYWRQLLNAKLITQRKFDNLTKAERGGLSELDKAGFIKRQLVETRQITKHVAQILDSRMNTKYDENDKLIREVKVITLKSKLVSDFRKDFQFYKVREINNYHHAHDAYLNAVVGTALIKKYPKLESEFVYGDYKVYDVRKMIAKSEQEIGKATAKYFFYSNIMNFFKTEITLANGEIRKRPLIETNGETGEIVWDKGRDFATVRKVLSMPQVNIVKKTEVQTGGFSKESILPKRNSDKLIARKKDWDPKKYGGFDSPTVAYSVLVVAKVEKGKSKKLKSVKELLGITIMERSSFEKNPIDFLEAKGYKEVKKDLIIKLPKYSLFELENGRKRMLASAGELQKGNELALPSKYVNFLYLASHYEKLKGSPEDNEQKQLFVEQHKHYLDEIIEQISEFSKRVILADANLDKVLSAYNKHRDKPIREQAENIIHLFTLTNLGAPAAFKYFDTTIDRKRYTSTKEVLDATLIHQSITGLYETRIDLSQLGGDGGPAPEAAAKGGGGGMDPLQLLQPLEAEIKGTKLKAHWNSGATITCVPQAFLEEEVPIKNIWIKTIHGEKEQPVYYLTFKIQGRKVEAEVISSPYDYILVSPSDIPWLMKKPLQLTTLVPLQEYEERLLKQTMLTGSYKEKLQSLFLKYDALWQHWENQVGHRRIKPHHIATGTVNPRPQKQYPINPKAKASIQTVINDLLKQGVLIQQNSIMNTPVYPVPKPDGKWRMVLDYREVNKTIPLIAAQNQHSAGILSSIFRGKYKTTLDLSNGFWAHSITPESYWLTAFTWLGQQYCWTRLPQGFLNSPALFTADVVDLLKEVPNVQVYVDDIYISHDDPREHLEQLEKVFSLLLNAGYVVSLKKSEIAQHEVEFLGFNITKEGRGLTETFKQKLLNITPPRDLKQLQSILGLLNFARNFIPNFSELVKPLYNIIATANGKYITWTTDNSQQLQNIISMLNSAENLEERNPEVRLIMKVNTSPSAGYIRFYNEFAKRPIMYLNYVYTKAEVKFTNTEKLLTTIHKGLIKALDLGMGQEILVYSPIVSMTKIQKTPLPERKALPIRWITWMSYLEDPRIQFHYDKTLPELQQVPTVTDDIIAKIKHPSEFSMVFYTDGSAIKHPNVNKSHNAGMGIAQVQFKPEFTVINTWSIPLGDHTAQLAEVAAVEFACKKALKIDGPVLIVTDSFYVAESVNKELPYWQSNGFFNNKKKPLKHVSKWKSIADCIQLKPDIIIIHEKGHQPTASTFHTEGNNLADKLATQGSYVVNAGKRTADGSEFEKRTADGSEFESPKKKAKVE

SEQ ID NO: 511 - protein, 2176 aa, synthetic construct
MPAAKRVKLDGGDKKYSIGLDIGTNSVGWAVITDEYKVPSKKFKVLGNTDRHSIKKNLIGALLFDSGETAEATRLKRTARRRYTRRKNRICYLQEIFSNEMAKVDDSFFHRLEESFLVEEDKKHERHPIFGNIVDEVAYHEKYPTIYHLRKKLVDSTDKADLRLIYLALAHMIKFRGHFLIEGDLNPDNSDVDKLFIQLVQTYNQLFEENPINASGVDAKAILSARLSKSRRLENLIAQLPGEKKNGLFGNLIALSLGLTPNFKSNFDLAEDAKLQLSKDTYDDDLDNLLAQIGDQYADLFLAAKNLSDAILLSDILRVNTEITKAPLSASMIKRYDEHHQDLTLLKALVRQQLPEKYKEIFFDQSKNGYAGYIDGGASQEEFYKFIKPILEKMDGTEELLVKLNREDLLRKQRTFDNGSIPHQIHLGELHAILRRQEDFYPFLKDNREKIEKILTFRIPYYVGPLARGNSRFAWMTRKSEETITPWNFEEVVDKGASAQSFIERMTNFDKNLPNEKVLPKHSLLYEYFTVYNELTKVKYVTEGMRKPAFLSGEQKKAIVDLLFKTNRKVTVKQLKEDYFKKIECFDSVEISGVEDRFNASLGTYHDLLKIIKDKDFLDNEENEDILEDIVLTLTLFEDREMIEERLKTYAHLFDDKVMKQLKRRRYTGWGRLSRKLINGIRDKQSGKTILDFLKSDGFANRNFMQLIHDDSLTFKEDIQKAQVSGQGDSLHEHIANLAGSPAIKKGILQTVKVVDELVKVMGRHKPENIVIEMARENQTTQKGQKNSRERMKRIEEGIKELGSQILKEHPVENTQLQNEKLYLYYLQNGRDMYVDQELDINRLSDYDVDHIVPQSFLKDDSIDNKVLTRSDKARGKSDNVPSEEVVKKMKNYWRQLLNAKLITQRKFDNLTKAERGGLSELDKAGFIKRQLVETRQITKHVAQILDSRMNTKYDENDKLIREVKVITLKSKLVSDFRKDFQFYKVREINNYHHAHDAYLNAVVGTALIKKYPKLESEFVYGDYKVYDVRKMIAKSEQEIGKATAKYFFYSNIMNFFKTEITLANGEIRKRPLIETNGETGEIVWDKGRDFATVRKVLSMPQVNIVKKTEVQTGGFSKESILPKRNSDKLIARKKDWDPKKYGGFDSPTVAYSVLVVAKVEKGKSKKLKSVKELLGITIMERSSFEKNPIDFLEAKGYKEVKKDLIIKLPKYSLFELENGRKRMLASAGELQKGNELALPSKYVNFLYLASHYEKLKGSPEDNEQKQLFVEQHKHYLDEIIEQISEFSKRVILADANLDKVLSAYNKHRDKPIREQAENIIHLFTLTNLGAPAAFKYFDTTIDRKRYTSTKEVLDATLIHQSITGLYETRIDLSQLGGDGGEAAAKGGGGSSGGMDPLQLLQPLEAEIKGTKLKAHWNSGATITCVPQAFLEEEVPIKNIWIKTIHGEKEQPVYYLTFKIQGRKVEAEVISSPYDYILVSPSDIPWLMKKPLQLTTLVPLQEYEERLLKQTMLTGSYKEKLQSLFLKYDALWQHWENQVGHRRIKPHHIATGTVNPRPQKQYPINPKAKASIQTVINDLLKQGVLIQQNSIMNTPVYPVPKPDGKWRMVLDYREVNKTIPLIAAQNQHSAGILSSIFRGKYKTTLDLSNGFWAHSITPESYWLTAFTWLGQQYCWTRLPQGFLNSPALFTADVVDLLKEVPNVQVYVDDIYISHDDPREHLEQLEKVFSLLLNAGYVVSLKKSEIAQHEVEFLGFNITKEGRGLTETFKQKLLNITPPRDLKQLQSILGLLNFARNFIPNFSELVKPLYNIIATANGKYITWTTDNSQQLQNIISMLNSAENLEERNPEVRLIMKVNTSPSAGYIRFYNEFAKRPIMYLNYVYTKAEVKFTNTEKLLTTIHKGLIKALDLGMGQEILVYSPIVSMTKIQKTPLPERKALPIRWITWMSYLEDPRIQFHYDKTLPELQQVPTVTDDIIAKIKHPSEFSMVFYTDGSAIKHPNVNKSHNAGMGIAQVQFKPEFTVINTWSIPLGDHTAQLAEVAAVEFACKKALKIDGPVLIVTDSFYVAESVNKELPYWQSNGFFNNKKKPLKHVSKWKSIADCIQLKPDIIIIHEKGHQPTASTFHTEGNNLADKLATQGSYVVNAGKRTADGSEFEKRTADGSEFESPKKKAKVE

SEQ ID NO: 512 - protein, 2171 aa, synthetic construct
MPAAKRVKLDGGDKKYSIGLDIGTNSVGWAVITDEYKVPSKKFKVLGNTDRHSIKKNLIGALLFDSGETAEATRLKRTARRRYTRRKNRICYLQEIFSNEMAKVDDSFFHRLEESFLVEEDKKHERHPIFGNIVDEVAYHEKYPTIYHLRKKLVDSTDKADLRLIYLALAHMIKFRGHFLIEGDLNPDNSDVDKLFIQLVQTYNQLFEENPINASGVDAKAILSARLSKSRRLENLIAQLPGEKKNGLFGNLIALSLGLTPNFKSNFDLAEDAKLQLSKDTYDDDLDNLLAQIGDQYADLFLAAKNLSDAILLSDILRVNTEITKAPLSASMIKRYDEHHQDLTLLKALVRQQLPEKYKEIFFDQSKNGYAGYIDGGASQEEFYKFIKPILEKMDGTEELLVKLNREDLLRKQRTFDNGSIPHQIHLGELHAILRRQEDFYPFLKDNREKIEKILTFRIPYYVGPLARGNSRFAWMTRKSEETITPWNFEEVVDKGASAQSFIERMTNFDKNLPNEKVLPKHSLLYEYFTVYNELTKVKYVTEGMRKPAFLSGEQKKAIVDLLFKTNRKVTVKQLKEDYFKKIECFDSVEISGVEDRFNASLGTYHDLLKIIKDKDFLDNEENEDILEDIVLTLTLFEDREMIEERLKTYAHLFDDKVMKQLKRRRYTGWGRLSRKLINGIRDKQSGKTILDFLKSDGFANRNFMQLIHDDSLTFKEDIQKAQVSGQGDSLHEHIANLAGSPAIKKGILQTVKVVDELVKVMGRHKPENIVIEMARENQTTQKGQKNSRERMKRIEEGIKELGSQILKEHPVENTQLQNEKLYLYYLQNGRDMYVDQELDINRLSDYDVDHIVPQSFLKDDSIDNKVLTRSDKARGKSDNVPSEEVVKKMKNYWRQLLNAKLITQRKFDNLTKAERGGLSELDKAGFIKRQLVETRQITKHVAQILDSRMNTKYDENDKLIREVKVITLKSKLVSDFRKDFQFYKVREINNYHHAHDAYLNAVVGTALIKKYPKLESEFVYGDYKVYDVRKMIAKSEQEIGKATAKYFFYSNIMNFFKTEITLANGEIRKRPLIETNGETGEIVWDKGRDFATVRKVLSMPQVNIVKKTEVQTGGFSKESILPKRNSDKLIARKKDWDPKKYGGFDSPTVAYSVLVVAKVEKGKSKKLKSVKELLGITIMERSSFEKNPIDFLEAKGYKEVKKDLIIKLPKYSLFELENGRKRMLASAGELQKGNELALPSKYVNFLYLASHYEKLKGSPEDNEQKQLFVEQHKHYLDEIIEQISEFSKRVILADANLDKVLSAYNKHRDKPIREQAENIIHLFTLTNLGAPAAFKYFDTTIDRKRYTSTKEVLDATLIHQSITGLYETRIDLSQLGGDGGGGGPAPGGMDPLQLLQPLEAEIKGTKLKAHWNSGATITCVPQAFLEEEVPIKNIWIKTIHGEKEQPVYYLTFKIQGRKVEAEVISSPYDYILVSPSDIPWLMKKPLQLTTLVPLQEYEERLLKQTMLTGSYKEKLQSLFLKYDALWQHWENQVGHRRIKPHHIATGTVNPRPQKQYPINPKAKASIQTVINDLLKQGVLIQQNSIMNTPVYPVPKPDGKWRMVLDYREVNKTIPLIAAQNQHSAGILSSIFRGKYKTTLDLSNGFWAHSITPESYWLTAFTWLGQQYCWTRLPQGFLNSPALFTADVVDLLKEVPNVQVYVDDIYISHDDPREHLEQLEKVFSLLLNAGYVVSLKKSEIAQHEVEFLGFNITKEGRGLTETFKQKLLNITPPRDLKQLQSILGLLNFARNFIPNFSELVKPLYNIIATANGKYITWTTDNSQQLQNIISMLNSAENLEERNPEVRLIMKVNTSPSAGYIRFYNEFAKRPIMYLNYVYTKAEVKFTNTEKLLTTIHKGLIKALDLGMGQEILVYSPIVSMTKIQKTPLPERKALPIRWITWMSYLEDPRIQFHYDKTLPELQQVPTVTDDIIAKIKHPSEFSMVFYTDGSAIKHPNVNKSHNAGMGIAQVQFKPEFTVINTWSIPLGDHTAQLAEVAAVEFACKKALKIDGPVLIVTDSFYVAESVNKELPYWQSNGFFNNKKKPLKHVSKWKSIADCIQLKPDIIIIHEKGHQPTASTFHTEGNNLADKLATQGSYVVNAGKRTADGSEFEKRTADGSEFESPKKKAKVE

SEQ ID NO: 513 - protein, 2176 aa, synthetic construct
MPAAKRVKLDGGDKKYSIGLDIGTNSVGWAVITDEYKVPSKKFKVLGNTDRHSIKKNLIGALLFDSGETAEATRLKRTARRRYTRRKNRICYLQEIFSNEMAKVDDSFFHRLEESFLVEEDKKHERHPIFGNIVDEVAYHEKYPTIYHLRKKLVDSTDKADLRLIYLALAHMIKFRGHFLIEGDLNPDNSDVDKLFIQLVQTYNQLFEENPINASGVDAKAILSARLSKSRRLENLIAQLPGEKKNGLFGNLIALSLGLTPNFKSNFDLAEDAKLQLSKDTYDDDLDNLLAQIGDQYADLFLAAKNLSDAILLSDILRVNTEITKAPLSASMIKRYDEHHQDLTLLKALVRQQLPEKYKEIFFDQSKNGYAGYIDGGASQEEFYKFIKPILEKMDGTEELLVKLNREDLLRKQRTFDNGSIPHQIHLGELHAILRRQEDFYPFLKDNREKIEKILTFRIPYYVGPLARGNSRFAWMTRKSEETITPWNFEEVVDKGASAQSFIERMTNFDKNLPNEKVLPKHSLLYEYFTVYNELTKVKYVTEGMRKPAFLSGEQKKAIVDLLFKTNRKVTVKQLKEDYFKKIECFDSVEISGVEDRFNASLGTYHDLLKIIKDKDFLDNEENEDILEDIVLTLTLFEDREMIEERLKTYAHLFDDKVMKQLKRRRYTGWGRLSRKLINGIRDKQSGKTILDFLKSDGFANRNFMQLIHDDSLTFKEDIQKAQVSGQGDSLHEHIANLAGSPAIKKGILQTVKVVDELVKVMGRHKPENIVIEMARENQTTQKGQKNSRERMKRIEEGIKELGSQILKEHPVENTQLQNEKLYLYYLQNGRDMYVDQELDINRLSDYDVDHIVPQSFLKDDSIDNKVLTRSDKARGKSDNVPSEEVVKKMKNYWRQLLNAKLITQRKFDNLTKAERGGLSELDKAGFIKRQLVETRQITKHVAQILDSRMNTKYDENDKLIREVKVITLKSKLVSDFRKDFQFYKVREINNYHHAHDAYLNAVVGTALIKKYPKLESEFVYGDYKVYDVRKMIAKSEQEIGKATAKYFFYSNIMNFFKTEITLANGEIRKRPLIETNGETGEIVWDKGRDFATVRKVLSMPQVNIVKKTEVQTGGFSKESILPKRNSDKLIARKKDWDPKKYGGFDSPTVAYSVLVVAKVEKGKSKKLKSVKELLGITIMERSSFEKNPIDFLEAKGYKEVKKDLIIKLPKYSLFELENGRKRMLASAGELQKGNELALPSKYVNFLYLASHYEKLKGSPEDNEQKQLFVEQHKHYLDEIIEQISEFSKRVILADANLDKVLSAYNKHRDKPIREQAENIIHLFTLTNLGAPAAFKYFDTTIDRKRYTSTKEVLDATLIHQSITGLYETRIDLSQLGGDGGEAAAKGGSGGGGGMDPLQLLQPLEAEIKGTKLKAHWNSGATITCVPQAFLEEEVPIKNIWIKTIHGEKEQPVYYLTFKIQGRKVEAEVISSPYDYILVSPSDIPWLMKKPLQLTTLVPLQEYEERLLKQTMLTGSYKEKLQSLFLKYDALWQHWENQVGHRRIKPHHIATGTVNPRPQKQYPINPKAKASIQTVINDLLKQGVLIQQNSIMNTPVYPVPKPDGKWRMVLDYREVNKTIPLIAAQNQHSAGILSSIFRGKYKTTLDLSNGFWAHSITPESYWLTAFTWLGQQYCWTRLPQGFLNSPALFTADVVDLLKEVPNVQVYVDDIYISHDDPREHLEQLEKVFSLLLNAGYVVSLKKSEIAQHEVEFLGFNITKEGRGLTETFKQKLLNITPPRDLKQLQSILGLLNFARNFIPNFSELVKPLYNIIATANGKYITWTTDNSQQLQNIISMLNSAENLEERNPEVRLIMKVNTSPSAGYIRFYNEFAKRPIMYLNYVYTKAEVKFTNTEKLLTTIHKGLIKALDLGMGQEILVYSPIVSMTKIQKTPLPERKALPIRWITWMSYLEDPRIQFHYDKTLPELQQVPTVTDDIIAKIKHPSEFSMVFYTDGSAIKHPNVNKSHNAGMGIAQVQFKPEFTVINTWSIPLGDHTAQLAEVAAVEFACKKALKIDGPVLIVTDSFYVAESVNKELPYWQSNGFFNNKKKPLKHVSKWKSIADCIQLKPDIIIIHEKGHQPTASTFHTEGNNLADKLATQGSYVVNAGKRTADGSEFEKRTADGSEFESPKKKAKVE

SEQ ID NO: 514 - protein, 2174 aa, synthetic construct
MPAAKRVKLDGGDKKYSIGLDIGTNSVGWAVITDEYKVPSKKFKVLGNTDRHSIKKNLIGALLFDSGETAEATRLKRTARRRYTRRKNRICYLQEIFSNEMAKVDDSFFHRLEESFLVEEDKKHERHPIFGNIVDEVAYHEKYPTIYHLRKKLVDSTDKADLRLIYLALAHMIKFRGHFLIEGDLNPDNSDVDKLFIQLVQTYNQLFEENPINASGVDAKAILSARLSKSRRLENLIAQLPGEKKNGLFGNLIALSLGLTPNFKSNFDLAEDAKLQLSKDTYDDDLDNLLAQIGDQYADLFLAAKNLSDAILLSDILRVNTEITKAPLSASMIKRYDEHHQDLTLLKALVRQQLPEKYKEIFFDQSKNGYAGYIDGGASQEEFYKFIKPILEKMDGTEELLVKLNREDLLRKQRTFDNGSIPHQIHLGELHAILRRQEDFYPFLKDNREKIEKILTFRIPYYVGPLARGNSRFAWMTRKSEETITPWNFEEVVDKGASAQSFIERMTNFDKNLPNEKVLPKHSLLYEYFTVYNELTKVKYVTEGMRKPAFLSGEQKKAIVDLLFKTNRKVTVKQLKEDYFKKIECFDSVEISGVEDRFNASLGTYHDLLKIIKDKDFLDNEENEDILEDIVLTLTLFEDREMIEERLKTYAHLFDDKVMKQLKRRRYTGWGRLSRKLINGIRDKQSGKTILDFLKSDGFANRNFMQLIHDDSLTFKEDIQKAQVSGQGDSLHEHIANLAGSPAIKKGILQTVKVVDELVKVMGRHKPENIVIEMARENQTTQKGQKNSRERMKRIEEGIKELGSQILKEHPVENTQLQNEKLYLYYLQNGRDMYVDQELDINRLSDYDVDHIVPQSFLKDDSIDNKVLTRSDKARGKSDNVPSEEVVKKMKNYWRQLLNAKLITQRKFDNLTKAERGGLSELDKAGFIKRQLVETRQITKHVAQILDSRMNTKYDENDKLIREVKVITLKSKLVSDFRKDFQFYKVREINNYHHAHDAYLNAVVGTALIKKYPKLESEFVYGDYKVYDVRKMIAKSEQEIGKATAKYFFYSNIMNFFKTEITLANGEIRKRPLIETNGETGEIVWDKGRDFATVRKVLSMPQVNIVKKTEVQTGGFSKESILPKRNSDKLIARKKDWDPKKYGGFDSPTVAYSVLVVAKVEKGKSKKLKSVKELLGITIMERSSFEKNPIDFLEAKGYKEVKKDLIIKLPKYSLFELENGRKRMLASAGELQKGNELALPSKYVNFLYLASHYEKLKGSPEDNEQKQLFVEQHKHYLDEIIEQISEFSKRVILADANLDKVLSAYNKHRDKPIREQAENIIHLFTLTNLGAPAAFKYFDTTIDRKRYTSTKEVLDATLIHQSITGLYETRIDLSQLGGDGGGGGPAPGGSGGMDPLQLLQPLEAEIKGTKLKAHWNSGATITCVPQAFLEEEVPIKNIWIKTIHGEKEQPVYYLTFKIQGRKVEAEVISSPYDYILVSPSDIPWLMKKPLQLTTLVPLQEYEERLLKQTMLTGSYKEKLQSLFLKYDALWQHWENQVGHRRIKPHHIATGTVNPRPQKQYPINPKAKASIQTVINDLLKQGVLIQQNSIMNTPVYPVPKPDGKWRMVLDYREVNKTIPLIAAQNQHSAGILSSIFRGKYKTTLDLSNGFWAHSITPESYWLTAFTWLGQQYCWTRLPQGFLNSPALFTADVVDLLKEVPNVQVYVDDIYISHDDPREHLEQLEKVFSLLLNAGYVVSLKKSEIAQHEVEFLGFNITKEGRGLTETFKQKLLNITPPRDLKQLQSILGLLNFARNFIPNFSELVKPLYNIIATANGKYITWTTDNSQQLQNIISMLNSAENLEERNPEVRLIMKVNTSPSAGYIRFYNEFAKRPIMYLNYVYTKAEVKFTNTEKLLTTIHKGLIKALDLGMGQEILVYSPIVSMTKIQKTPLPERKALPIRWITWMSYLEDPRIQFHYDKTLPELQQVPTVTDDIIAKIKHPSEFSMVFYTDGSAIKHPNVNKSHNAGMGIAQVQFKPEFTVINTWSIPLGDHTAQLAEVAAVEFACKKALKIDGPVLIVTDSFYVAESVNKELPYWQSNGFFNNKKKPLKHVSKWKSIADCIQLKPDIIIIHEKGHQPTASTFHTEGNNLADKLATQGSYVVNAGKRTADGSEFEKRTADGSEFESPKKKAKVE

SEQ ID NO: 515 - protein, 2174 aa, synthetic construct
MPAAKRVKLDGGDKKYSIGLDIGTNSVGWAVITDEYKVPSKKFKVLGNTDRHSIKKNLIGALLFDSGETAEATRLKRTARRRYTRRKNRICYLQEIFSNEMAKVDDSFFHRLEESFLVEEDKKHERHPIFGNIVDEVAYHEKYPTIYHLRKKLVDSTDKADLRLIYLALAHMIKFRGHFLIEGDLNPDNSDVDKLFIQLVQTYNQLFEENPINASGVDAKAILSARLSKSRRLENLIAQLPGEKKNGLFGNLIALSLGLTPNFKSNFDLAEDAKLQLSKDTYDDDLDNLLAQIGDQYADLFLAAKNLSDAILLSDILRVNTEITKAPLSASMIKRYDEHHQDLTLLKALVRQQLPEKYKEIFFDQSKNGYAGYIDGGASQEEFYKFIKPILEKMDGTEELLVKLNREDLLRKQRTFDNGSIPHQIHLGELHAILRRQEDFYPFLKDNREKIEKILTFRIPYYVGPLARGNSRFAWMTRKSEETITPWNFEEVVDKGASAQSFIERMTNFDKNLPNEKVLPKHSLLYEYFTVYNELTKVKYVTEGMRKPAFLSGEQKKAIVDLLFKTNRKVTVKQLKEDYFKKIECFDSVEISGVEDRFNASLGTYHDLLKIIKDKDFLDNEENEDILEDIVLTLTLFEDREMIEERLKTYAHLFDDKVMKQLKRRRYTGWGRLSRKLINGIRDKQSGKTILDFLKSDGFANRNFMQLIHDDSLTFKEDIQKAQVSGQGDSLHEHIANLAGSPAIKKGILQTVKVVDELVKVMGRHKPENIVIEMARENQTTQKGQKNSRERMKRIEEGIKELGSQILKEHPVENTQLQNEKLYLYYLQNGRDMYVDQELDINRLSDYDVDHIVPQSFLKDDSIDNKVLTRSDKARGKSDNVPSEEVVKKMKNYWRQLLNAKLITQRKFDNLTKAERGGLSELDKAGFIKRQLVETRQITKHVAQILDSRMNTKYDENDKLIREVKVITLKSKLVSDFRKDFQFYKVREINNYHHAHDAYLNAVVGTALIKKYPKLESEFVYGDYKVYDVRKMIAKSEQEIGKATAKYFFYSNIMNFFKTEITLANGEIRKRPLIETNGETGEIVWDKGRDFATVRKVLSMPQVNIVKKTEVQTGGFSKESILPKRNSDKLIARKKDWDPKKYGGFDSPTVAYSVLVVAKVEKGKSKKLKSVKELLGITIMERSSFEKNPIDFLEAKGYKEVKKDLIIKLPKYSLFELENGRKRMLASAGELQKGNELALPSKYVNFLYLASHYEKLKGSPEDNEQKQLFVEQHKHYLDEIIEQISEFSKRVILADANLDKVLSAYNKHRDKPIREQAENIIHLFTLTNLGAPAAFKYFDTTIDRKRYTSTKEVLDATLIHQSITGLYETRIDLSQLGGDGGGSSGSSGSSGGMDPLQLLQPLEAEIKGTKLKAHWNSGATITCVPQAFLEEEVPIKNIWIKTIHGEKEQPVYYLTFKIQGRKVEAEVISSPYDYILVSPSDIPWLMKKPLQLTTLVPLQEYEERLLKQTMLTGSYKEKLQSLFLKYDALWQHWENQVGHRRIKPHHIATGTVNPRPQKQYPINPKAKASIQTVINDLLKQGVLIQQNSIMNTPVYPVPKPDGKWRMVLDYREVNKTIPLIAAQNQHSAGILSSIFRGKYKTTLDLSNGFWAHSITPESYWLTAFTWLGQQYCWTRLPQGFLNSPALFTADVVDLLKEVPNVQVYVDDIYISHDDPREHLEQLEKVFSLLLNAGYVVSLKKSEIAQHEVEFLGFNITKEGRGLTETFKQKLLNITPPRDLKQLQSILGLLNFARNFIPNFSELVKPLYNIIATANGKYITWTTDNSQQLQNIISMLNSAENLEERNPEVRLIMKVNTSPSAGYIRFYNEFAKRPIMYLNYVYTKAEVKFTNTEKLLTTIHKGLIKALDLGMGQEILVYSPIVSMTKIQKTPLPERKALPIRWITWMSYLEDPRIQFHYDKTLPELQQVPTVTDDIIAKIKHPSEFSMVFYTDGSAIKHPNVNKSHNAGMGIAQVQFKPEFTVINTWSIPLGDHTAQLAEVAAVEFACKKALKIDGPVLIVTDSFYVAESVNKELPYWQSNGFFNNKKKPLKHVSKWKSIADCIQLKPDIIIIHEKGHQPTASTFHTEGNNLADKLATQGSYVVNAGKRTADGSEFEKRTADGSEFESPKKKAKVE

SEQ ID NO: 516 - protein, 2171 aa, synthetic construct
MPAAKRVKLDGGDKKYSIGLDIGTNSVGWAVITDEYKVPSKKFKVLGNTDRHSIKKNLIGALLFDSGETAEATRLKRTARRRYTRRKNRICYLQEIFSNEMAKVDDSFFHRLEESFLVEEDKKHERHPIFGNIVDEVAYHEKYPTIYHLRKKLVDSTDKADLRLIYLALAHMIKFRGHFLIEGDLNPDNSDVDKLFIQLVQTYNQLFEENPINASGVDAKAILSARLSKSRRLENLIAQLPGEKKNGLFGNLIALSLGLTPNFKSNFDLAEDAKLQLSKDTYDDDLDNLLAQIGDQYADLFLAAKNLSDAILLSDILRVNTEITKAPLSASMIKRYDEHHQDLTLLKALVRQQLPEKYKEIFFDQSKNGYAGYIDGGASQEEFYKFIKPILEKMDGTEELLVKLNREDLLRKQRTFDNGSIPHQIHLGELHAILRRQEDFYPFLKDNREKIEKILTFRIPYYVGPLARGNSRFAWMTRKSEETITPWNFEEVVDKGASAQSFIERMTNFDKNLPNEKVLPKHSLLYEYFTVYNELTKVKYVTEGMRKPAFLSGEQKKAIVDLLFKTNRKVTVKQLKEDYFKKIECFDSVEISGVEDRFNASLGTYHDLLKIIKDKDFLDNEENEDILEDIVLTLTLFEDREMIEERLKTYAHLFDDKVMKQLKRRRYTGWGRLSRKLINGIRDKQSGKTILDFLKSDGFANRNFMQLIHDDSLTFKEDIQKAQVSGQGDSLHEHIANLAGSPAIKKGILQTVKVVDELVKVMGRHKPENIVIEMARENQTTQKGQKNSRERMKRIEEGIKELGSQILKEHPVENTQLQNEKLYLYYLQNGRDMYVDQELDINRLSDYDVDHIVPQSFLKDDSIDNKVLTRSDKARGKSDNVPSEEVVKKMKNYWRQLLNAKLITQRKFDNLTKAERGGLSELDKAGFIKRQLVETRQITKHVAQILDSRMNTKYDENDKLIREVKVITLKSKLVSDFRKDFQFYKVREINNYHHAHDAYLNAVVGTALIKKYPKLESEFVYGDYKVYDVRKMIAKSEQEIGKATAKYFFYSNIMNFFKTEITLANGEIRKRPLIETNGETGEIVWDKGRDFATVRKVLSMPQVNIVKKTEVQTGGFSKESILPKRNSDKLIARKKDWDPKKYGGFDSPTVAYSVLVVAKVEKGKSKKLKSVKELLGITIMERSSFEKNPIDFLEAKGYKEVKKDLIIKLPKYSLFELENGRKRMLASAGELQKGNELALPSKYVNFLYLASHYEKLKGSPEDNEQKQLFVEQHKHYLDEIIEQISEFSKRVILADANLDKVLSAYNKHRDKPIREQAENIIHLFTLTNLGAPAAFKYFDTTIDRKRYTSTKEVLDATLIHQSITGLYETRIDLSQLGGDGGPAPGGGGGMDPLQLLQPLEAEIKGTKLKAHWNSGATITCVPQAFLEEEVPIKNIWIKTIHGEKEQPVYYLTFKIQGRKVEAEVISSPYDYILVSPSDIPWLMKKPLQLTTLVPLQEYEERLLKQTMLTGSYKEKLQSLFLKYDALWQHWENQVGHRRIKPHHIATGTVNPRPQKQYPINPKAKASIQTVINDLLKQGVLIQQNSIMNTPVYPVPKPDGKWRMVLDYREVNKTIPLIAAQNQHSAGILSSIFRGKYKTTLDLSNGFWAHSITPESYWLTAFTWLGQQYCWTRLPQGFLNSPALFTADVVDLLKEVPNVQVYVDDIYISHDDPREHLEQLEKVFSLLLNAGYVVSLKKSEIAQHEVEFLGFNITKEGRGLTETFKQKLLNITPPRDLKQLQSILGLLNFARNFIPNFSELVKPLYNIIATANGKYITWTTDNSQQLQNIISMLNSAENLEERNPEVRLIMKVNTSPSAGYIRFYNEFAKRPIMYLNYVYTKAEVKFTNTEKLLTTIHKGLIKALDLGMGQEILVYSPIVSMTKIQKTPLPERKALPIRWITWMSYLEDPRIQFHYDKTLPELQQVPTVTDDIIAKIKHPSEFSMVFYTDGSAIKHPNVNKSHNAGMGIAQVQFKPEFTVINTWSIPLGDHTAQLAEVAAVEFACKKALKIDGPVLIVTDSFYVAESVNKELPYWQSNGFFNNKKKPLKHVSKWKSIADCIQLKPDIIIIHEKGHQPTASTFHTEGNNLADKLATQGSYVVNAGKRTADGSEFEKRTADGSEFESPKKKAKVE

SEQ ID NO: 517 - protein, 2176 aa, synthetic construct
MPAAKRVKLDGGDKKYSIGLDIGTNSVGWAVITDEYKVPSKKFKVLGNTDRHSIKKNLIGALLFDSGETAEATRLKRTARRRYTRRKNRICYLQEIFSNEMAKVDDSFFHRLEESFLVEEDKKHERHPIFGNIVDEVAYHEKYPTIYHLRKKLVDSTDKADLRLIYLALAHMIKFRGHFLIEGDLNPDNSDVDKLFIQLVQTYNQLFEENPINASGVDAKAILSARLSKSRRLENLIAQLPGEKKNGLFGNLIALSLGLTPNFKSNFDLAEDAKLQLSKDTYDDDLDNLLAQIGDQYADLFLAAKNLSDAILLSDILRVNTEITKAPLSASMIKRYDEHHQDLTLLKALVRQQLPEKYKEIFFDQSKNGYAGYIDGGASQEEFYKFIKPILEKMDGTEELLVKLNREDLLRKQRTFDNGSIPHQIHLGELHAILRRQEDFYPFLKDNREKIEKILTFRIPYYVGPLARGNSRFAWMTRKSEETITPWNFEEVVDKGASAQSFIERMTNFDKNLPNEKVLPKHSLLYEYFTVYNELTKVKYVTEGMRKPAFLSGEQKKAIVDLLFKTNRKVTVKQLKEDYFKKIECFDSVEISGVEDRFNASLGTYHDLLKIIKDKDFLDNEENEDILEDIVLTLTLFEDREMIEERLKTYAHLFDDKVMKQLKRRRYTGWGRLSRKLINGIRDKQSGKTILDFLKSDGFANRNFMQLIHDDSLTFKEDIQKAQVSGQGDSLHEHIANLAGSPAIKKGILQTVKVVDELVKVMGRHKPENIVIEMARENQTTQKGQKNSRERMKRIEEGIKELGSQILKEHPVENTQLQNEKLYLYYLQNGRDMYVDQELDINRLSDYDVDHIVPQSFLKDDSIDNKVLTRSDKARGKSDNVPSEEVVKKMKNYWRQLLNAKLITQRKFDNLTKAERGGLSELDKAGFIKRQLVETRQITKHVAQILDSRMNTKYDENDKLIREVKVITLKSKLVSDFRKDFQFYKVREINNYHHAHDAYLNAVVGTALIKKYPKLESEFVYGDYKVYDVRKMIAKSEQEIGKATAKYFFYSNIMNFFKTEITLANGEIRKRPLIETNGETGEIVWDKGRDFATVRKVLSMPQVNIVKKTEVQTGGFSKESILPKRNSDKLIARKKDWDPKKYGGFDSPTVAYSVLVVAKVEKGKSKKLKSVKELLGITIMERSSFEKNPIDFLEAKGYKEVKKDLIIKLPKYSLFELENGRKRMLASAGELQKGNELALPSKYVNFLYLASHYEKLKGSPEDNEQKQLFVEQHKHYLDEIIEQISEFSKRVILADANLDKVLSAYNKHRDKPIREQAENIIHLFTLTNLGAPAAFKYFDTTIDRKRYTSTKEVLDATLIHQSITGLYETRIDLSQLGGDGGEAAAKGSSGGSGGMDPLQLLQPLEAEIKGTKLKAHWNSGATITCVPQAFLEEEVPIKNIWIKTIHGEKEQPVYYLTFKIQGRKVEAEVISSPYDYILVSPSDIPWLMKKPLQLTTLVPLQEYEERLLKQTMLTGSYKEKLQSLFLKYDALWQHWENQVGHRRIKPHHIATGTVNPRPQKQYPINPKAKASIQTVINDLLKQGVLIQQNSIMNTPVYPVPKPDGKWRMVLDYREVNKTIPLIAAQNQHSAGILSSIFRGKYKTTLDLSNGFWAHSITPESYWLTAFTWLGQQYCWTRLPQGFLNSPALFTADVVDLLKEVPNVQVYVDDIYISHDDPREHLEQLEKVFSLLLNAGYVVSLKKSEIAQHEVEFLGFNITKEGRGLTETFKQKLLNITPPRDLKQLQSILGLLNFARNFIPNFSELVKPLYNIIATANGKYITWTTDNSQQLQNIISMLNSAENLEERNPEVRLIMKVNTSPSAGYIRFYNEFAKRPIMYLNYVYTKAEVKFTNTEKLLTTIHKGLIKALDLGMGQEILVYSPIVSMTKIQKTPLPERKALPIRWITWMSYLEDPRIQFHYDKTLPELQQVPTVTDDIIAKIKHPSEFSMVFYTDGSAIKHPNVNKSHNAGMGIAQVQFKPEFTVINTWSIPLGDHTAQLAEVAAVEFACKKALKIDGPVLIVTDSFYVAESVNKELPYWQSNGFFNNKKKPLKHVSKWKSIADCIQLKPDIIIIHEKGHQPTASTFHTEGNNLADKLATQGSYVVNAGKRTADGSEFEKRTADGSEFESPKKKAKVE

SEQ ID NO: 518 - protein, 2174 aa, synthetic construct
MPAAKRVKLDGGDKKYSIGLDIGTNSVGWAVITDEYKVPSKKFKVLGNTDRHSIKKNLIGALLFDSGETAEATRLKRTARRRYTRRKNRICYLQEIFSNEMAKVDDSFFHRLEESFLVEEDKKHERHPIFGNIVDEVAYHEKYPTIYHLRKKLVDSTDKADLRLIYLALAHMIKFRGHFLIEGDLNPDNSDVDKLFIQLVQTYNQLFEENPINASGVDAKAILSARLSKSRRLENLIAQLPGEKKNGLFGNLIALSLGLTPNFKSNFDLAEDAKLQLSKDTYDDDLDNLLAQIGDQYADLFLAAKNLSDAILLSDILRVNTEITKAPLSASMIKRYDEHHQDLTLLKALVRQQLPEKYKEIFFDQSKNGYAGYIDGGASQEEFYKFIKPILEKMDGTEELLVKLNREDLLRKQRTFDNGSIPHQIHLGELHAILRRQEDFYPFLKDNREKIEKILTFRIPYYVGPLARGNSRFAWMTRKSEETITPWNFEEVVDKGASAQSFIERMTNFDKNLPNEKVLPKHSLLYEYFTVYNELTKVKYVTEGMRKPAFLSGEQKKAIVDLLFKTNRKVTVKQLKEDYFKKIECFDSVEISGVEDRFNASLGTYHDLLKIIKDKDFLDNEENEDILEDIVLTLTLFEDREMIEERLKTYAHLFDDKVMKQLKRRRYTGWGRLSRKLINGIRDKQSGKTILDFLKSDGFANRNFMQLIHDDSLTFKEDIQKAQVSGQGDSLHEHIANLAGSPAIKKGILQTVKVVDELVKVMGRHKPENIVIEMARENQTTQKGQKNSRERMKRIEEGIKELGSQILKEHPVENTQLQNEKLYLYYLQNGRDMYVDQELDINRLSDYDVDHIVPQSFLKDDSIDNKVLTRSDKARGKSDNVPSEEVVKKMKNYWRQLLNAKLITQRKFDNLTKAERGGLSELDKAGFIKRQLVETRQITKHVAQILDSRMNTKYDENDKLIREVKVITLKSKLVSDFRKDFQFYKVREINNYHHAHDAYLNAVVGTALIKKYPKLESEFVYGDYKVYDVRKMIAKSEQEIGKATAKYFFYSNIMNFFKTEITLANGEIRKRPLIETNGETGEIVWDKGRDFATVRKVLSMPQVNIVKKTEVQTGGFSKESILPKRNSDKLIARKKDWDPKKYGGFDSPTVAYSVLVVAKVEKGKSKKLKSVKELLGITIMERSSFEKNPIDFLEAKGYKEVKKDLIIKLPKYSLFELENGRKRMLASAGELQKGNELALPSKYVNFLYLASHYEKLKGSPEDNEQKQLFVEQHKHYLDEIIEQISEFSKRVILADANLDKVLSAYNKHRDKPIREQAENIIHLFTLTNLGAPAAFKYFDTTIDRKRYTSTKEVLDATLIHQSITGLYETRIDLSQLGGDGGGGSPAPGSSGGMDPLQLLQPLEAEIKGTKLKAHWNSGATITCVPQAFLEEEVPIKNIWIKTIHGEKEQPVYYLTFKIQGRKVEAEVISSPYDYILVSPSDIPWLMKKPLQLTTLVPLQEYEERLLKQTMLTGSYKEKLQSLFLKYDALWQHWENQVGHRRIKPHHIATGTVNPRPQKQYPINPKAKASIQTVINDLLKQGVLIQQNSIMNTPVYPVPKPDGKWRMVLDYREVNKTIPLIAAQNQHSAGILSSIFRGKYKTTLDLSNGFWAHSITPESYWLTAFTWLGQQYCWTRLPQGFLNSPALFTADVVDLLKEVPNVQVYVDDIYISHDDPREHLEQLEKVFSLLLNAGYVVSLKKSEIAQHEVEFLGFNITKEGRGLTETFKQKLLNITPPRDLKQLQSILGLLNFARNFIPNFSELVKPLYNIIATANGKYITWTTDNSQQLQNIISMLNSAENLEERNPEVRLIMKVNTSPSAGYIRFYNEFAKRPIMYLNYVYTKAEVKFTNTEKLLTTIHKGLIKALDLGMGQEILVYSPIVSMTKIQKTPLPERKALPIRWITWMSYLEDPRIQFHYDKTLPELQQVPTVTDDIIAKIKHPSEFSMVFYTDGSAIKHPNVNKSHNAGMGIAQVQFKPEFTVINTWSIPLGDHTAQLAEVAAVEFACKKALKIDGPVLIVTDSFYVAESVNKELPYWQSNGFFNNKKKPLKHVSKWKSIADCIQLKPDIIIIHEKGHQPTASTFHTEGNNLADKLATQGSYVVNAGKRTADGSEFEKRTADGSEFESPKKKAKVE

SEQ ID NO: 519 - protein, 2175 aa, synthetic construct
MPAAKRVKLDGGDKKYSIGLDIGTNSVGWAVITDEYKVPSKKFKVLGNTDRHSIKKNLIGALLFDSGETAEATRLKRTARRRYTRRKNRICYLQEIFSNEMAKVDDSFFHRLEESFLVEEDKKHERHPIFGNIVDEVAYHEKYPTIYHLRKKLVDSTDKADLRLIYLALAHMIKFRGHFLIEGDLNPDNSDVDKLFIQLVQTYNQLFEENPINASGVDAKAILSARLSKSRRLENLIAQLPGEKKNGLFGNLIALSLGLTPNFKSNFDLAEDAKLQLSKDTYDDDLDNLLAQIGDQYADLFLAAKNLSDAILLSDILRVNTEITKAPLSASMIKRYDEHHQDLTLLKALVRQQLPEKYKEIFFDQSKNGYAGYIDGGASQEEFYKFIKPILEKMDGTEELLVKLNREDLLRKQRTFDNGSIPHQIHLGELHAILRRQEDFYPFLKDNREKIEKILTFRIPYYVGPLARGNSRFAWMTRKSEETITPWNFEEVVDKGASAQSFIERMTNFDKNLPNEKVLPKHSLLYEYFTVYNELTKVKYVTEGMRKPAFLSGEQKKAIVDLLFKTNRKVTVKQLKEDYFKKIECFDSVEISGVEDRFNASLGTYHDLLKIIKDKDFLDNEENEDILEDIVLTLTLFEDREMIEERLKTYAHLFDDKVMKQLKRRRYTGWGRLSRKLINGIRDKQSGKTILDFLKSDGFANRNFMQLIHDDSLTFKEDIQKAQVSGQGDSLHEHIANLAGSPAIKKGILQTVKVVDELVKVMGRHKPENIVIEMARENQTTQKGQKNSRERMKRIEEGIKELGSQILKEHPVENTQLQNEKLYLYYLQNGRDMYVDQELDINRLSDYDVDHIVPQSFLKDDSIDNKVLTRSDKARGKSDNVPSEEVVKKMKNYWRQLLNAKLITQRKFDNLTKAERGGLSELDKAGFIKRQLVETRQITKHVAQILDSRMNTKYDENDKLIREVKVITLKSKLVSDFRKDFQFYKVREINNYHHAHDAYLNAVVGTALIKKYPKLESEFVYGDYKVYDVRKMIAKSEQEIGKATAKYFFYSNIMNFFKTEITLANGEIRKRPLIETNGETGEIVWDKGRDFATVRKVLSMPQVNIVKKTEVQTGGFSKESILPKRNSDKLIARKKDWDPKKYGGFDSPTVAYSVLVVAKVEKGKSKKLKSVKELLGITIMERSSFEKNPIDFLEAKGYKEVKKDLIIKLPKYSLFELENGRKRMLASAGELQKGNELALPSKYVNFLYLASHYEKLKGSPEDNEQKQLFVEQHKHYLDEIIEQISEFSKRVILADANLDKVLSAYNKHRDKPIREQAENIIHLFTLTNLGAPAAFKYFDTTIDRKRYTSTKEVLDATLIHQSITGLYETRIDLSQLGGDGGGGGGSGGGGSGGMDPLQLLQPLEAEIKGTKLKAHWNSGATITCVPQAFLEEEVPIKNIWIKTIHGEKEQPVYYLTFKIQGRKVEAEVISSPYDYILVSPSDIPWLMKKPLQLTTLVPLQEYEERLLKQTMLTGSYKEKLQSLFLKYDALWQHWENQVGHRRIKPHHIATGTVNPRPQKQYPINPKAKASIQTVINDLLKQGVLIQQNSIMNTPVYPVPKPDGKWRMVLDYREVNKTIPLIAAQNQHSAGILSSIFRGKYKTTLDLSNGFWAHSITPESYWLTAFTWLGQQYCWTRLPQGFLNSPALFTADVVDLLKEVPNVQVYVDDIYISHDDPREHLEQLEKVFSLLLNAGYVVSLKKSEIAQHEVEFLGFNITKEGRGLTETFKQKLLNITPPRDLKQLQSILGLLNFARNFIPNFSELVKPLYNIIATANGKYITWTTDNSQQLQNIISMLNSAENLEERNPEVRLIMKVNTSPSAGYIRFYNEFAKRPIMYLNYVYTKAEVKFTNTEKLLTTIHKGLIKALDLGMGQEILVYSPIVSMTKIQKTPLPERKALPIRWITWMSYLEDPRIQFHYDKTLPELQQVPTVTDDIIAKIKHPSEFSMVFYTDGSAIKHPNVNKSHNAGMGIAQVQFKPEFTVINTWSIPLGDHTAQLAEVAAVEFACKKALKIDGPVLIVTDSFYVAESVNKELPYWQSNGFFNNKKKPLKHVSKWKSIADCIQLKPDIIIIHEKGHQPTASTFHTEGNNLADKLATQGSYVVNAGKRTADGSEFEKRTADGSEFESPKKKAKVE

SEQ ID NO: 520 - protein, 2172 aa, synthetic construct
MPAAKRVKLDGGDKKYSIGLDIGTNSVGWAVITDEYKVPSKKFKVLGNTDRHSIKKNLIGALLFDSGETAEATRLKRTARRRYTRRKNRICYLQEIFSNEMAKVDDSFFHRLEESFLVEEDKKHERHPIFGNIVDEVAYHEKYPTIYHLRKKLVDSTDKADLRLIYLALAHMIKFRGHFLIEGDLNPDNSDVDKLFIQLVQTYNQLFEENPINASGVDAKAILSARLSKSRRLENLIAQLPGEKKNGLFGNLIALSLGLTPNFKSNFDLAEDAKLQLSKDTYDDDLDNLLAQIGDQYADLFLAAKNLSDAILLSDILRVNTEITKAPLSASMIKRYDEHHQDLTLLKALVRQQLPEKYKEIFFDQSKNGYAGYIDGGASQEEFYKFIKPILEKMDGTEELLVKLNREDLLRKQRTFDNGSIPHQIHLGELHAILRRQEDFYPFLKDNREKIEKILTFRIPYYVGPLARGNSRFAWMTRKSEETITPWNFEEVVDKGASAQSFIERMTNFDKNLPNEKVLPKHSLLYEYFTVYNELTKVKYVTEGMRKPAFLSGEQKKAIVDLLFKTNRKVTVKQLKEDYFKKIECFDSVEISGVEDRFNASLGTYHDLLKIIKDKDFLDNEENEDILEDIVLTLTLFEDREMIEERLKTYAHLFDDKVMKQLKRRRYTGWGRLSRKLINGIRDKQSGKTILDFLKSDGFANRNFMQLIHDDSLTFKEDIQKAQVSGQGDSLHEHIANLAGSPAIKKGILQTVKVVDELVKVMGRHKPENIVIEMARENQTTQKGQKNSRERMKRIEEGIKELGSQILKEHPVENTQLQNEKLYLYYLQNGRDMYVDQELDINRLSDYDVDHIVPQSFLKDDSIDNKVLTRSDKARGKSDNVPSEEVVKKMKNYWRQLLNAKLITQRKFDNLTKAERGGLSELDKAGFIKRQLVETRQITKHVAQILDSRMNTKYDENDKLIREVKVITLKSKLVSDFRKDFQFYKVREINNYHHAHDAYLNAVVGTALIKKYPKLESEFVYGDYKVYDVRKMIAKSEQEIGKATAKYFFYSNIMNFFKTEITLANGEIRKRPLIETNGETGEIVWDKGRDFATVRKVLSMPQVNIVKKTEVQTGGFSKESILPKRNSDKLIARKKDWDPKKYGGFDSPTVAYSVLVVAKVEKGKSKKLKSVKELLGITIMERSSFEKNPIDFLEAKGYKEVKKDLIIKLPKYSLFELENGRKRMLASAGELQKGNELALPSKYVNFLYLASHYEKLKGSPEDNEQKQLFVEQHKHYLDEIIEQISEFSKRVILADANLDKVLSAYNKHRDKPIREQAENIIHLFTLTNLGAPAAFKYFDTTIDRKRYTSTKEVLDATLIHQSITGLYETRIDLSQLGGDGGPAPAPAPGGMDPLQLLQPLEAEIKGTKLKAHWNSGATITCVPQAFLEEEVPIKNIWIKTIHGEKEQPVYYLTFKIQGRKVEAEVISSPYDYILVSPSDIPWLMKKPLQLTTLVPLQEYEERLLKQTMLTGSYKEKLQSLFLKYDALWQHWENQVGHRRIKPHHIATGTVNPRPQKQYPINPKAKASIQTVINDLLKQGVLIQQNSIMNTPVYPVPKPDGKWRMVLDYREVNKTIPLIAAQNQHSAGILSSIFRGKYKTTLDLSNGFWAHSITPESYWLTAFTWLGQQYCWTRLPQGFLNSPALFTADVVDLLKEVPNVQVYVDDIYISHDDPREHLEQLEKVFSLLLNAGYVVSLKKSEIAQHEVEFLGFNITKEGRGLTETFKQKLLNITPPRDLKQLQSILGLLNFARNFIPNFSELVKPLYNIIATANGKYITWTTDNSQQLQNIISMLNSAENLEERNPEVRLIMKVNTSPSAGYIRFYNEFAKRPIMYLNYVYTKAEVKFTNTEKLLTTIHKGLIKALDLGMGQEILVYSPIVSMTKIQKTPLPERKALPIRWITWMSYLEDPRIQFHYDKTLPELQQVPTVTDDIIAKIKHPSEFSMVFYTDGSAIKHPNVNKSHNAGMGIAQVQFKPEFTVINTWSIPLGDHTAQLAEVAAVEFACKKALKIDGPVLIVTDSFYVAESVNKELPYWQSNGFFNNKKKPLKHVSKWKSIADCIQLKPDIIIIHEKGHQPTASTFHTEGNNLADKLATQGSYVVNAGKRTADGSEFEKRTADGSEFESPKKKAKVE

SEQ ID NO: 521 - protein, 2174 aa, synthetic construct
MPAAKRVKLDGGDKKYSIGLDIGTNSVGWAVITDEYKVPSKKFKVLGNTDRHSIKKNLIGALLFDSGETAEATRLKRTARRRYTRRKNRICYLQEIFSNEMAKVDDSFFHRLEESFLVEEDKKHERHPIFGNIVDEVAYHEKYPTIYHLRKKLVDSTDKADLRLIYLALAHMIKFRGHFLIEGDLNPDNSDVDKLFIQLVQTYNQLFEENPINASGVDAKAILSARLSKSRRLENLIAQLPGEKKNGLFGNLIALSLGLTPNFKSNFDLAEDAKLQLSKDTYDDDLDNLLAQIGDQYADLFLAAKNLSDAILLSDILRVNTEITKAPLSASMIKRYDEHHQDLTLLKALVRQQLPEKYKEIFFDQSKNGYAGYIDGGASQEEFYKFIKPILEKMDGTEELLVKLNREDLLRKQRTFDNGSIPHQIHLGELHAILRRQEDFYPFLKDNREKIEKILTFRIPYYVGPLARGNSRFAWMTRKSEETITPWNFEEVVDKGASAQSFIERMTNFDKNLPNEKVLPKHSLLYEYFTVYNELTKVKYVTEGMRKPAFLSGEQKKAIVDLLFKTNRKVTVKQLKEDYFKKIECFDSVEISGVEDRFNASLGTYHDLLKIIKDKDFLDNEENEDILEDIVLTLTLFEDREMIEERLKTYAHLFDDKVMKQLKRRRYTGWGRLSRKLINGIRDKQSGKTILDFLKSDGFANRNFMQLIHDDSLTFKEDIQKAQVSGQGDSLHEHIANLAGSPAIKKGILQTVKVVDELVKVMGRHKPENIVIEMARENQTTQKGQKNSRERMKRIEEGIKELGSQILKEHPVENTQLQNEKLYLYYLQNGRDMYVDQELDINRLSDYDVDHIVPQSFLKDDSIDNKVLTRSDKARGKSDNVPSEEVVKKMKNYWRQLLNAKLITQRKFDNLTKAERGGLSELDKAGFIKRQLVETRQITKHVAQILDSRMNTKYDENDKLIREVKVITLKSKLVSDFRKDFQFYKVREINNYHHAHDAYLNAVVGTALIKKYPKLESEFVYGDYKVYDVRKMIAKSEQEIGKATAKYFFYSNIMNFFKTEITLANGEIRKRPLIETNGETGEIVWDKGRDFATVRKVLSMPQVNIVKKTEVQTGGFSKESILPKRNSDKLIARKKDWDPKKYGGFDSPTVAYSVLVVAKVEKGKSKKLKSVKELLGITIMERSSFEKNPIDFLEAKGYKEVKKDLIIKLPKYSLFELENGRKRMLASAGELQKGNELALPSKYVNFLYLASHYEKLKGSPEDNEQKQLFVEQHKHYLDEIIEQISEFSKRVILADANLDKVLSAYNKHRDKPIREQAENIIHLFTLTNLGAPAAFKYFDTTIDRKRYTSTKEVLDATLIHQSITGLYETRIDLSQLGGDGGGSSGGSGGGGGMDPLQLLQPLEAEIKGTKLKAHWNSGATITCVPQAFLEEEVPIKNIWIKTIHGEKEQPVYYLTFKIQGRKVEAEVISSPYDYILVSPSDIPWLMKKPLQLTTLVPLQEYEERLLKQTMLTGSYKEKLQSLFLKYDALWQHWENQVGHRRIKPHHIATGTVNPRPQKQYPINPKAKASIQTVINDLLKQGVLIQQNSIMNTPVYPVPKPDGKWRMVLDYREVNKTIPLIAAQNQHSAGILSSIFRGKYKTTLDLSNGFWAHSITPESYWLTAFTWLGQQYCWTRLPQGFLNSPALFTADVVDLLKEVPNVQVYVDDIYISHDDPREHLEQLEKVFSLLLNAGYVVSLKKSEIAQHEVEFLGFNITKEGRGLTETFKQKLLNITPPRDLKQLQSILGLLNFARNFIPNFSELVKPLYNIIATANGKYITWTTDNSQQLQNIISMLNSAENLEERNPEVRLIMKVNTSPSAGYIRFYNEFAKRPIMYLNYVYTKAEVKFTNTEKLLTTIHKGLIKALDLGMGQEILVYSPIVSMTKIQKTPLPERKALPIRWITWMSYLEDPRIQFHYDKTLPELQQVPTVTDDIIAKIKHPSEFSMVFYTDGSAIKHPNVNKSHNAGMGIAQVQFKPEFTVINTWSIPLGDHTAQLAEVAAVEFACKKALKIDGPVLIVTDSFYVAESVNKELPYWQSNGFFNNKKKPLKHVSKWKSIADCIQLKPDIIIIHEKGHQPTASTFHTEGNNLADKLATQGSYVVNAGKRTADGSEFEKRTADGSEFESPKKKAKVE

SEQ ID NO: 522 - protein, 2010 aa, synthetic construct
MPAAKRVKLDGGDKKYSIGLDIGTNSVGWAVITDEYKVPSKKFKVLGNTDRHSIKKNLIGALLFDSGETAEATRLKRTARRRYTRRKNRICYLQEIFSNEMAKVDDSFFHRLEESFLVEEDKKHERHPIFGNIVDEVAYHEKYPTIYHLRKKLVDSTDKADLRLIYLALAHMIKFRGHFLIEGDLNPDNSDVDKLFIQLVQTYNQLFEENPINASGVDAKAILSARLSKSRRLENLIAQLPGEKKNGLFGNLIALSLGLTPNFKSNFDLAEDAKLQLSKDTYDDDLDNLLAQIGDQYADLFLAAKNLSDAILLSDILRVNTEITKAPLSASMIKRYDEHHQDLTLLKALVRQQLPEKYKEIFFDQSKNGYAGYIDGGASQEEFYKFIKPILEKMDGTEELLVKLNREDLLRKQRTFDNGSIPHQIHLGELHAILRRQEDFYPFLKDNREKIEKILTFRIPYYVGPLARGNSRFAWMTRKSEETITPWNFEEVVDKGASAQSFIERMTNFDKNLPNEKVLPKHSLLYEYFTVYNELTKVKYVTEGMRKPAFLSGEQKKAIVDLLFKTNRKVTVKQLKEDYFKKIECFDSVEISGVEDRFNASLGTYHDLLKIIKDKDFLDNEENEDILEDIVLTLTLFEDREMIEERLKTYAHLFDDKVMKQLKRRRYTGWGRLSRKLINGIRDKQSGKTILDFLKSDGFANRNFMQLIHDDSLTFKEDIQKAQVSGQGDSLHEHIANLAGSPAIKKGILQTVKVVDELVKVMGRHKPENIVIEMARENQTTQKGQKNSRERMKRIEEGIKELGSQILKEHPVENTQLQNEKLYLYYLQNGRDMYVDQELDINRLSDYDVDHIVPQSFLKDDSIDNKVLTRSDKARGKSDNVPSEEVVKKMKNYWRQLLNAKLITQRKFDNLTKAERGGLSELDKAGFIKRQLVETRQITKHVAQILDSRMNTKYDENDKLIREVKVITLKSKLVSDFRKDFQFYKVREINNYHHAHDAYLNAVVGTALIKKYPKLESEFVYGDYKVYDVRKMIAKSEQEIGKATAKYFFYSNIMNFFKTEITLANGEIRKRPLIETNGETGEIVWDKGRDFATVRKVLSMPQVNIVKKTEVQTGGFSKESILPKRNSDKLIARKKDWDPKKYGGFDSPTVAYSVLVVAKVEKGKSKKLKSVKELLGITIMERSSFEKNPIDFLEAKGYKEVKKDLIIKLPKYSLFELENGRKRMLASAGELQKGNELALPSKYVNFLYLASHYEKLKGSPEDNEQKQLFVEQHKHYLDEIIEQISEFSKRVILADANLDKVLSAYNKHRDKPIREQAENIIHLFTLTNLGAPAAFKYFDTTIDRKRYTSTKEVLDATLIHQSITGLYETRIDLSQLGGDGGGGGGSGGGGSGGGGSGGGGSGGGVLDTPPSHIGLEHLPPPPEVPQFPLNLERLQALQDLVHRSLEAGYISPWDGPGNNPVFPVRKPNGAWRFVHDLRATNALTKPIPALSPGPPDLTAPPTHPPHIICLDLKDAFFQIPVEDRFRFYLSFTLPSPGGLQPHRRFAWRVLPQGFINSPALFQRALQEPLRQVSAAFSQSLLVSYMDDILYASPTEEQRSQCYQALAARLRDLGFQVASEKTSQTPSPVPFLGQMVHEQIVTYQSLPTLQISSPISLHQLQAVLGDLQWVSRGTPTTRRPLQLLYSSLKRHHDPRAIIQLSPEQLQGIAELRQALSHNARSRYNEQEPLLAYVHLTRAGSTLVLFQKGAQFPLAYFQTPLTDNQASPWGLLLLLGCQYLQTQALSSYAKPILKYYHNLPKTSLDNWIQSSEDPRVQELLQLWPQISSQGIQPPGPWKTLITRAEVFLTPQFSPDPIPAALCLFSDGATGRGAYCLWKDHLLDFQAVPAPESAQKGELAGLLAGLAAAPPEPVNIWVDSKYLYSLLRTWVLGAWLQPDPVPSYALLYKSLLRHPAIVVGHVRSHSSASHPIASLNNYVDQLAGKRTADGSEFEKRTADGSEFESPKKKAKVE

SEQ ID NO: 523 - protein, 1995 aa, synthetic construct
MPAAKRVKLDGGDKKYSIGLDIGTNSVGWAVITDEYKVPSKKFKVLGNTDRHSIKKNLIGALLFDSGETAEATRLKRTARRRYTRRKNRICYLQEIFSNEMAKVDDSFFHRLEESFLVEEDKKHERHPIFGNIVDEVAYHEKYPTIYHLRKKLVDSTDKADLRLIYLALAHMIKFRGHFLIEGDLNPDNSDVDKLFIQLVQTYNQLFEENPINASGVDAKAILSARLSKSRRLENLIAQLPGEKKNGLFGNLIALSLGLTPNFKSNFDLAEDAKLQLSKDTYDDDLDNLLAQIGDQYADLFLAAKNLSDAILLSDILRVNTEITKAPLSASMIKRYDEHHQDLTLLKALVRQQLPEKYKEIFFDQSKNGYAGYIDGGASQEEFYKFIKPILEKMDGTEELLVKLNREDLLRKQRTFDNGSIPHQIHLGELHAILRRQEDFYPFLKDNREKIEKILTFRIPYYVGPLARGNSRFAWMTRKSEETITPWNFEEVVDKGASAQSFIERMTNFDKNLPNEKVLPKHSLLYEYFTVYNELTKVKYVTEGMRKPAFLSGEQKKAIVDLLFKTNRKVTVKQLKEDYFKKIECFDSVEISGVEDRFNASLGTYHDLLKIIKDKDFLDNEENEDILEDIVLTLTLFEDREMIEERLKTYAHLFDDKVMKQLKRRRYTGWGRLSRKLINGIRDKQSGKTILDFLKSDGFANRNFMQLIHDDSLTFKEDIQKAQVSGQGDSLHEHIANLAGSPAIKKGILQTVKVVDELVKVMGRHKPENIVIEMARENQTTQKGQKNSRERMKRIEEGIKELGSQILKEHPVENTQLQNEKLYLYYLQNGRDMYVDQELDINRLSDYDVDHIVPQSFLKDDSIDNKVLTRSDKARGKSDNVPSEEVVKKMKNYWRQLLNAKLITQRKFDNLTKAERGGLSELDKAGFIKRQLVETRQITKHVAQILDSRMNTKYDENDKLIREVKVITLKSKLVSDFRKDFQFYKVREINNYHHAHDAYLNAVVGTALIKKYPKLESEFVYGDYKVYDVRKMIAKSEQEIGKATAKYFFYSNIMNFFKTEITLANGEIRKRPLIETNGETGEIVWDKGRDFATVRKVLSMPQVNIVKKTEVQTGGFSKESILPKRNSDKLIARKKDWDPKKYGGFDSPTVAYSVLVVAKVEKGKSKKLKSVKELLGITIMERSSFEKNPIDFLEAKGYKEVKKDLIIKLPKYSLFELENGRKRMLASAGELQKGNELALPSKYVNFLYLASHYEKLKGSPEDNEQKQLFVEQHKHYLDEIIEQISEFSKRVILADANLDKVLSAYNKHRDKPIREQAENIIHLFTLTNLGAPAAFKYFDTTIDRKRYTSTKEVLDATLIHQSITGLYETRIDLSQLGGDGGGGGGGGGGVLDTPPSHIGLEHLPPPPEVPQFPLNLERLQALQDLVHRSLEAGYISPWDGPGNNPVFPVRKPNGAWRFVHDLRATNALTKPIPALSPGPPDLTAPPTHPPHIICLDLKDAFFQIPVEDRFRFYLSFTLPSPGGLQPHRRFAWRVLPQGFINSPALFQRALQEPLRQVSAAFSQSLLVSYMDDILYASPTEEQRSQCYQALAARLRDLGFQVASEKTSQTPSPVPFLGQMVHEQIVTYQSLPTLQISSPISLHQLQAVLGDLQWVSRGTPTTRRPLQLLYSSLKRHHDPRAIIQLSPEQLQGIAELRQALSHNARSRYNEQEPLLAYVHLTRAGSTLVLFQKGAQFPLAYFQTPLTDNQASPWGLLLLLGCQYLQTQALSSYAKPILKYYHNLPKTSLDNWIQSSEDPRVQELLQLWPQISSQGIQPPGPWKTLITRAEVFLTPQFSPDPIPAALCLFSDGATGRGAYCLWKDHLLDFQAVPAPESAQKGELAGLLAGLAAAPPEPVNIWVDSKYLYSLLRTWVLGAWLQPDPVPSYALLYKSLLRHPAIVVGHVRSHSSASHPIASLNNYVDQLAGKRTADGSEFEKRTADGSEFESPKKKAKVE

SEQ ID NO: 524 - protein, 2122 aa, synthetic construct
MPAAKRVKLDGGDKKYSIGLDIGTNSVGWAVITDEYKVPSKKFKVLGNTDRHSIKKNLIGALLFDSGETAEATRLKRTARRRYTRRKNRICYLQEIFSNEMAKVDDSFFHRLEESFLVEEDKKHERHPIFGNIVDEVAYHEKYPTIYHLRKKLVDSTDKADLRLIYLALAHMIKFRGHFLIEGDLNPDNSDVDKLFIQLVQTYNQLFEENPINASGVDAKAILSARLSKSRRLENLIAQLPGEKKNGLFGNLIALSLGLTPNFKSNFDLAEDAKLQLSKDTYDDDLDNLLAQIGDQYADLFLAAKNLSDAILLSDILRVNTEITKAPLSASMIKRYDEHHQDLTLLKALVRQQLPEKYKEIFFDQSKNGYAGYIDGGASQEEFYKFIKPILEKMDGTEELLVKLNREDLLRKQRTFDNGSIPHQIHLGELHAILRRQEDFYPFLKDNREKIEKILTFRIPYYVGPLARGNSRFAWMTRKSEETITPWNFEEVVDKGASAQSFIERMTNFDKNLPNEKVLPKHSLLYEYFTVYNELTKVKYVTEGMRKPAFLSGEQKKAIVDLLFKTNRKVTVKQLKEDYFKKIECFDSVEISGVEDRFNASLGTYHDLLKIIKDKDFLDNEENEDILEDIVLTLTLFEDREMIEERLKTYAHLFDDKVMKQLKRRRYTGWGRLSRKLINGIRDKQSGKTILDFLKSDGFANRNFMQLIHDDSLTFKEDIQKAQVSGQGDSLHEHIANLAGSPAIKKGILQTVKVVDELVKVMGRHKPENIVIEMARENQTTQKGQKNSRERMKRIEEGIKELGSQILKEHPVENTQLQNEKLYLYYLQNGRDMYVDQELDINRLSDYDVDHIVPQSFLKDDSIDNKVLTRSDKARGKSDNVPSEEVVKKMKNYWRQLLNAKLITQRKFDNLTKAERGGLSELDKAGFIKRQLVETRQITKHVAQILDSRMNTKYDENDKLIREVKVITLKSKLVSDFRKDFQFYKVREINNYHHAHDAYLNAVVGTALIKKYPKLESEFVYGDYKVYDVRKMIAKSEQEIGKATAKYFFYSNIMNFFKTEITLANGEIRKRPLIETNGETGEIVWDKGRDFATVRKVLSMPQVNIVKKTEVQTGGFSKESILPKRNSDKLIARKKDWDPKKYGGFDSPTVAYSVLVVAKVEKGKSKKLKSVKELLGITIMERSSFEKNPIDFLEAKGYKEVKKDLIIKLPKYSLFELENGRKRMLASAGELQKGNELALPSKYVNFLYLASHYEKLKGSPEDNEQKQLFVEQHKHYLDEIIEQISEFSKRVILADANLDKVLSAYNKHRDKPIREQAENIIHLFTLTNLGAPAAFKYFDTTIDRKRYTSTKEVLDATLIHQSITGLYETRIDLSQLGGDGGAEAAAKEAAAKEAAAKEAAAKALEAEAAAKEAAAKEAAAKEAAAKAGGIPWLMKKPLQLTTLVPLQEYEERLLKQTMLTGSYKEKLQSLFLKYDALWQHWENQVGHRRIKPHHIATGTVNPRPQKQYPINPKAKASIQTVINDLLKQGVLIQQNSIMNTPVYPVPKPDGKWRMVLDYREVNKTIPLIAAQNQHSAGILSSIFRGKYKTTLDLSNGFWAHSITPESYWLTAFTWLGQQYCWTRLPQGFLNSPALFTADVVDLLKEVPNVQVYVDDIYISHDDPREHLEQLEKVFSLLLNAGYVVSLKKSEIAQHEVEFLGFNITKEGRGLTETFKQKLLNITPPRDLKQLQSILGLLNFARNFIPNFSELVKPLYNIIATANGKYITWTTDNSQQLQNIISMLNSAENLEERNPEVRLIMKVNTSPSAGYIRFYNEFAKRPIMYLNYVYTKAEVKFTNTEKLLTTIHKGLIKALDLGMGQEILVYSPIVSMTKIQKTPLPERKALPIRWITWMSYLEDPRIQFHYDKTLPELQQVPTVTDDIIAKIKHPSEFSMVFYTDGSAIKHPNVNKSHNAGMGIAQVQFKPEFTVINTWSIPLGDHTAQLAEVAAVEFACKKALKIDGPVLIVTDSFYVAESVNKELPYWQSNGFFNNKKKPLKHVSKWKSIADCIQLKPDIIIIHEKGHQPTASTFHTEGNNLADKLATQGSYVVNAGKRTADGSEFEKRTADGSEFESPKKKAKVE

SEQ ID NO: 525 - protein, 2096 aa, synthetic construct
MPAAKRVKLDGGDKKYSIGLDIGTNSVGWAVITDEYKVPSKKFKVLGNTDRHSIKKNLIGALLFDSGETAEATRLKRTARRRYTRRKNRICYLQEIFSNEMAKVDDSFFHRLEESFLVEEDKKHERHPIFGNIVDEVAYHEKYPTIYHLRKKLVDSTDKADLRLIYLALAHMIKFRGHFLIEGDLNPDNSDVDKLFIQLVQTYNQLFEENPINASGVDAKAILSARLSKSRRLENLIAQLPGEKKNGLFGNLIALSLGLTPNFKSNFDLAEDAKLQLSKDTYDDDLDNLLAQIGDQYADLFLAAKNLSDAILLSDILRVNTEITKAPLSASMIKRYDEHHQDLTLLKALVRQQLPEKYKEIFFDQSKNGYAGYIDGGASQEEFYKFIKPILEKMDGTEELLVKLNREDLLRKQRTFDNGSIPHQIHLGELHAILRRQEDFYPFLKDNREKIEKILTFRIPYYVGPLARGNSRFAWMTRKSEETITPWNFEEVVDKGASAQSFIERMTNFDKNLPNEKVLPKHSLLYEYFTVYNELTKVKYVTEGMRKPAFLSGEQKKAIVDLLFKTNRKVTVKQLKEDYFKKIECFDSVEISGVEDRFNASLGTYHDLLKIIKDKDFLDNEENEDILEDIVLTLTLFEDREMIEERLKTYAHLFDDKVMKQLKRRRYTGWGRLSRKLINGIRDKQSGKTILDFLKSDGFANRNFMQLIHDDSLTFKEDIQKAQVSGQGDSLHEHIANLAGSPAIKKGILQTVKVVDELVKVMGRHKPENIVIEMARENQTTQKGQKNSRERMKRIEEGIKELGSQILKEHPVENTQLQNEKLYLYYLQNGRDMYVDQELDINRLSDYDVDHIVPQSFLKDDSIDNKVLTRSDKARGKSDNVPSEEVVKKMKNYWRQLLNAKLITQRKFDNLTKAERGGLSELDKAGFIKRQLVETRQITKHVAQILDSRMNTKYDENDKLIREVKVITLKSKLVSDFRKDFQFYKVREINNYHHAHDAYLNAVVGTALIKKYPKLESEFVYGDYKVYDVRKMIAKSEQEIGKATAKYFFYSNIMNFFKTEITLANGEIRKRPLIETNGETGEIVWDKGRDFATVRKVLSMPQVNIVKKTEVQTGGFSKESILPKRNSDKLIARKKDWDPKKYGGFDSPTVAYSVLVVAKVEKGKSKKLKSVKELLGITIMERSSFEKNPIDFLEAKGYKEVKKDLIIKLPKYSLFELENGRKRMLASAGELQKGNELALPSKYVNFLYLASHYEKLKGSPEDNEQKQLFVEQHKHYLDEIIEQISEFSKRVILADANLDKVLSAYNKHRDKPIREQAENIIHLFTLTNLGAPAAFKYFDTTIDRKRYTSTKEVLDATLIHQSITGLYETRIDLSQLGGDGGEAAAKEAAAKEAAAKEAAAKGGIPWLMKKPLQLTTLVPLQEYEERLLKQTMLTGSYKEKLQSLFLKYDALWQHWENQVGHRRIKPHHIATGTVNPRPQKQYPINPKAKASIQTVINDLLKQGVLIQQNSIMNTPVYPVPKPDGKWRMVLDYREVNKTIPLIAAQNQHSAGILSSIFRGKYKTTLDLSNGFWAHSITPESYWLTAFTWLGQQYCWTRLPQGFLNSPALFTADVVDLLKEVPNVQVYVDDIYISHDDPREHLEQLEKVFSLLLNAGYVVSLKKSEIAQHEVEFLGFNITKEGRGLTETFKQKLLNITPPRDLKQLQSILGLLNFARNFIPNFSELVKPLYNIIATANGKYITWTTDNSQQLQNIISMLNSAENLEERNPEVRLIMKVNTSPSAGYIRFYNEFAKRPIMYLNYVYTKAEVKFTNTEKLLTTIHKGLIKALDLGMGQEILVYSPIVSMTKIQKTPLPERKALPIRWITWMSYLEDPRIQFHYDKTLPELQQVPTVTDDIIAKIKHPSEFSMVFYTDGSAIKHPNVNKSHNAGMGIAQVQFKPEFTVINTWSIPLGDHTAQLAEVAAVEFACKKALKIDGPVLIVTDSFYVAESVNKELPYWQSNGFFNNKKKPLKHVSKWKSIADCIQLKPDIIIIHEKGHQPTASTFHTEGNNLADKLATQGSYVVNAGKRTADGSEFEKRTADGSEFESPKKKAKVE

SEQ ID NO: 526 - protein, 2087 aa, synthetic construct
MPAAKRVKLDGGDKKYSIGLDIGTNSVGWAVITDEYKVPSKKFKVLGNTDRHSIKKNLIGALLFDSGETAEATRLKRTARRRYTRRKNRICYLQEIFSNEMAKVDDSFFHRLEESFLVEEDKKHERHPIFGNIVDEVAYHEKYPTIYHLRKKLVDSTDKADLRLIYLALAHMIKFRGHFLIEGDLNPDNSDVDKLFIQLVQTYNQLFEENPINASGVDAKAILSARLSKSRRLENLIAQLPGEKKNGLFGNLIALSLGLTPNFKSNFDLAEDAKLQLSKDTYDDDLDNLLAQIGDQYADLFLAAKNLSDAILLSDILRVNTEITKAPLSASMIKRYDEHHQDLTLLKALVRQQLPEKYKEIFFDQSKNGYAGYIDGGASQEEFYKFIKPILEKMDGTEELLVKLNREDLLRKQRTFDNGSIPHQIHLGELHAILRRQEDFYPFLKDNREKIEKILTFRIPYYVGPLARGNSRFAWMTRKSEETITPWNFEEVVDKGASAQSFIERMTNFDKNLPNEKVLPKHSLLYEYFTVYNELTKVKYVTEGMRKPAFLSGEQKKAIVDLLFKTNRKVTVKQLKEDYFKKIECFDSVEISGVEDRFNASLGTYHDLLKIIKDKDFLDNEENEDILEDIVLTLTLFEDREMIEERLKTYAHLFDDKVMKQLKRRRYTGWGRLSRKLINGIRDKQSGKTILDFLKSDGFANRNFMQLIHDDSLTFKEDIQKAQVSGQGDSLHEHIANLAGSPAIKKGILQTVKVVDELVKVMGRHKPENIVIEMARENQTTQKGQKNSRERMKRIEEGIKELGSQILKEHPVENTQLQNEKLYLYYLQNGRDMYVDQELDINRLSDYDVDHIVPQSFLKDDSIDNKVLTRSDKARGKSDNVPSEEVVKKMKNYWRQLLNAKLITQRKFDNLTKAERGGLSELDKAGFIKRQLVETRQITKHVAQILDSRMNTKYDENDKLIREVKVITLKSKLVSDFRKDFQFYKVREINNYHHAHDAYLNAVVGTALIKKYPKLESEFVYGDYKVYDVRKMIAKSEQEIGKATAKYFFYSNIMNFFKTEITLANGEIRKRPLIETNGETGEIVWDKGRDFATVRKVLSMPQVNIVKKTEVQTGGFSKESILPKRNSDKLIARKKDWDPKKYGGFDSPTVAYSVLVVAKVEKGKSKKLKSVKELLGITIMERSSFEKNPIDFLEAKGYKEVKKDLIIKLPKYSLFELENGRKRMLASAGELQKGNELALPSKYVNFLYLASHYEKLKGSPEDNEQKQLFVEQHKHYLDEIIEQISEFSKRVILADANLDKVLSAYNKHRDKPIREQAENIIHLFTLTNLGAPAAFKYFDTTIDRKRYTSTKEVLDATLIHQSITGLYETRIDLSQLGGDGGGGSEAAAKPAPGGIPWLMKKPLQLTTLVPLQEYEERLLKQTMLTGSYKEKLQSLFLKYDALWQHWENQVGHRRIKPHHIATGTVNPRPQKQYPINPKAKASIQTVINDLLKQGVLIQQNSIMNTPVYPVPKPDGKWRMVLDYREVNKTIPLIAAQNQHSAGILSSIFRGKYKTTLDLSNGFWAHSITPESYWLTAFTWLGQQYCWTRLPQGFLNSPALFTADVVDLLKEVPNVQVYVDDIYISHDDPREHLEQLEKVFSLLLNAGYVVSLKKSEIAQHEVEFLGFNITKEGRGLTETFKQKLLNITPPRDLKQLQSILGLLNFARNFIPNFSELVKPLYNIIATANGKYITWTTDNSQQLQNIISMLNSAENLEERNPEVRLIMKVNTSPSAGYIRFYNEFAKRPIMYLNYVYTKAEVKFTNTEKLLTTIHKGLIKALDLGMGQEILVYSPIVSMTKIQKTPLPERKALPIRWITWMSYLEDPRIQFHYDKTLPELQQVPTVTDDIIAKIKHPSEFSMVFYTDGSAIKHPNVNKSHNAGMGIAQVQFKPEFTVINTWSIPLGDHTAQLAEVAAVEFACKKALKIDGPVLIVTDSFYVAESVNKELPYWQSNGFFNNKKKPLKHVSKWKSIADCIQLKPDIIIIHEKGHQPTASTFHTEGNNLADKLATQGSYVVNAGKRTADGSEFEKRTADGSEFESPKKKAKVE

SEQ ID NO: 527 - protein, 2109 aa, synthetic construct
MPAAKRVKLDGGDKKYSIGLDIGTNSVGWAVITDEYKVPSKKFKVLGNTDRHSIKKNLIGALLFDSGETAEATRLKRTARRRYTRRKNRICYLQEIFSNEMAKVDDSFFHRLEESFLVEEDKKHERHPIFGNIVDEVAYHEKYPTIYHLRKKLVDSTDKADLRLIYLALAHMIKFRGHFLIEGDLNPDNSDVDKLFIQLVQTYNQLFEENPINASGVDAKAILSARLSKSRRLENLIAQLPGEKKNGLFGNLIALSLGLTPNFKSNFDLAEDAKLQLSKDTYDDDLDNLLAQIGDQYADLFLAAKNLSDAILLSDILRVNTEITKAPLSASMIKRYDEHHQDLTLLKALVRQQLPEKYKEIFFDQSKNGYAGYIDGGASQEEFYKFIKPILEKMDGTEELLVKLNREDLLRKQRTFDNGSIPHQIHLGELHAILRRQEDFYPFLKDNREKIEKILTFRIPYYVGPLARGNSRFAWMTRKSEETITPWNFEEVVDKGASAQSFIERMTNFDKNLPNEKVLPKHSLLYEYFTVYNELTKVKYVTEGMRKPAFLSGEQKKAIVDLLFKTNRKVTVKQLKEDYFKKIECFDSVEISGVEDRFNASLGTYHDLLKIIKDKDFLDNEENEDILEDIVLTLTLFEDREMIEERLKTYAHLFDDKVMKQLKRRRYTGWGRLSRKLINGIRDKQSGKTILDFLKSDGFANRNFMQLIHDDSLTFKEDIQKAQVSGQGDSLHEHIANLAGSPAIKKGILQTVKVVDELVKVMGRHKPENIVIEMARENQTTQKGQKNSRERMKRIEEGIKELGSQILKEHPVENTQLQNEKLYLYYLQNGRDMYVDQELDINRLSDYDVDHIVPQSFLKDDSIDNKVLTRSDKARGKSDNVPSEEVVKKMKNYWRQLLNAKLITQRKFDNLTKAERGGLSELDKAGFIKRQLVETRQITKHVAQILDSRMNTKYDENDKLIREVKVITLKSKLVSDFRKDFQFYKVREINNYHHAHDAYLNAVVGTALIKKYPKLESEFVYGDYKVYDVRKMIAKSEQEIGKATAKYFFYSNIMNFFKTEITLANGEIRKRPLIETNGETGEIVWDKGRDFATVRKVLSMPQVNIVKKTEVQTGGFSKESILPKRNSDKLIARKKDWDPKKYGGFDSPTVAYSVLVVAKVEKGKSKKLKSVKELLGITIMERSSFEKNPIDFLEAKGYKEVKKDLIIKLPKYSLFELENGRKRMLASAGELQKGNELALPSKYVNFLYLASHYEKLKGSPEDNEQKQLFVEQHKHYLDEIIEQISEFSKRVILADANLDKVLSAYNKHRDKPIREQAENIIHLFTLTNLGAPAAFKYFDTTIDRKRYTSTKEVLDATLIHQSITGLYETRIDLSQLGGDGGSGGSSGGSSGSETPGTSESATPESSGGSSGGSSGGIPWLMKKPLQLTTLVPLQEYEERLLKQTMLTGSYKEKLQSLFLKYDALWQHWENQVGHRRIKPHHIATGTVNPRPQKQYPINPKAKASIQTVINDLLKQGVLIQQNSIMNTPVYPVPKPDGKWRMVLDYREVNKTIPLIAAQNQHSAGILSSIFRGKYKTTLDLSNGFWAHSITPESYWLTAFTWLGQQYCWTRLPQGFLNSPALFTADVVDLLKEVPNVQVYVDDIYISHDDPREHLEQLEKVFSLLLNAGYVVSLKKSEIAQHEVEFLGFNITKEGRGLTETFKQKLLNITPPRDLKQLQSILGLLNFARNFIPNFSELVKPLYNIIATANGKYITWTTDNSQQLQNIISMLNSAENLEERNPEVRLIMKVNTSPSAGYIRFYNEFAKRPIMYLNYVYTKAEVKFTNTEKLLTTIHKGLIKALDLGMGQEILVYSPIVSMTKIQKTPLPERKALPIRWITWMSYLEDPRIQFHYDKTLPELQQVPTVTDDIIAKIKHPSEFSMVFYTDGSAIKHPNVNKSHNAGMGIAQVQFKPEFTVINTWSIPLGDHTAQLAEVAAVEFACKKALKIDGPVLIVTDSFYVAESVNKELPYWQSNGFFNNKKKPLKHVSKWKSIADCIQLKPDIIIIHEKGHQPTASTFHTEGNNLADKLATQGSYVVNAGKRTADGSEFEKRTADGSEFESPKKKAKVE

SEQ ID NO: 528 - protein, 2106 aa, synthetic construct
MPAAKRVKLDGGDKKYSIGLDIGTNSVGWAVITDEYKVPSKKFKVLGNTDRHSIKKNLIGALLFDSGETAEATRLKRTARRRYTRRKNRICYLQEIFSNEMAKVDDSFFHRLEESFLVEEDKKHERHPIFGNIVDEVAYHEKYPTIYHLRKKLVDSTDKADLRLIYLALAHMIKFRGHFLIEGDLNPDNSDVDKLFIQLVQTYNQLFEENPINASGVDAKAILSARLSKSRRLENLIAQLPGEKKNGLFGNLIALSLGLTPNFKSNFDLAEDAKLQLSKDTYDDDLDNLLAQIGDQYADLFLAAKNLSDAILLSDILRVNTEITKAPLSASMIKRYDEHHQDLTLLKALVRQQLPEKYKEIFFDQSKNGYAGYIDGGASQEEFYKFIKPILEKMDGTEELLVKLNREDLLRKQRTFDNGSIPHQIHLGELHAILRRQEDFYPFLKDNREKIEKILTFRIPYYVGPLARGNSRFAWMTRKSEETITPWNFEEVVDKGASAQSFIERMTNFDKNLPNEKVLPKHSLLYEYFTVYNELTKVKYVTEGMRKPAFLSGEQKKAIVDLLFKTNRKVTVKQLKEDYFKKIECFDSVEISGVEDRFNASLGTYHDLLKIIKDKDFLDNEENEDILEDIVLTLTLFEDREMIEERLKTYAHLFDDKVMKQLKRRRYTGWGRLSRKLINGIRDKQSGKTILDFLKSDGFANRNFMQLIHDDSLTFKEDIQKAQVSGQGDSLHEHIANLAGSPAIKKGILQTVKVVDELVKVMGRHKPENIVIEMARENQTTQKGQKNSRERMKRIEEGIKELGSQILKEHPVENTQLQNEKLYLYYLQNGRDMYVDQELDINRLSDYDVDHIVPQSFLKDDSIDNKVLTRSDKARGKSDNVPSEEVVKKMKNYWRQLLNAKLITQRKFDNLTKAERGGLSELDKAGFIKRQLVETRQITKHVAQILDSRMNTKYDENDKLIREVKVITLKSKLVSDFRKDFQFYKVREINNYHHAHDAYLNAVVGTALIKKYPKLESEFVYGDYKVYDVRKMIAKSEQEIGKATAKYFFYSNIMNFFKTEITLANGEIRKRPLIETNGETGEIVWDKGRDFATVRKVLSMPQVNIVKKTEVQTGGFSKESILPKRNSDKLIARKKDWDPKKYGGFDSPTVAYSVLVVAKVEKGKSKKLKSVKELLGITIMERSSFEKNPIDFLEAKGYKEVKKDLIIKLPKYSLFELENGRKRMLASAGELQKGNELALPSKYVNFLYLASHYEKLKGSPEDNEQKQLFVEQHKHYLDEIIEQISEFSKRVILADANLDKVLSAYNKHRDKPIREQAENIIHLFTLTNLGAPAAFKYFDTTIDRKRYTSTKEVLDATLIHQSITGLYETRIDLSQLGGDGGGGGGSGGGGSGGGGSGGGGSGGGGSGGGGSGGIPWLMKKPLQLTTLVPLQEYEERLLKQTMLTGSYKEKLQSLFLKYDALWQHWENQVGHRRIKPHHIATGTVNPRPQKQYPINPKAKASIQTVINDLLKQGVLIQQNSIMNTPVYPVPKPDGKWRMVLDYREVNKTIPLIAAQNQHSAGILSSIFRGKYKTTLDLSNGFWAHSITPESYWLTAFTWLGQQYCWTRLPQGFLNSPALFTADVVDLLKEVPNVQVYVDDIYISHDDPREHLEQLEKVFSLLLNAGYVVSLKKSEIAQHEVEFLGFNITKEGRGLTETFKQKLLNITPPRDLKQLQSILGLLNFARNFIPNFSELVKPLYNIIATANGKYITWTTDNSQQLQNIISMLNSAENLEERNPEVRLIMKVNTSPSAGYIRFYNEFAKRPIMYLNYVYTKAEVKFTNTEKLLTTIHKGLIKALDLGMGQEILVYSPIVSMTKIQKTPLPERKALPIRWITWMSYLEDPRIQFHYDKTLPELQQVPTVTDDIIAKIKHPSEFSMVFYTDGSAIKHPNVNKSHNAGMGIAQVQFKPEFTVINTWSIPLGDHTAQLAEVAAVEFACKKALKIDGPVLIVTDSFYVAESVNKELPYWQSNGFFNNKKKPLKHVSKWKSIADCIQLKPDIIIIHEKGHQPTASTFHTEGNNLADKLATQGSYVVNAGKRTADGSEFEKRTADGSEFESPKKKAKVE

SEQ ID NO: 529 - protein, 2082 aa, synthetic construct
MPAAKRVKLDGGDKKYSIGLDIGTNSVGWAVITDEYKVPSKKFKVLGNTDRHSIKKNLIGALLFDSGETAEATRLKRTARRRYTRRKNRICYLQEIFSNEMAKVDDSFFHRLEESFLVEEDKKHERHPIFGNIVDEVAYHEKYPTIYHLRKKLVDSTDKADLRLIYLALAHMIKFRGHFLIEGDLNPDNSDVDKLFIQLVQTYNQLFEENPINASGVDAKAILSARLSKSRRLENLIAQLPGEKKNGLFGNLIALSLGLTPNFKSNFDLAEDAKLQLSKDTYDDDLDNLLAQIGDQYADLFLAAKNLSDAILLSDILRVNTEITKAPLSASMIKRYDEHHQDLTLLKALVRQQLPEKYKEIFFDQSKNGYAGYIDGGASQEEFYKFIKPILEKMDGTEELLVKLNREDLLRKQRTFDNGSIPHQIHLGELHAILRRQEDFYPFLKDNREKIEKILTFRIPYYVGPLARGNSRFAWMTRKSEETITPWNFEEVVDKGASAQSFIERMTNFDKNLPNEKVLPKHSLLYEYFTVYNELTKVKYVTEGMRKPAFLSGEQKKAIVDLLFKTNRKVTVKQLKEDYFKKIECFDSVEISGVEDRFNASLGTYHDLLKIIKDKDFLDNEENEDILEDIVLTLTLFEDREMIEERLKTYAHLFDDKVMKQLKRRRYTGWGRLSRKLINGIRDKQSGKTILDFLKSDGFANRNFMQLIHDDSLTFKEDIQKAQVSGQGDSLHEHIANLAGSPAIKKGILQTVKVVDELVKVMGRHKPENIVIEMARENQTTQKGQKNSRERMKRIEEGIKELGSQILKEHPVENTQLQNEKLYLYYLQNGRDMYVDQELDINRLSDYDVDHIVPQSFLKDDSIDNKVLTRSDKARGKSDNVPSEEVVKKMKNYWRQLLNAKLITQRKFDNLTKAERGGLSELDKAGFIKRQLVETRQITKHVAQILDSRMNTKYDENDKLIREVKVITLKSKLVSDFRKDFQFYKVREINNYHHAHDAYLNAVVGTALIKKYPKLESEFVYGDYKVYDVRKMIAKSEQEIGKATAKYFFYSNIMNFFKTEITLANGEIRKRPLIETNGETGEIVWDKGRDFATVRKVLSMPQVNIVKKTEVQTGGFSKESILPKRNSDKLIARKKDWDPKKYGGFDSPTVAYSVLVVAKVEKGKSKKLKSVKELLGITIMERSSFEKNPIDFLEAKGYKEVKKDLIIKLPKYSLFELENGRKRMLASAGELQKGNELALPSKYVNFLYLASHYEKLKGSPEDNEQKQLFVEQHKHYLDEIIEQISEFSKRVILADANLDKVLSAYNKHRDKPIREQAENIIHLFTLTNLGAPAAFKYFDTTIDRKRYTSTKEVLDATLIHQSITGLYETRIDLSQLGGDGGGGGGGGGGIPWLMKKPLQLTTLVPLQEYEERLLKQTMLTGSYKEKLQSLFLKYDALWQHWENQVGHRRIKPHHIATGTVNPRPQKQYPINPKAKASIQTVINDLLKQGVLIQQNSIMNTPVYPVPKPDGKWRMVLDYREVNKTIPLIAAQNQHSAGILSSIFRGKYKTTLDLSNGFWAHSITPESYWLTAFTWLGQQYCWTRLPQGFLNSPALFTADVVDLLKEVPNVQVYVDDIYISHDDPREHLEQLEKVFSLLLNAGYVVSLKKSEIAQHEVEFLGFNITKEGRGLTETFKQKLLNITPPRDLKQLQSILGLLNFARNFIPNFSELVKPLYNIIATANGKYITWTTDNSQQLQNIISMLNSAENLEERNPEVRLIMKVNTSPSAGYIRFYNEFAKRPIMYLNYVYTKAEVKFTNTEKLLTTIHKGLIKALDLGMGQEILVYSPIVSMTKIQKTPLPERKALPIRWITWMSYLEDPRIQFHYDKTLPELQQVPTVTDDIIAKIKHPSEFSMVFYTDGSAIKHPNVNKSHNAGMGIAQVQFKPEFTVINTWSIPLGDHTAQLAEVAAVEFACKKALKIDGPVLIVTDSFYVAESVNKELPYWQSNGFFNNKKKPLKHVSKWKSIADCIQLKPDIIIIHEKGHQPTASTFHTEGNNLADKLATQGSYVVNAGKRTADGSEFEKRTADGSEFESPKKKAKVE

SEQ ID NO: 530 - protein, 2087 aa, synthetic construct
MPAAKRVKLDGGDKKYSIGLDIGTNSVGWAVITDEYKVPSKKFKVLGNTDRHSIKKNLIGALLFDSGETAEATRLKRTARRRYTRRKNRICYLQEIFSNEMAKVDDSFFHRLEESFLVEEDKKHERHPIFGNIVDEVAYHEKYPTIYHLRKKLVDSTDKADLRLIYLALAHMIKFRGHFLIEGDLNPDNSDVDKLFIQLVQTYNQLFEENPINASGVDAKAILSARLSKSRRLENLIAQLPGEKKNGLFGNLIALSLGLTPNFKSNFDLAEDAKLQLSKDTYDDDLDNLLAQIGDQYADLFLAAKNLSDAILLSDILRVNTEITKAPLSASMIKRYDEHHQDLTLLKALVRQQLPEKYKEIFFDQSKNGYAGYIDGGASQEEFYKFIKPILEKMDGTEELLVKLNREDLLRKQRTFDNGSIPHQIHLGELHAILRRQEDFYPFLKDNREKIEKILTFRIPYYVGPLARGNSRFAWMTRKSEETITPWNFEEVVDKGASAQSFIERMTNFDKNLPNEKVLPKHSLLYEYFTVYNELTKVKYVTEGMRKPAFLSGEQKKAIVDLLFKTNRKVTVKQLKEDYFKKIECFDSVEISGVEDRFNASLGTYHDLLKIIKDKDFLDNEENEDILEDIVLTLTLFEDREMIEERLKTYAHLFDDKVMKQLKRRRYTGWGRLSRKLINGIRDKQSGKTILDFLKSDGFANRNFMQLIHDDSLTFKEDIQKAQVSGQGDSLHEHIANLAGSPAIKKGILQTVKVVDELVKVMGRHKPENIVIEMARENQTTQKGQKNSRERMKRIEEGIKELGSQILKEHPVENTQLQNEKLYLYYLQNGRDMYVDQELDINRLSDYDVDHIVPQSFLKDDSIDNKVLTRSDKARGKSDNVPSEEVVKKMKNYWRQLLNAKLITQRKFDNLTKAERGGLSELDKAGFIKRQLVETRQITKHVAQILDSRMNTKYDENDKLIREVKVITLKSKLVSDFRKDFQFYKVREINNYHHAHDAYLNAVVGTALIKKYPKLESEFVYGDYKVYDVRKMIAKSEQEIGKATAKYFFYSNIMNFFKTEITLANGEIRKRPLIETNGETGEIVWDKGRDFATVRKVLSMPQVNIVKKTEVQTGGFSKESILPKRNSDKLIARKKDWDPKKYGGFDSPTVAYSVLVVAKVEKGKSKKLKSVKELLGITIMERSSFEKNPIDFLEAKGYKEVKKDLIIKLPKYSLFELENGRKRMLASAGELQKGNELALPSKYVNFLYLASHYEKLKGSPEDNEQKQLFVEQHKHYLDEIIEQISEFSKRVILADANLDKVLSAYNKHRDKPIREQAENIIHLFTLTNLGAPAAFKYFDTTIDRKRYTSTKEVLDATLIHQSITGLYETRIDLSQLGGDGGGSSGGGEAAAKGGIPWLMKKPLQLTTLVPLQEYEERLLKQTMLTGSYKEKLQSLFLKYDALWQHWENQVGHRRIKPHHIATGTVNPRPQKQYPINPKAKASIQTVINDLLKQGVLIQQNSIMNTPVYPVPKPDGKWRMVLDYREVNKTIPLIAAQNQHSAGILSSIFRGKYKTTLDLSNGFWAHSITPESYWLTAFTWLGQQYCWTRLPQGFLNSPALFTADVVDLLKEVPNVQVYVDDIYISHDDPREHLEQLEKVFSLLLNAGYVVSLKKSEIAQHEVEFLGFNITKEGRGLTETFKQKLLNITPPRDLKQLQSILGLLNFARNFIPNFSELVKPLYNIIATANGKYITWTTDNSQQLQNIISMLNSAENLEERNPEVRLIMKVNTSPSAGYIRFYNEFAKRPIMYLNYVYTKAEVKFTNTEKLLTTIHKGLIKALDLGMGQEILVYSPIVSMTKIQKTPLPERKALPIRWITWMSYLEDPRIQFHYDKTLPELQQVPTVTDDIIAKIKHPSEFSMVFYTDGSAIKHPNVNKSHNAGMGIAQVQFKPEFTVINTWSIPLGDHTAQLAEVAAVEFACKKALKIDGPVLIVTDSFYVAESVNKELPYWQSNGFFNNKKKPLKHVSKWKSIADCIQLKPDIIIIHEKGHQPTASTFHTEGNNLADKLATQGSYVVNAGKRTADGSEFEKRTADGSEFESPKKKAKVE

(The sequence listing continues in the following parts.)
